(19) United States
(12) Patent Application Publication
(10) Pub. No.: US 2004/0180344 A1
(43) Pub. Date: Sep. 16, 2004

(54) Novel therapeutic targets in cancer

(76) Inventors: David W. Morris, Davis, CA (US); Marc S. Malandro, Davis, CA (US)

Correspondence Address: MORRISON & FOERSTER LLP, 755 PAGE MILL RD, PALO ALTO, CA, 94304-1018, US

(21) Appl. No.: 10/388,838

(22) Filed: Mar. 14, 2003

(51) Int. Cl. C12Q 1/68; G01N 33/574; C07H 21/04; C07K 14/47

(52) U.S. Cl. 435/6; 435/7.23; 435/69.1; 435/320.1; 435/325; 530/350; 536/23.5

(57) ABSTRACT

The present invention relates to novel sequences for use in detection, diagnosis and treatment of cancers, especially lymphomas. The invention provides cancer-associated (CA) polynucleotide sequences whose expression is associated with cancer. The present invention provides CA polypeptides associated with cancer that are present on the cell surface and present novel therapeutic targets against cancer. The present invention further provides diagnostic compositions and methods for the detection of cancer. The present invention provides monoclonal and polyclonal antibodies specific for the CA polypeptides. The present invention also provides diagnostic tools and therapeutic compositions and methods for screening, prevention and treatment of cancer.

### CROSS-REFERENCE TO RELATED APPLICATIONS

[0001] This application is related to U.S. applications entitled “Novel Compositions and Methods in Cancer,” U.S. Ser. No. 10/034,650, filed Dec. 20, 2001; U.S. Ser. No. 10/035,832, filed Dec. 26, 2001; U.S. Ser. No. 10/004,113, filed Oct. 23, 2001; U.S. Ser. No. 09/997,722, filed Nov. 30, 2001; U.S. Ser. No. 10/085,117, filed Feb. 27, 2002; U.S. Ser. No. 10/0387,192, filed Mar. 1, 2002; U.S. Ser. No. 10/322,281, filed Dec. 17, 2002; U.S. Ser. No. 10/322,696, filed Dec. 17, 2002, U.S. Ser. No. 10/331,053, filed Dec. 26, 2002; and U.S. Ser. No. 10/330,773, filed Dec. 27, 2002, all of which are expressly incorporated herein by reference in their entirety.

### DESCRIPTION OF ACCOMPANYING CD-ROMS

[0002] Tables 1-27 are filed herewith in CD-ROM in accordance with 37 C.F.R. §§ 1.52 and 1.58. Two identical copies (marked “Copy 1” and “Copy 2”) of this CD-ROM are submitted.

[0003] Contents of the CD-ROM disks submitted herewith are hereby incorporated by reference into the Specification.

### TECHNICAL FIELD OF THE INVENTION

[0004] This invention relates generally to the field of cancer-associated genes. Specifically, it relates to novel sequences for use in diagnosis and treatment of cancer and tumors, as well as the use of the novel compositions in screening methods. The present invention provides methods of using cancer associated polynucleotides, their corresponding gene products and antibodies specific for the gene products in the detection, diagnosis, prevention and/or treatment of associated cancers.

### BACKGROUND OF THE INVENTION

[0005] Oncogenes are genes that can cause cancer. Carcinogenesis can occur by a wide variety of mechanisms, including infection of cells by viruses containing oncogenes, activation of protooncogenes in the host genome, and mutations of protooncogenes and tumor suppressor genes. Carcinogenesis is fundamentally driven by somatic cell evolution (i.e. mutation and natural selection of variants with progressive loss of growth control). The genes that serve as targets for these somatic mutations are classified as either protooncogenes or tumor suppressor genes, depending on whether their mutant phenotypes are dominant or recessive, respectively.

[0006] There are a number of viruses known to be involved in human cancer as well as in animal cancer. Of particular interest here are viruses that do not contain oncogenes themselves; these are slow-transforming retroviruses. They induce tumors by integrating into the host genome and affecting neighboring protooncogenes in a variety of ways. Provirus insertion mutation is a normal consequence of the retroviral life cycle. In infected cells, a DNA copy of the retrovirus genome (called a provirus) is integrated into the host genome. A newly integrated provirus can affect gene expression in cis at or near the integration site by one of two mechanisms. Type I insertion mutations up-regulate transcription of proximal genes as a consequence of regulatory sequences (enhancers and/or promoters) within the proviral long terminal repeats (LTRs). Type II insertion mutations cause truncation of coding regions due to either integration directly within an open reading frame or integration within an intron flanked on both sides by coding sequences. The analysis of sequences at or near the insertion sites has led to the identification of a number of new protooncogenes.

[0007] With respect to lymphoma and leukemia, retroviruses such as AKV murine leukemia virus (MLV) or SL3-3 MLV, are potent inducers of tumors when inoculated into susceptible newborn mice, or when carried in the germline. A number of sequences have been identified as relevant in the induction of lymphoma and leukemia by analyzing the insertion sites; see Sorensen et al., J. of Virology 74:2161 (2000); Hansen et al., Genome Res. 10(2):237-43 (2000); Sorensen et al., J. Virology 70:4063 (1996); Sorensen et al., J. Virology 67:7118 (1993); Joosten et al., Virology 268:308 (2000); and Li et al., Nature Genetics 23:348 (1999); all of which are expressly incorporated by reference herein. With respect to cancers, especially breast cancer, prostate cancer and cancers with epithelial origin, the mammalian retrovirus, mouse mammary tumor virus (MMTV) is a potent inducer of tumors when inoculated into susceptible newborn mice, or when carried in the germ line. Mammary Tumors in the Mouse, edited by J. Hilgers and M. Sluyser; Elsevier/North-Holland Biomedical Press; New York, N.Y.

[0008] The pattern of gene expression in a particular living cell is characteristic of its current state. Nearly all differences in the state or type of a cell are reflected in the differences in RNA levels of one or more genes. Comparing expression patterns of uncharacterized genes may provide clues to their function. High throughput analysis of expression of hundreds or thousands of genes can help in (a) identification of complex genetic diseases, (b) analysis of differential gene expression over time, between tissues and disease states, and (c) drug discovery and toxicology studies. Increase or decrease in the levels of expression of certain genes correlate with cancer biology. For example, oncogenes are positive regulators of tumorigenesis, while tumor suppressor genes are negative regulators of tumorigenesis. (Marshall, Cell, 64: 313-326 (1991); Weinberg, Science, 254: 1138-1146 (1991)).

[0009] Accordingly, it is an object of the invention to provide polynucleotide and polypeptide sequences involved in cancer and, in particular, in oncogenesis.

[0010] Immunotherapy, or the use of antibodies for therapeutic purposes has been used in recent years to treat cancer. Passive immunotherapy involves the use of monoclonal antibodies in cancer treatments. See for example, Cancer: Principles and Practice of Oncology, 6^{th} Edition (2001) Chapt. 20 pp. 495-508. Inherent therapeutic biological activity of these antibodies include direct inhibition of tumor cell growth or survival, and the ability to recruit the natural cell killing activity of the body's immune system. These agents are administered alone or in conjunction with radiation or chemotherapeutic agents. Rituxan® and Herceptin®, approved for treatment of lymphoma and breast cancer, respectively, are two examples of such therapeutics. Alternatively, antibodies are used to make antibody conjugates where the antibody is linked to a toxic agent and directs that agent to the tumor by specifically binding to the tumor. Mylotarg® is an example of an approved antibody conjugate used for the treatment of leukemia.

[0011] Accordingly, it is another object of this invention to provide antigens (cancer-associated polypeptides) associated with a variety of cancers as targets for diagnostic and/or therapeutic antibodies. These antigens are also useful for drug discovery (e.g., small molecules) and for further characterization of cellular regulation, growth, and differentiation.

### SUMMARY OF THE INVENTION

[0012] In accordance with the objects outlined above, the present invention provides methods for screening for compositions that modulate cancer, especially lymphoma and leukemia. The present invention also provides methods for screening for compositions which modulate carcinomas, especially mammary adenocarcinomas. Also provided herein are methods of inhibiting proliferation of a cell, preferably a lymphoma cell or a breast cancer cell. Methods of treatment of cancer, including diagnosis, are also provided herein.

[0013] In one aspect, a method of screening drug candidates comprises providing a cell that expresses a cancer-associated (CA) gene or fragments thereof. Preferred embodiments of CA genes are genes that are differentially expressed in cancer cells, preferably lymphatic, breast, prostate or epithelial cells, compared to other cells. Preferred embodiments of CA genes used in the methods herein include, but are not limited to the nucleic acids selected from Tables 1-9 (human genomic sequences of SEQ ID NOS: 4, 14, 36, 48, 58, 68, 84, 96 and 108, and sequences of SEQ ID NOS: 5, 7, 9, 15, 17, 19, 21, 23, 25, 27, 29, 31, 37, 39, 41, 43, 49, 51, 53, 59, 61, 63, 69, 71, 73, 75, 77, 79, 85, 87, 89, 91, 97, 99, 101, 103, 109, 111 and 113 corresponding to the human mRNAs generated therefrom). The methods further include adding a drug candidate to the cell and determining the effect of the drug candidate on the expression of the CA gene.

[0014] In one embodiment, the method of screening drug candidates includes comparing the level of expression in the absence of the drug candidate to the level of expression in the presence of the drug candidate.

[0015] Also provided herein is a method of screening for a bioactive agent capable of binding to a CA protein (CAP), the method comprising combining the CAP and a candidate bioactive agent, and determining the binding of the candidate agent to the CAP.

[0016] Further provided herein is a method for screening for a bioactive agent capable of modulating the activity of a CAP. In one embodiment, the method comprises combining the CAP and a candidate bioactive agent, and determining the effect of the candidate agent on the bioactivity of the CAP.

[0017] Also provided is a method of evaluating the effect of a candidate cancer drug comprising administering the drug to a patient and removing a cell sample from the patient. The expression profile of the cell is then determined. This method may further comprise comparing the expression profile of the patient to an expression profile of a healthy individual.

[0018] In a further aspect, a method for inhibiting the activity of a CA protein is provided. In one embodiment, the method comprises administering to a patient an inhibitor of a CA protein preferably selected from the group consisting of the sequences outlined in Tables 1-9 (SEQ ID NOS: 6, 8, 10, 16, 18, 20, 22, 24, 26, 28, 30, 32, 38, 40, 42, 44, 50, 52, 54, 60, 62, 64, 70, 72, 74, 76, 78, 80, 86, 88, 90, 92, 98, 100, 102, 104, 110, 112 and 114).

[0019] A method of neutralizing the effect of a CA protein, preferably a protein encoded by a nucleic acid selected from the group of sequences outlined in Tables 1-9 (human genomic sequences of SEQ ID NOS: 4, 14, 36, 48, 58, 68, 84, 96 and 108, and sequences of SEQ ID NOS: 5, 7, 9, 15, 17, 19, 21, 23, 25, 27, 29, 31, 37, 39, 41, 43, 49, 51, 53, 59, 61, 63, 69, 71, 73, 75, 77, 79, 85, 87, 89, 91, 97, 99, 101, 103, 109, 111 and 113 corresponding to the human mRNAs generated therefrom), is also provided. Preferably, the method comprises contacting an agent specific for said protein with said protein in an amount sufficient to effect neutralization.

[0020] Moreover, provided herein is a biochip comprising a nucleic acid segment which encodes a CA protein, preferably selected from the sequences outlined in Tables 1-9 (SEQ ID NOS: 5, 7, 9, 15, 17, 19, 21, 23, 25, 27, 29, 31, 37, 39, 41, 43, 49, 51, 53, 59, 61, 63, 69, 71, 73, 75, 77, 79, 85, 87, 89, 91, 97, 99, 101, 103, 109, 111 and 113).

[0021] Also provided herein is a method for diagnosing or determining the propensity to cancers, especially lymphoma or leukemia or carcinoma by sequencing at least one carcinoma or lymphoma gene of an individual. In yet another aspect of the invention, a method is provided for determining cancer including lymphoma and leukemia gene copy numbers in an individual.

[0022] The invention provides an isolated nucleic acid comprising at least 10, 12, 15, 20 or 30 contiguous nucleotides of a sequence selected from the group consisting of the polynucleotide sequences SEQ ID NOS: 5, 7, 9, 15, 17, 19, 21, 23, 25, 27, 29, 31, 37, 39, 41, 43, 49, 51, 53, 59, 61, 63, 69, 71, 73, 75, 77, 79, 85, 87, 89, 91, 97, 99, 101, 103, 109, 111 and 113 shown in Tables 1-9, or its complement, or an expression vector comprising the isolated nucleic acids and host cells comprising them.

[0023] In some embodiments, the polynucleotide, or its complement or a fragment thereof, further comprises a detectable label, is attached to a solid support, is prepared at least in part by chemical synthesis, is an antisense fragment, is single stranded, is double stranded or comprises a microarray.

[0024] The invention provides an isolated polypeptide, encoded within an open reading frame of a CA sequence selected from the group consisting of the polynucleotide sequences of SEQ ID NOS: 4, 14, 36, 48, 58, 68, 84, 96 and 108 shown in Tables 1-9, or its complement. The invention provides an isolated polypeptide, wherein said polypeptide comprises the amino acid sequence encoded by a polynucleotide selected from the group consisting of SEQ ID NOS: 5, 7, 9, 15, 17, 19, 21, 23, 25, 27, 29, 31, 37, 39, 41, 43, 49, 51, 53, 59, 61, 63, 69, 71, 73, 75, 77, 79, 85, 87, 89, 91, 97, 99, 101, 103, 109, 111 and 113 shown in Tables 1-9. The invention provides an isolated polypeptide, wherein said polypeptide comprises the amino acid sequence encoded by a polypeptide selected from the group consisting of SEQ ID NOS: 6, 8, 10, 16, 18, 20, 22, 24, 26, 28, 30, 32, 38, 40, 42, 44, 50, 52, 54, 60, 62, 64, 70, 72, 74, 76, 78, 80, 86, 88, 90, 92, 98, 100, 102, 104, 110, 112 and 114 shown in Tables 1-9.

[0025] The invention further provides an isolated polypeptide, comprising the amino acid sequence of an epitope of the amino acid sequence of a CA polypeptide selected from the group consisting of SEQ ID NOS: 6, 8, 10, 16, 18, 20, 22, 24, 26, 28, 30, 32, 38, 40, 42, 44, 50, 52, 54, 60, 62, 64, 70, 72, 74, 76, 78, 80, 86, 88, 90, 92, 98, 100, 102, 104, 110, 112 and 114 shown in Tables 1-9, wherein the polypeptide or fragment thereof may be attached to a solid support. In one embodiment the invention provides an isolated antibody (monoclonal or polyclonal) or antigen binding fragment thereof, that binds to such a polypeptide. The isolated antibody or antigen binding fragment thereof may be attached to a solid support, or further comprises a detectable label.

[0026] In one embodiment, the invention provides a kit for diagnosing the presence of cancer in a test sample, said kit comprising at least one polynucleotide that selectively hybridizes to a CA polynucleotide sequence shown in Tables 1-9, or its complement. In another embodiment the invention provides an electronic library comprising a CA polynucleotide, a CA polypeptide, or fragment thereof, shown in Tables 1-9.

[0027] In one embodiment, the invention provides a method of screening for anticancer activity comprising: (a) providing a cell that expresses a cancer associated (CA) gene encoded by a nucleic acid sequence selected from the group consisting of the CA sequences shown in Tables 1-9, or fragment thereof; (b) contacting a tissue sample derived from a cancer cell with an anticancer drug candidate; (c) monitoring an effect of the anticancer drug candidate on an expression of the CA polynucleotide in the tissue sample, and optionally (d) comparing the level of expression in the absence of said drug candidate to the level of expression in the presence of the drug candidate. The drug candidate may be an inhibitor of transcription, a G-protein coupled receptor antagonist, a growth factor antagonist, a serine-threonine kinase antagonist, a tyrosine kinase antagonist.

[0028] In one embodiment, the invention provides a method for detecting cancer associated with expression of a polypeptide in a test cell sample, comprising the steps of: (i) detecting a level of expression of at least one polypeptide selected from the group consisting of SEQ ID NOS: 6, 8, 10, 16, 18, 20, 22, 24, 26, 28, 30, 32, 38, 40, 42, 44, 50, 52, 54, 60, 62, 64, 70, 72, 74, 76, 78, 80, 86, 88, 90, 92, 98, 100, 102, 104, 110, 112 and 114 shown in Tables 1-9, or a fragment thereof; and (ii) comparing the level of expression of the polypeptide in the test sample with a level of expression of polypeptide in a normal cell sample, wherein an altered level of expression of the polypeptide in the test cell sample relative to the level of polypeptide expression in the normal cell sample is indicative of the presence of cancer in the test cell sample.

[0029] In another embodiment, the invention provides a method for detecting cancer associated with expression of a polypeptide in a test cell sample, comprising the steps of: (i) detecting a level of activity of at least one polypeptide selected from the group consisting of SEQ ID NOS: 6, 8, 10, 16, 18, 20, 22, 24, 26, 28, 30, 32, 38, 40, 42, 44, 50, 52, 54, 60, 62, 64, 70, 72, 74, 76, 78, 80, 86, 88, 90, 92, 98, 100, 102, 104, 110, 112 and 114 shown in Tables 1-9, or a fragment thereof, wherein said activity corresponds to at least one activity for the polypeptide listed in Table 11; and (ii) comparing the level of activity of the polypeptide in the test sample with a level of activity of polypeptide in a normal cell sample, wherein an altered level of activity of the polypeptide in the test cell sample relative to the level of polypeptide activity in the normal cell sample is indicative of the presence of cancer in the test cell sample.

[0030] In another embodiment, the invention provides a method for detecting cancer associated with the presence of an antibody in a test serum sample, comprising the steps of: (i) detecting a level of an antibody against an antigenic polypeptide selected from the group consisting of SEQ ID NOS: 6, 8, 10, 16, 18, 20, 22, 24, 26, 28, 30, 32, 38, 40, 42, 44, 50, 52, 54, 60, 62, 64, 70, 72, 74, 76, 78, 80, 86, 88, 90, 92, 98, 100, 102, 104, 110, 112 and 114 shown in Tables 1-9, or antigenic fragment thereof; and (ii) comparing said level of said antibody in the test sample with a level of said antibody in the control sample, wherein an altered level of antibody in said test sample relative to the level of antibody in the control sample is indicative of the presence of cancer in the test serum sample.

[0031] The invention provides a method for screening for a bioactive agent capable of modulating the activity of a CA protein (CAP), wherein said CAP is encoded by a nucleic acid comprising a nucleic acid sequence selected from the group consisting of the polynucleotide sequences SEQ ID NOS: 5, 7, 9, 15, 17, 19, 21, 23, 25, 27, 29, 31, 37, 39, 41, 43, 49, 51, 53, 59, 61, 63, 69, 71, 73, 75, 77, 79, 85, 87, 89, 91, 97, 99, 101, 103, 109, 111 and 113 shown in Tables 1-9, said method comprising: a) combining said CAP and a candidate bioactive agent; and b) determining the effect of the candidate agent on the bioactivity of said CAP. According to the method the bioactive agent: affects the expression of the CA protein (CAP); affects the activity of the CA protein (CAP), wherein such activity is selected from the activities listed in Table 11; is a modulator of ion transport and further wherein the nucleic acid sequence is selected from the group consisting of SEQ ID NOS: 59, 61, 63 and 71 shown in Tables 1-9; is a modulator of ATP binding and further wherein the nucleic acid sequence is selected from the group consisting of SEQ ID NOS: 5, 7, 9, 39, 41, 69, 71, 73, 75, 77 and 79 shown in Tables 1-9; is a modulator of transcription and further wherein the nucleic acid sequence is selected from the group consisting of SEQ ID NOS: 20, 22, 26, 28, 30 and 32 shown in Tables 1-9; is an inhibitor of cell adhesion and further wherein the nucleic acid sequence is selected from the group consisting of SEQ ID NOS: 39, 41, 69, 85, 87 and 91 shown in Tables 1-9; is a modulator of signalling and further wherein the nucleic acid sequence is selected from the group consisting of SEQ ID NOS: 17, 21, 25, 29, 31, 39, 41, 49, 51, 53, 69, 71, 73, 75, 77, 79, 85, 87, 89 and 109; is a protein tyrosine kinase agonist or antagonist and further wherein the nucleic acid sequence is selected from the group consisting of SEQ ID NOS: 49, 51, 53, 69, 71, 73, 75, 77 and 79.

[0032] In one embodiment, the invention provides a method for diagnosing cancer comprising: a) determining the expression of one or more genes comprising a nucleic acid sequence selected from the group consisting of the human genomic and mRNA sequences outlined in Tables 1-9, in a first tissue type of a first individual; and b) comparing said expression of said gene(s) from a second normal tissue type from said first individual or a second unaffected individual; wherein a difference in said expression indicates that the first individual has cancer.

[0033] In another embodiment the invention provides a method for treating cancers comprising administering to a patient a bioactive agent modulating the activity of a CA protein (CAP), wherein said CAP is encoded by a nucleic acid comprising a nucleic acid sequence selected from the group consisting of the human nucleic acid sequences in Tables 1-9 and further wherein the bioactive agent: binds to the CA protein; is a modulator of ion transport and further wherein the CAP sequence is selected from the group consisting of SEQ ID NOS: 60, 62, 64 and 72 shown in Tables 1-9; is a transcription factor antagonist and further wherein the CAP sequence is selected from the group consisting of SEQ ID NOS: 20, 22, 26, 28, 30 and 32 shown in Tables 1-9; is a modulator of ATP binding and further wherein the CAP sequence is selected from the group consisting of SEQ ID NOS: 6, 8, 10, 40, 42, 70, 72, 74, 76, 78 and 80 shown in Tables 1-9; is a protein tyrosine kinase antagonist and further wherein the CAP sequence is selected from the group consisting of SEQ ID NOS: 50, 52, 54, 70, 72, 74, 76, 78 and 80 shown in Tables 1-9; is an modulator of cell adhesion and further wherein the CAP sequence is selected from the group consisting of SEQ ID NOS: 40, 42, 70, 86, 88 and 92 shown in Tables 1-9; is a modulator of signal transduction and further wherein the CAP sequence is selected from the group consisting of SEQ ID NOS: 18, 22, 26, 30, 32, 40, 42, 50, 52, 54, 70, 72, 74, 76, 78, 80, 86, 88, 90 and 110.

[0034] The invention provides monoclonal antibodies that preferentially binds to a CA protein (CAP) that is expressed on a cell surface, wherein the CA protein selected from the group consisting of SEQ ID NOS: 6, 8, 10, 16, 18, 20, 22, 24, 26, 28, 30, 32, 38, 40; 42, 44, 50, 52, 54, 60, 62, 64, 70, 72, 74, 76, 78, 80, 86, 88, 90, 92, 98, 100, 102, 104, 110, 112 and 114; preferably to the extracellular domain of the CA protein; preferably to a CA protein differentially expressed on a cancer cell surface relative to a normal cell surface or preferably to at least one human cancer cell line; preferably linked to a therapeutic agent; or preferably humanized. Kits and pharmaceutical compositions for detecting a presence or an absence of cancer cells in an individual, and comprising such antibodies are also provided.

[0035] The invention also provides a method for detecting a presence or an absence of cancer cells in an individual, the method comprising: contacting cells from the individual with the antibody according to the invention; and detecting a complex of a CAP from the cancer cells and the antibody, wherein detection of the complex correlates with the presence of cancer cells in the individual. In one embodiment the invention provides a method for inhibiting growth of cancer cells in an individual, the method comprising: administering to the individual an effective amount of a pharmaceutical composition according to the invention. In another embodiment the invention provides a method for delivering a therapeutic agent to cancer cells in an individual, the method comprising: administering to the individual an effective amount of a pharmaceutical composition according to according to the invention.

[0036] Novel sequences associated with cancer are also provided herein. Other aspects of the invention will become apparent to the skilled artisan by the following description of the invention.

### BRIEF DESCRIPTION OF THE FIGURES

[0037] FIG. 1 depicts PCR amplification of host-provirus junction fragments.

[0038] FIG. 2 shows an example of average threshold cycle (CT) values for a housekeeper gene and target gene.

[0039] FIG. 3 shows an example of the calculated difference (AACT) between the CT values of target and housekeeper genes (ACT) for various samples.

[0040] FIG. 4 shows the AACT and comparative expression level for each sample from FIG. 3.

### DETAILED DESCRIPTION OF PREFERRED EMBODIMENTS

[0041] The present invention is directed to a number of sequences associated with cancers, especially lymphoma, breast cancer or prostate cancer. The relatively tight linkage between clonally-integrated proviruses and protooncogenes forms “provirus tagging”, in which slow-transforming retroviruses that act by an insertion mutation mechanism are used to isolate protooncogenes. In some models, uninfected animals have low cancer rates, and infected animals have high cancer rates. It is known that many of the retroviruses involved do not carry transduced host protooncogenes or pathogenic trans-acting viral genes, and thus the cancer incidence must therefore be a direct consequence of proviral integration effects into host protooncogenes. Since proviral integration is random, rare integrants will “activate” host protooncogenes that provide a selective growth advantage, and these rare events result in new proviruses at clonal stoichiometries in tumors. In contrast to mutations caused by chemicals, radiation, or spontaneous errors, protooncogene insertion mutations can be easily located by virtue of the fact that a convenient-sized genetic marker of known sequence (the provirus) is present at the site of mutation. Host sequences that flank clonally integrated proviruses can be cloned using a variety of strategies. Once these sequences are in hand, the tagged protooncogenes can be subsequently identified. The presence of provirus at the same locus in two or more independent tumors is prima facie evidence that a protooncogene is present at or very near the provirus integration sites. This is because the genome is too large for random integrations to result in observable clustering. Any clustering that is detected is unequivocal evidence for biological selection (i.e. the tumor phenotype). Moreover, the pattern of proviral integrants (including orientations) provides compelling positional information that makes localization of the target gene at each cluster relatively simple. The three mammalian retroviruses that are known to cause cancer by an insertion mutation mechanism are FeLV (leukemia/lymphoma in cats), MLV (leukemia/lymphoma in mice and rats), and MMTV (mammary cancer in mice).

[0042] Thus, the use of oncogenic retroviruses, whose sequences insert into the genome of the host organism resulting in cancer, allows the identification of host sequences involved in cancer. These sequences may then be used in a number of different ways, including diagnosis, prognosis, screening for modulators (including both agonists and antagonists), antibody generation (for immunotherapy and imaging), etc. However, as will be appreciated by those in the art, oncogenes that are identified in one type of cancer such as lymphoma or leukemia have a strong likelihood of being involved in other types of cancers as well. Thus, while the sequences outlined herein are initially identified as correlated with lymphoma, they can also be found in other types of cancers as well, outlined below.

[0043] Definitions

[0044] Accordingly, the present invention provides nucleic acid and protein sequences that are associated with cancer, herein termed “cancer associated” or “CA” sequences. In one embodiment, the present invention provides nucleic acid and protein sequences that are associated with cancers that originate in lymphatic tissue, herein termed “lymphoma associated,” “leukemia associated” or “LA” sequences. In another embodiment, the present invention provides nucleic acid and protein sequences that are associated with carcinomas which originate in breast tissue, herein termed “breast cancer associated” or “BC” sequences.

[0045] Suitable cancers that can be diagnosed or screened for using the methods of the present invention include cancers classified by site or by histological type. Cancers classified by site include cancer of the oral cavity and pharynx (lip, tongue, salivary gland, floor of mouth, gum and other mouth, nasopharynx, tonsil, oropharynx, hypopharynx, other oral/pharynx); cancers of the digestive system (esophagus; stomach; small intestine; colon and rectum; anus, anal canal, and anorectum; liver; intrahepatic bile duct; gallbladder; other biliary; pancreas; retroperitoneum; peritoneum, omentum, and mesentery; other digestive); cancers of the respiratory system (nasal cavity, middle ear, and sinuses; larynx; lung and bronchus; pleura; trachea, mediastinum, and other respiratory); cancers of the mesothelioma; bones and joints; and soft tissue, including heart; skin cancers, including melanomas and other non-epithelial skin cancers; Kaposi's sarcoma and breast cancer; cancer of the female genital system (cervix uteri; corpus uteri; uterus, nos; ovary; vagina; vulva; and other female genital); cancers of the male genital system (prostate gland; testis; penis; and other male genital); cancers of the urinary system (urinary bladder; kidney and renal pelvis; ureter; and other urinary); cancers of the eye and orbit; cancers of the brain and nervous system (brain; and other nervous system); cancers of the endocrine system (thyroid gland and other endocrine, including thymus); lymphomas (Hodgkin's disease and non-Hodgkin's lymphoma), multiple myeloma, and leukemias (lymphocytic leukemia; myeloid leukemia; monocytic leukemia; and other leukemias).

[0046] Other cancers, classified by histological type, that may be associated with the sequences of the invention include, but are not limited to, Neoplasm, malignant; Carcinoma, NOS; Carcinoma, undifferentiated, NOS; Giant and spindle cell carcinoma; Small cell carcinoma, NOS; Papillary carcinoma, NOS; Squamous cell carcinoma, NOS; Lymphoepithelial carcinoma; Basal cell carcinoma, NOS; Pilomatrix carcinoma; Transitional cell carcinoma, NOS; Papillary transitional cell carcinoma; Adenocarcinoma, NOS; Gastrinoma, malignant; Cholangiocarcinoma; Hepatocellular carcinoma, NOS; Combined hepatocellular carcinoma and cholangiocarcinoma; Trabecular adenocarcinoma; Adenoid cystic carcinoma; Adenocarcinoma in adenomatous polyp; Adenocarcinoma, familial polyposis coli; Solid carcinoma, NOS; Carcinoid tumor, malignant; Bronchiolo-alveolar adenocarcinoma; Papillary adenocarcinoma, NOS; Chromophobe carcinoma; Acidophil carcinoma; Oxyphilic adenocarcinoma; Basophil carcinoma; Clear cell adenocarcinoma, NOS; Granular cell carcinoma; Follicular adenocarcinoma, NOS; Papillary and follicular adenocarcinoma; Nonencapsulating sclerosing carcinoma; Adrenal cortical carcinoma; Endometroid carcinoma; Skin appendage carcinoma; Apocrine adenocarcinoma; Sebaceous adenocarcinoma; Ceruminous adenocarcinoma; Mucoepidermoid carcinoma; Cystadenocarcinoma, NOS; Papillary cystadenocarcinoma, NOS; Papillary serous cystadenocarcinoma; Mucinous cystadenocarcinoma, NOS; Mucinous adenocarcinoma; Signet ring cell carcinoma; Infiltrating duct carcinoma; Medullary carcinoma, NOS; Lobular carcinoma; Inflammatory carcinoma; Paget's disease, mammary; Acinar cell carcinoma; Adenosquamous carcinoma; Adenocarcinoma w/ squamous metaplasia; Thymoma, malignant; Ovarian stromal tumor, malignant; Thecoma, malignant; Granulosa cell tumor, malignant; Androblastoma, malignant; Sertoli cell carcinoma; Leydig cell tumor, malignant; Lipid cell tumor, malignant; Paraganglioma, malignant; Extra-mammary paraganglioma, malignant; Pheochromocytoma; Glomangiosarcoma; Malignant melanoma, NOS; Amelanotic melanoma; Superficial spreading melanoma; Malig melanoma in giant pigmented nevus; Epithelioid cell melanoma; Blue nevus, malignant; Sarcoma, NOS; Fibrosarcoma, NOS; Fibrous histiocytoma, malignant; Myxosarcoma; Liposarcoma, NOS; Leiomyosarcoma, NOS; Rhabdomyosarcoma, NOS; Embryonal rhabdomyosarcoma; Alveolar rhabdomyosarcoma; Stromal sarcoma, NOS; Mixed tumor, malignant, NOS; Mullerian mixed tumor; Nephroblastoma; Hepatoblastoma; Carcinosarcoma, NOS; Mesenchymoma, malignant; Brenner tumor, malignant; Phyllodes tumor, malignant; Synovial sarcoma, NOS; Mesothelioma, malignant; Dysgerminoma; Embryonal carcinoma, NOS; Teratoma, malignant, NOS; Struma ovarii, malignant; Choriocarcinoma; Mesonephroma, malignant; Hemangiosarcoma; Hemangioendothelioma, malignant; Kaposi's sarcoma; Hemangiopericytoma, malignant; Lymphangiosarcoma; Osteosarcoma, NOS; Juxtacortical osteosarcoma; Chondrosarcoma, NOS; Chondroblastoma, malignant; Mesenchymal chondrosarcoma; Giant cell tumor of bone; Ewing's sarcoma; Odontogenic tumor, malignant; Ameloblastic odontosarcoma; Ameloblastoma, malignant; Ameloblastic fibrosarcoma; Pinealoma, malignant; Chordoma; Glioma, malignant; Ependymoma, NOS; Astrocytoma, NOS; Protoplasmic astrocytoma; Fibrillary astrocytoma; Astroblastoma; Glioblastoma, NOS; Oligodendroglioma, NOS; Oligodendroblastoma; Primitive neuroectodermal; Cerebellar sarcoma, NOS; Ganglioneuroblastoma; Neuroblastoma, NOS; Retinoblastoma, NOS; Olfactory neurogenic tumor; Meningioma, malignant; Neurofibrosarcoma; Neurilemmoma, malignant; Granular cell tumor, malignant; Malignant lymphoma, NOS; Hodgkin's disease, NOS; Hodgkin's; paragranuloma, NOS; Malignant lymphoma, small lymphocytic; Malignant lymphoma, large cell, diffuse; Malignant lymphoma, follicular, NOS; Mycosis fungoides; Other specified non-Hodgkin's lymphomas; Malignant histiocytosis; Multiple myeloma; Mast cell sarcoma; Immunoproliferative small intestinal disease; Leukemia, NOS; Lymphoid leukemia, NOS; Plasma cell leukemia; Erythroleukemia; Lymphosarcoma cell leukemia; Myeloid leukemia, NOS; Basophilic leukemia; Eosinophilic leukemia; Monocytic leukemia, NOS; Mast cell leukemia; Megakaryoblastic leukemia; Myeloid sarcoma; and Hairy cell leukemia.

[0047] In addition, the CA genes may be involved in other diseases such as, but not limited to, diseases associated with aging or neurodegeneration.

[0048] “Association” in this context means that the nucleotide or protein sequences are either differentially expressed, activated, inactivated or altered in cancers as compared to normal tissue. As outlined below, CA sequences include those that are up-regulated (i.e. expressed at a higher level), as well as those that are down-regulated (i.e. expressed at a lower level), in cancers. CA sequences also include sequences that have been altered (i.e., truncated sequences or sequences with substitutions, deletions or insertions, including point mutations) and show either the same expression profile or an altered profile. In a preferred embodiment, the CA sequences are from humans; however, as will be appreciated by those in the art, CA sequences from other organisms may be useful in animal models of disease and drug evaluation; thus, other CA sequences are provided, from vertebrates, including mammals, including rodents (rats, mice, hamsters, guinea pigs, etc.), primates, and farm animals (including sheep, goats, pigs, cows, horses, etc). In some cases, prokaryotic CA sequences may be useful. CA sequences from other organisms may be obtained using the techniques outlined below.

[0049] CA sequences include both nucleic acid and amino acid sequences. In a preferred embodiment, the CA sequences are recombinant nucleic acids. By the term “recombinant nucleic acid” herein is meant nucleic acid, originally formed in vitro, in general, by the manipulation of nucleic acid by polymerases and endonucleases, in a form not normally found in nature. Thus a recombinant nucleic acid is also an isolated nucleic acid, in a linear form, or cloned in a vector formed in vitro by ligating DNA molecules that are not normally joined, are both considered recombinant for the purposes of this invention. It is understood that once a recombinant nucleic acid is made and reintroduced into a host cell or organism, it will replicate using the in vivo cellular machinery of the host cell rather than in vitro manipulations; however, such nucleic acids, once produced recombinantly, although subsequently replicated in vivo, are still considered recombinant or isolated for the purposes of the invention. As used herein a “polynucleotide” or “nucleic acid” is a polymeric form of nucleotides of any length, either ribonucleotides or deoxyribonucleotides. This term refers only to the primary structure of the molecule. Thus, this term includes double- and single-stranded DNA and RNA. It also includes known types of modifications, for example, labels which are known in the art, methylation, “caps”, substitution of one or more of the naturally occurring nucleotides with an analog, internucleotide modifications such as, for example, those with uncharged linkages (e.g., phosphorothioates, phosphorodithioates, etc.), those containing pendant moieties, such as, for example proteins (including e.g., nucleases, toxins, antibodies, signal peptides, poly-L-lysine, etc.), those with intercalators (e.g., acridine, psoralen, etc.), those containing chelators (e.g., metals, radioactive metals, etc.), those containing alkylators, those with modified linkages (e.g., alpha anomeric nucleic acids, etc.), as well as unmodified forms of the polynucleotide.

[0050] As used herein, a polynucleotide “derived from” a designated sequence refers to a polynucleotide sequence which is comprised of a sequence of approximately at least about 6 nucleotides, preferably at least about 8 nucleotides, more preferably at least about 10-12 nucleotides, and even more preferably at least about 15-20 nucleotides corresponding to a region of the designated nucleotide sequence. “Corresponding” means homologous to or complementary to the designated sequence. Preferably, the sequence of the region from which the polynucleotide is derived is homologous to or complementary to a sequence that is unique to a CA gene.

[0051] Similarly, a “recombinant protein” is a protein made using recombinant techniques, i.e. through the expression of a recombinant nucleic acid as depicted above. A recombinant protein is distinguished from naturally occurring protein by at least one or more characteristics. For example, the protein may be isolated or purified away from some or all of the proteins and compounds with which it is normally associated in its wild type host, and thus may be substantially pure. For example, an isolated protein is unaccompanied by at least some of the material with which it is normally associated in its natural state, preferably constituting at least about 0.5%, more preferably at least about 5% by weight of the total protein in a given sample. A substantially pure protein comprises about 50-75% by weight of the total protein, with about 80% being preferred, and about 90% being particularly preferred. The definition includes the production of a CA protein from one organism in a different organism or host cell. Alternatively, the protein may be made at a significantly higher concentration than is normally seen, through the use of an inducible promoter or high expression promoter, such that the protein is made at increased concentration levels. Alternatively, the protein may be in a form not normally found in nature, as in the addition of an epitope tag or amino acid substitutions, insertions and deletions, as discussed below.

[0052] In a preferred embodiment, the CA sequences are nucleic acids. As will be appreciated by those in the art and is more fully outlined below, CA sequences are useful in a variety of applications, including diagnostic applications, which will detect naturally occurring nucleic acids, as well as screening applications; for example, biochips comprising nucleic acid probes to the CA sequences can be generated. In the broadest sense, use of “nucleic acid,” “polynucleotide” or “oligonucleotide” or equivalents herein means at least two nucleotides covalently linked together. In some embodiments, an oligonucleotide is an oligomer of 6, 8, 10, 12, 20, 30 or up to 100 nucleotides. A “polynucleotide” or “oligonucleotide” may comprise DNA, RNA, PNA or a polymer of nucleotides linked by phosphodiester and/or any alternate bonds.

[0053] A nucleic acid of the present invention generally contains phosphodiester bonds, although in some cases, as outlined below (for example, in antisense applications or when a nucleic acid is a candidate drug agent), nucleic acid analogs may have alternate backbones, comprising, for example, phosphoramidate (Beaucage et al., Tetrahedron 49(10):1925 (1993) and references therein; Letsinger, J. Org. Chem. 35:3800 (1970); Sprinzl et al., Eur. J. Biochem. 81:579 (1977); Letsinger et al., Nucl. Acids Res. 14:3487 (1986); Sawai et al, Chem. Lett. 805 (1984), Letsinger et al., J. Am. Chem. Soc. 110:4470 (1988); and Pauwels et al., Chemica Scripta 26:141 91986)), phosphorothioate (Mag et al., Nucleic Acids Res. 19:1437 (1991); and U.S. Pat. No. 5,644,048), phosphorodithioate (Briu et al., J. Am. Chem. Soc. 111:2321 (1989), O-methylphosphoroamidite linkages (see Eckstein, Oligonucleotides and Analogues: A Practical Approach, Oxford University Press), and peptide nucleic acid backbones and linkages (see Egholm, J. Am. Chem. Soc. 114:1895 (1992); Meier et al., Chem. Int. Ed. Engl. 31:1008 (1992); Nielsen, Nature, 365:566 (1993); Carlsson et al., Nature 380:207 (1996), all of which are incorporated by reference). Other analog nucleic acids include those with positive backbones (Denpcy et al., Proc. Natl. Acad. Sci. USA 92:6097 (1995); non-ionic backbones (U.S. Pat. Nos. 5,386,023,% 5,637,684, 5,602,240, 5,216,141 and 4,469,863; Kiedrowshi et al., Angew. Chem. Intl. Ed. English 30:423 (1991); Letsinger et al., J. Am. Chem. Soc. 110:4470 (1988); Letsinger et al., Nucleoside & Nucleotide 13:1597 (1994); Chapters 2 and 3, ASC Symposium Series 580, “Carbohydrate Modifications in Antisense Research”, Ed. Y. S. Sanghui and P. Dan Cook; Mesmaeker et al., Bioorganic & Medicinal Chem. Lett. 4:395 (1994); Jeffs et al., J. Biomolecular NMR 34:17 (1994); Tetrahedron Lett. 37:743 (1996)) and non-ribose backbones, including those described in U.S. Pat. Nos. 5,235,033 and 5,034,506, and Chapters 6 and 7, ASC Symposium Series 580, “Carbohydrate Modifications in Antisense Research”, Ed. Y. S. Sanghui and P. Dan Cook. Nucleic acids containing one or more carbocyclic sugars are also included within one definition of nucleic acids (see Jenkins et al., Chem. Soc. Rev. (1995) pp169-176). Several nucleic acid analogs are described in Rawls, C & E News Jun. 2, 1997 page 35. All of these references are hereby expressly incorporated by reference. These modifications of the ribose-phosphate backbone may be done for a variety of reasons, for example to increase the stability and half-life of such molecules in physiological environments for use in anti-sense applications or as probes on a biochip.

[0054] As will be appreciated by those in the art, all of these nucleic acid analogs may find use in the present invention. In addition, mixtures of naturally occurring nucleic acids and analogs can be made; alternatively, mixtures of different nucleic acid analogs, and mixtures of naturally occurring nucleic acids and analogs may be made.

[0055] The nucleic acids may be single stranded or double stranded, as specified, or contain portions of both double stranded or single stranded sequence. As will be appreciated by those in the art, the depiction of a single strand “Watson” also defines the sequence of the other strand “Crick”; thus the sequences described herein also includes the complement of the sequence. The nucleic acid may be DNA, both genomic and cDNA, RNA, or a hybrid, where the nucleic acid contains any combination of deoxyribo- and ribo-nucleotides, and any combination of bases, including uracil, adenine, thymine, cytosine, guanine, inosine, xanthine, hypoxanthine, isocytosine, isoguanine, etc. As used herein, the term “nucleoside” includes nucleotides and nucleoside and nucleotide analogs, and modified nucleosides such as amino modified nucleosides. In addition, “nucleoside” includes non-naturally occurring analog structures. Thus for example the individual units of a peptide nucleic acid, each containing a base, are referred to herein as a nucleoside.

[0056] As used herein, the term “tag,” “sequence tag” or “primer tag sequence” refers to an oligonucleotide with specific nucleic acid sequence that serves to identify a batch of polynucleotides bearing such tags therein. Polynucleotides from the same biological source are covalently tagged with a specific sequence tag so that in subsequent analysis the polynucleotide can be identified according to its source of origin. The sequence tags also serve as primers for nucleic acid amplification reactions.

[0057] A “microarray” is a linear or two-dimensional array of preferably discrete regions, each having a defined area, formed on the surface of a solid support. The density of the discrete regions on a microarray is determined by the total numbers of target polynucleotides to be detected on the surface of a single solid phase support, preferably at least about 50/cm², more preferably at least about 100/cm²; even more preferably at least about 500/cm², and still more preferably at least about 1,000/Cm². As used herein, a DNA microarray is an array of oligonucleotide primers placed on a chip or other surfaces used to amplify or clone target polynucleotides. Since the position of each particular group of primers in the array is known, the identities of the target polynucleotides can be determined based on their binding to a particular position in the microarray.

[0058] A “linker” is a synthetic oligodeoxyribonucleotide that contains a restriction site. A linker may be blunt end-ligated onto the ends of DNA fragments to create restriction sites that can be used in the subsequent cloning of the fragment into a vector molecule.

[0059] The term “label” refers to a composition capable of producing a detectable signal indicative of the presence of the target polynucleotide in an assay sample. Suitable labels include radioisotopes, nucleotide chromophores, enzymes, substrates, fluorescent molecules, chemiluminescent moieties, magnetic particles, bioluminescent moieties, and the like. As such, a label is any composition detectable by spectroscopic, photochemical, biochemical, immunochemical, electrical, optical, chemical, or any other appropriate means. The term “label” is used to refer to any chemical group or moiety having a detectable physical property or any compound capable of causing a chemical group or moiety to exhibit a detectable physical property, such as an enzyme that catalyzes conversion of a substrate into a detectable product. The term “label” also encompasses compounds that inhibit the expression of a particular physical property. The label may also be a compound that is a member of a binding pair, the other member of which bears a detectable physical property.

[0060] The term “support” refers to conventional supports such as beads, particles, dipsticks, fibers, filters, membranes, and silane or silicate supports such as glass slides.

[0061] The term “amplify” is used in the broad sense to mean creating an amplification product which may include, for example, additional target molecules, or target-like molecules or molecules complementary to the target molecule, which molecules are created by virtue of the presence of the target molecule in the sample. In the situation where the target is a nucleic acid, an amplification product can be made enzymatically with DNA or RNA polymerases or reverse transcriptases.

[0062] As used herein, a “biological sample” refers to a sample of tissue or fluid isolated from an individual, including but not limited to, for example, blood, plasma, serum, spinal fluid, lymph fluid, skin, respiratory, intestinal and genitourinary tracts, tears, saliva, milk, cells (including but not limited to blood cells), tumors, organs, and also samples of in vitro cell culture constituents.

[0063] The term “biological sources” as used herein refers to the sources from which the target polynucleotides are derived. The source can be of any form of “sample” as described above, including but not limited to, cell, tissue or fluid. “Different biological sources” can refer to different cells/tissues/organs of the same individual, or cells/tissues/organs from different individuals of the same species, or cells/tissues/organs from different species.

[0064] Cancer-Associated Sequences

[0065] The CA sequences of the invention were initially identified by infection of mice with a retrovirus such as murine leukemia virus (MLV) resulting in lymphoma. Retroviruses have a genome that is made out of RNA. After a retrovirus infects a host cell, a double stranded DNA copy of the retrovirus genome (a “provirus”) is inserted into the genomic DNA of the host cell. The integrated provirus may affect the expression of host genes at or near the site of integration—a phenomenon known as retroviral insertional mutagenesis. Possible changes in the expression of host cell genes include: (i) increased expression of genes near the site of integration resulting from the proximity of elements in the provirus that act as transcriptional promoters and enhancers, (ii) functional inactivation of a gene caused by the integration of a provirus into the gene itself thus preventing the synthesis of a functional gene product, or (iii) expression of a mutated protein that has a different activity to the normal protein. Typically such a protein would be prematurely truncated and lack a regulatory domain near the C terminus. Such a protein might be constitutively active, or act as a dominant negative inhibitor of the normal protein. For example, retrovirus enhancers, including that of SL3-3, are known to act on genes up to approximately 200 kilobases from the insertion site. Moreover, many of these sequences are also involved in other cancers and disease states. Sequences of mouse genes according to this invention, that are identified in this manner are shown as mDxx-yyy in Tables 1-9.

[0066] A CA sequence can be initially identified by substantial nucleic acid and/or amino acid sequence homology to the CA sequences outlined herein. Such homology can be based upon the overall nucleic acid or amino acid sequence, and is generally determined as outlined below, using either homology programs or hybridization conditions.

[0067] In one embodiment, CA sequences are those that are up-regulated in cancers; that is, the expression of these genes is higher in cancer tissue as compared to normal tissue of the same differentiation stage. “Up-regulation” as used herein means increased expression by about 50%, preferably about 100%, more preferably about 150% to about 200%, with up-regulation from 300% to 1000% being preferred.

[0068] In another embodiment, CA sequences are those that are down-regulated in cancers; that is, the expression of these genes is lower in cancer tissue as compared to normal tissue of the same differentiation stage. “Down-regulation” as used herein means decreased expression by about 50%, preferably about 100%, more preferably about 150% to about 200%, with down-regulation from 300% to 1000% to no expression being preferred.

[0069] In yet another embodiment, CA sequences are those that have altered sequences but show either the same or an altered expression profile as compared to normal lymphoid tissue of the same differentiation stage. “Altered CA sequences” as used herein also refers to sequences that are truncated, contain insertions or contain point mutations.

[0070] CA proteins of the present invention may be classified as secreted proteins, transmembrane proteins or intracellular proteins. In a preferred embodiment the CA protein is an intracellular protein. Intracellular proteins may be found in the cytoplasm and/or in the nucleus. Intracellular proteins are involved in all aspects of cellular function and replication (including, for example, signaling pathways); aberrant expression of such proteins results in unregulated or disregulated cellular processes. For example, many intracellular proteins have enzymatic activity such as protein kinase activity, protein phosphatase activity, protease activity, nucleotide cyclase activity, polymerase activity and the like. Intracellular proteins also serve as docking proteins that are involved in organizing complexes of proteins, or targeting proteins to various subcellular localizations, and are involved in maintaining the structural integrity of organelles.

[0071] An increasingly appreciated concept in characterizing intracellular proteins is the presence in the proteins of one or more motifs for which defined functions have been attributed. In addition to the highly conserved sequences found in the enzymatic domain of proteins, highly conserved sequences have been identified in proteins that are involved in protein-protein interaction. For example, Src-homology-2 (SH2) domains bind tyrosine-phosphorylated targets in a sequence dependent manner. PTB domains, which are distinct from SH2 domains, also bind tyrosine phosphorylated targets. SH3 domains bind to proline-rich targets. In addition, PH domains, tetratricopeptide repeats and WD domains to name only a few, have been shown to mediate protein-protein interactions. Some of these may also be involved in binding to phospholipids or other second messengers. As will be appreciated by one of ordinary skill in the art, these motifs can be identified on the basis of primary sequence; thus, an analysis of the sequence of proteins may provide insight into both the enzymatic potential of the molecule and/or molecules with which the protein may associate.

[0072] In a preferred embodiment, the CA sequences are transmembrane proteins. Transmembrane proteins are molecules that span the phospholipid bilayer of a cell. They may have an intracellular domain, an extracellular domain, or both. The intracellular domains of such proteins may have a number of functions including those already described for intracellular proteins. For example, the intracellular domain may have enzymatic activity and/or may serve as a binding site for additional proteins. Frequently the intracellular domain of transmembrane proteins serves both roles. For example certain receptor tyrosine kinases have both protein kinase activity and SH2 domains. In addition, autophosphorylation of tyrosines on the receptor molecule itself creates binding sites for additional SH2 domain containing proteins.

[0073] Transmembrane proteins may contain from one to many transmembrane domains. For example, receptor tyrosine kinases, certain cytokine receptors, receptor guanylyl cyclases and receptor serine/threonine protein kinases contain a single transmembrane domain. However, various other proteins including channels and adenylyl cyclases contain numerous transmembrane domains. Many important cell surface receptors are classified as “seven transmembrane domain” proteins, as they contain 7 membrane spanning regions. Important transmembrane protein receptors include, but are not limited to insulin receptor, insulin-like growth factor receptor, human growth hormone receptor, glucose transporters, transferrin receptor, epidermal growth factor receptor, low density lipoprotein receptor, leptin receptor, interleukin receptors, e.g. IL-1 receptor, IL-2 receptor, etc. CA proteins may be derived from genes that regulate apoptosis (IL-3, GM-CSF and Bcl-x) or are shown to have a role in the regulation of apoptosis.

[0074] Characteristics of transmembrane domains include approximately 20 consecutive hydrophobic amino acids that may be followed by charged amino acids. Therefore, upon analysis of the amino acid sequence of a particular protein, the localization and number of transmembrane domains within the protein may be predicted.

[0075] The extracellular domains of transmembrane proteins are diverse; however, conserved motifs are found repeatedly among various extracellular domains. Conserved structure and/or functions have been ascribed to different extracellular motifs. For example, cytokine receptors are characterized by a cluster of cysteines and a WSXWS (W=tryptophan, S=serine, X=any amino acid) motif. Immunoglobulin-like domains are highly conserved. Mucin-like domains may be involved in cell adhesion and leucine-rich repeats participate in protein-protein interactions.

[0076] Many extracellular domains are involved in binding to other molecules. In one aspect, extracellular domains are receptors. Factors that bind the receptor domain include circulating ligands, which may be peptides, proteins, or small molecules such as adenosine and the like. For example, growth factors such as EGF, FGF and PDGF are circulating growth factors that bind to their cognate receptors to initiate a variety of cellular responses. Other factors include cytokines, mitogenic factors, neurotrophic factors and the like. Extracellular domains also bind to cell-associated molecules. In this respect, they mediate cell-cell interactions. Cell-associated ligands can be tethered to the cell for example via a glycosylphosphatidylinositol (GPI) anchor, or may themselves be transmembrane proteins. Extracellular domains also associate with the extracellular matrix and contribute to the maintenance of the cell structure.

[0077] CA proteins that are transmembrane are particularly preferred in the present invention as they are good targets for immunotherapeutics, as are described herein. In addition, as outlined below, transmembrane proteins can be also useful in imaging modalities.

[0078] It will also be appreciated by those in the art that a transmembrane protein can be made soluble by removing transmembrane sequences, for example through recombinant methods. Furthermore, transmembrane proteins that have been made soluble can be made to be secreted through recombinant means by adding an appropriate signal sequence.

[0079] In a preferred embodiment, the CA proteins are secreted proteins; the secretion of which can be either constitutive or regulated. These proteins have a signal peptide or signal sequence that targets the molecule to the secretory pathway. Secreted proteins are involved in numerous physiological events; by virtue of their circulating nature, they serve to transmit signals to various other cell types. The secreted protein may function in an autocrine manner (acting on the cell that secreted the factor), a paracrine manner (acting on cells in close proximity to the cell that secreted the factor) or an endocrine manner (acting on cells at a distance). Thus secreted molecules find use in modulating or altering numerous aspects of physiology. CA proteins that are secreted proteins are particularly preferred in the present invention as they serve as good targets for diagnostic markers, for example for blood tests.

[0080] CA Sequences and Homologs

[0081] A CA sequence is initially identified by substantial nucleic acid and/or amino acid sequence homology to the CA sequences outlined herein. Such homology can be based upon the overall nucleic acid or amino acid sequence, and is generally determined as outlined below, using either homology programs or hybridization conditions.

[0082] As used herein, a nucleic acid is a “CA nucleic acid” if the overall homology of the nucleic acid sequence to one of the nucleic acids of Tables 1-9 is preferably greater than about 75%, more preferably greater than about 80%, even more preferably greater than about 85% and most preferably greater than 90%. In some embodiments the homology will be as high as about 93 to 95 or 98%. In a preferred embodiment, the sequences that are used to determine sequence identity or similarity are selected from those of the nucleic acids of Tables 1-9. In another embodiment, the sequences are naturally occurring allelic variants of the sequences of the nucleic acids of Tables 1-9. In another embodiment, the sequences are sequence variants as further described herein.

[0083] Homology in this context means sequence similarity or identity, with identity being preferred. A preferred comparison for homology purposes is to compare the sequence containing sequencing errors to the correct sequence. This homology will be determined using standard techniques known in the art, including, but not limited to, the local homology algorithm of Smith & Waterman, Adv. Appl. Math. 2:482 (1981), by the homology alignment algorithm of Needleman & Wunsch, J. Mol. Biol. 48:443 (1970), by the search for similarity method of Pearson & Lipman, PNAS USA 85:2444 (1988), by computerized implementations of these algorithms (GAP, BESTFIT, FASTA, and TFASTA in the Wisconsin Genetics Software Package, Genetics Computer Group, 575 Science Drive, Madison, Wis.), the Best Fit sequence program described by Devereux et al., Nucl. Acid Res. 12:387-395 (1984), preferably using the default settings, or by inspection.

[0084] One example of a useful algorithm is PILEUP. PILEUP creates a multiple sequence alignment from a group of related sequences using progressive, pairwise alignments. It can also plot a tree showing the clustering relationships used to create the alignment. PILEUP uses a simplification of the progressive alignment method of Feng & Doolittle, J. Mol. Evol. 35:351-360 (1987); the method is similar to that described by Higgins & Sharp CABIOS 5:151-153 (1989). Useful PILEUP parameters include a default gap weight of 3.00, a default gap length weight of 0.10, and weighted end gaps.

[0085] Another example of a useful algorithm is the BLAST (Basic Local Alignment Search Tool) algorithm, described in Altschul et al., J. Mol. Biol. 215, 403-410, (1990) and Karlin et al., PNAS USA 90:5873-5787 (1993). A particularly useful BLAST program is the WU-BLAST-2 program which was obtained from Altschul et al., Methods in Enzymology, 266: 460-480 (1996); http://blast.wustl.edu/]. WU-BLAST-2 uses several search parameters, most of which are set to the default values. The adjustable parameters are set with the following values: overlap span=1, overlap fraction=0.125, word threshold (T)=11. The HSP S and HSP S2 parameters are dynamic values and are established by the program itself depending upon the composition of the particular sequence and composition of the particular database against which the sequence of interest is being searched; however, the values may be adjusted to increase sensitivity. A percent amino acid sequence identity value is determined by the number of matching identical residues divided by the total number of residues of the “longer” sequence in the aligned region. The “longer” sequence is the one having the most actual residues in the aligned region (gaps introduced by WU-Blast-2 to maximize the alignment score are ignored).

[0086] Thus, “percent (%) nucleic acid sequence identity” is defined as the percentage of nucleotide residues in a candidate sequence that are identical with the nucleotide residues of the nucleic acids of Tables 1-9. A preferred method utilizes the BLASTN module of WU-BLAST-2 set to the default parameters, with overlap span and overlap fraction set to 1 and 0.125, respectively.

[0087] The alignment may include the introduction of gaps in the sequences to be aligned. In addition, for sequences which contain either more or fewer nucleotides than those of the nucleic acids of Tables 1-9, it is understood that the percentage of homology will be determined based on the number of homologous nucleosides in relation to the total number of nucleosides. Thus homology of sequences shorter than those of the sequences identified herein will be determined using the number of nucleosides in the shorter sequence.

[0088] In another embodiment of the invention, polynucleotide compositions are provided that are capable of hybridizing under moderate to high stringency conditions to a polynucleotide sequence provided herein, or a fragment thereof, or a complementary sequence thereof. Hybridization techniques are well known in the art of molecular biology. For purposes of illustration, suitable moderately stringent conditions for testing the hybridization of a polynucleotide of this invention with other polynucleotides include prewashing in a solution of 5×SSC (“saline sodium citrate”; 9 mM NaCl, 0.9 mM sodium citrate), 0.5% SDS, 1.0 mM EDTA (pH 8.0); hybridizing at 50-60° C., 5×SSC, overnight; followed by washing twice at 65° C. for 20 minutes with each of 2×, 0.5× and 0.2×SSC containing 0.1% SDS. One skilled in the art will understand that the stringency of hybridization can be readily manipulated, such as by altering the salt content of the hybridization solution and/or the temperature at which the hybridization is performed. For example, in another embodiment, suitable highly stringent hybridization conditions include those described above, with the exception that the temperature of hybridization is increased, e.g., to 60-65° C., or 65-70° C. Stringent conditions may also be achieved with the addition of destabilizing agents such as formamide.

[0089] Thus nucleic acids that hybridize under high stringency to the nucleic acids identified in the figures, or their complements, are considered CA sequences. High stringency conditions are known in the art; see for example Maniatis et al., Molecular Cloning: A Laboratory Manual, 2d Edition, 1989, and Short Protocols in Molecular Biology, ed. Ausubel, et al., both of which are hereby incorporated by reference. Stringent conditions are sequence-dependent and will be different in different circumstances. Longer sequences hybridize specifically at higher temperatures. An extensive guide to the hybridization of nucleic acids is found in Tijssen, Techniques in Biochemistry and Molecular Biology—Hybridization with Nucleic Acid Probes, “Overview of principles of hybridization and the strategy of nucleic acid assays” (1993). Generally, stringent conditions are selected to be about 5-10° C. lower than the thermal melting point (Tₘ) for the specific sequence at a defined ionic strength pH. The Tₘ is the temperature (under defined ionic strength, pH and nucleic acid concentration) at which 50% of the probes complementary to the target hybridize to the target sequence at equilibrium (as the target sequences are present in excess, at Tₘ, 50% of the probes are occupied at equilibrium). Stringent conditions will be those in which the salt concentration is less than about 1.0 M sodium ion, typically about 0.01 to 1.0 M sodium ion concentration (or other salts) at pH 7.0 to 8.3 and the temperature is at least about 30° C. for short probes (e.g. 10 to 50 nucleotides) and at least about 60° C. for longer probes (e.g. greater than 50 nucleotides). In another embodiment, less stringent hybridization conditions are used; for example, moderate or low stringency conditions may be used, as are known in the art; see Maniatis and Ausubel, supra, and Tijssen, supra.

[0090] In addition, the CA nucleic acid sequences of the invention are fragments of larger genes, i.e. they are nucleic acid segments. Alternatively, the CA nucleic acid sequences can serve as indicators of oncogene position, for example, the CA sequence may be an enhancer that activates a protooncogene. “Genes” in this context includes coding regions, non-coding regions, and mixtures of coding and non-coding regions. Accordingly, as will be appreciated by those in the art, using the sequences provided herein, additional sequences of the CA genes can be obtained, using techniques well known in the art for cloning either longer sequences or the full-length sequences; see Maniatis et al., and Ausubel, et al., supra, hereby expressly incorporated by reference. In general, this is done using PCR, for example, kinetic PCR.

[0091] Detection of CA Expression

[0092] Once the CA nucleic acid is identified, it can be cloned and, if necessary, its constituent parts recombined to form the entire CA nucleic acid. Once isolated from its natural source, e.g., contained within a plasmid or other vector or excised therefrom as a linear nucleic acid segment, the recombinant CA nucleic acid can be further used as a probe to identify and isolate other CA nucleic acids, for example additional coding regions. It can also be used as a “precursor” nucleic acid to make modified or variant CA nucleic acids and proteins. In a preferred embodiment, once a CA gene is identified its nucleotide sequence is used to design probes specific for the CA gene.

[0093] The CA nucleic acids of the present invention are used in several ways. In a first embodiment, nucleic acid probes hybridizable to CA nucleic acids are made and attached to biochips to be used in screening and diagnostic methods, or for gene therapy and/or antisense applications. Alternatively, the CA nucleic acids that include coding regions of CA proteins can be put into expression vectors for the expression of CA proteins, again either for screening purposes or for administration to a patient.

[0094] Recent developments in DNA microarray technology make it possible to conduct a large scale assay of a plurality of target CA nucleic acid molecules on a single solid phase support. U.S. Pat. No. 5,837,832 (Chee et al.) and related patent applications describe immobilizing an array of oligonucleotide probes for hybridization and detection of specific nucleic acid sequences in a sample. Target polynucleotides of interest isolated from a tissue of interest are hybridized to the DNA chip and the specific sequences detected based on the target polynucleotides' preference and degree of hybridization at discrete probe locations. One important use of arrays is in the analysis of differential gene expression, where the profile of expression of genes in different cells, often a cell of interest and a control cell, is compared and any differences in gene expression among the respective cells are identified. Such information is useful for the identification of the types of genes expressed in a particular cell or tissue type and diagnosis of cancer conditions based on the expression profile.

[0095] Typically, RNA from the sample of interest is subjected to reverse transcription to obtain labeled cDNA. See U.S. Pat. No. 6,410,229 (Lockhart et al.) The cDNA is then hybridized to oligonucleotides or cDNAs of known sequence arrayed on a chip or other surface in a known order. The location of the oligonucleotide to which the labeled cDNA hybridizes provides sequence information on the cDNA, while the amount of labeled hybridized RNA or cDNA provides an estimate of the relative representation of the RNA or cDNA of interest. See Schena, et al. Science 270:467-470 (1995). For example, use of a cDNA microarray to analyze gene expression patterns in human cancer is described by DeRisi, et al. (Nature Genetics 14:457-460 (1996)).

[0096] In a preferred embodiment, nucleic acid probes corresponding to CA nucleic acids (both the nucleic acid sequences outlined in the figures and/or the complements thereof) are made. Typically, these probes are synthesized based on the disclosed sequences of this invention. The nucleic acid probes attached to the biochip are designed to be substantially complementary to the CA nucleic acids, i.e. the target sequence (either the target sequence of the sample or to other probe sequences, for example in sandwich assays), such that specific hybridization of the target sequence and the probes of the present invention occurs. As outlined below, this complementarity need not be perfect, in that there may be any number of base pair mismatches that will interfere with hybridization between the target sequence and the single stranded nucleic acids of the present invention. It is expected that the overall homology of the genes at the nucleotide level probably will be about 40% or greater, probably about 60% or greater, and even more probably about 80% or greater; and in addition that there will be corresponding contiguous sequences of about 8-12 nucleotides or longer. However, if the number of mutations is so great that no hybridization can occur under even the least stringent of hybridization conditions, the sequence is not a complementary target sequence. Thus, by “substantially complementary” herein is meant that the probes are sufficiently complementary to the target sequences to hybridize under normal reaction conditions, particularly high stringency conditions, as outlined herein. Whether or not a sequence is unique to a CA gene according to this invention can be determined by techniques known to those of skill in the art. For example, the sequence can be compared to sequences in databanks, e.g., GeneBank, to determine whether it is present in the uninfected host or other organisms. The sequence can also be compared to the known sequences of other viral agents, including those that are known to induce cancer.

[0097] A nucleic acid probe is generally single stranded but can be partly single and partly double stranded. The strandedness of the probe is dictated by the structure, composition, and properties of the target sequence. In general, the oligonucleotide probes range from about 6, 8, 10, 12, 15, 20, 30 to about 100 bases long, with from about 10 to about 80 bases being preferred, and from about 30 to about 50 bases being particularly preferred. That is, generally entire genes are rarely used as probes. In some embodiments, much longer nucleic acids can be used, up to hundreds of bases. The probes are sufficiently specific to hybridize to complementary template sequence under conditions known by those of skill in the art. The number of mismatches between the probes sequences and their complementary template (target) sequences to which they hybridize during hybridization generally do not exceed 15%, usually do not exceed 10% and preferably do not exceed 5%, as determined by FASTA (default settings).

[0098] Oligonucleotide probes can include the naturally-occurring heterocyclic bases normally found in nucleic acids (uracil, cytosine, thymine, adenine and guanine), as well as modified bases and base analogues. Any modified base or base analogue compatible with hybridization of the probe to a target sequence is useful in the practice of the invention. The sugar or glycoside portion of the probe can comprise deoxyribose, ribose, and/or modified forms of these sugars, such as, for example, 2′-O-alkyl ribose. In a preferred embodiment, the sugar moiety is 2′-deoxyribose; however, any sugar moiety that is compatible with the ability of the probe to hybridize to a target sequence can be used.

[0099] In one embodiment, the nucleoside units of the probe are linked by a phosphodiester backbone, as is well known in the art. In additional embodiments, internucleotide linkages can include any linkage known to one of skill in the art that is compatible with specific hybridization of the probe including, but not limited to phosphorothioate, methylphosphonate, sulfamate (e.g., U.S. Pat. No. 5,470,967) and polyamide (i.e., peptide nucleic acids). Peptide nucleic acids are described in Nielsen et al. (1991) Science 254: 1497-1500, U.S. Pat. No. 5,714,331, and Nielsen (1999) Curr. Opin. Biotechnol. 10:71-75.

[0100] In certain embodiments, the probe can be a chimeric molecule; i.e., can comprise more than one type of base or sugar subunit, and/or the linkages can be of more than one type within the same primer. The probe can comprise a moiety to facilitate hybridization to its target, sequence, as are known in the art, for example, intercalators and/or minor groove binders. Variations of the bases, sugars, and internucleoside backbone, as well as the presence of any pendant group on the probe, will be compatible with the ability of the probe to bind, in a sequence-specific fashion, with its target sequence. A large number of structural modifications, both known and to be developed, are possible within these bounds. Advantageously, the probes according to the present invention may have structural characteristics such that they allow the signal amplification, such structural characteristics being, for example, branched DNA probes as those described by Urdea et al. (Nucleic Acids Symp. Ser., 24:197-200 (1991)) or in the European Patent No. EP-0225,807. Moreover, synthetic methods for preparing the various heterocyclic bases, sugars, nucleosides and nucleotides that form the probe, and preparation of oligonucleotides of specific predetermined sequence, are well-developed and known in the art. A preferred method for oligonucleotide synthesis incorporates the teaching of U.S. Pat. No. 5,419,966.

[0101] Multiple probes may be designed for a particular target nucleic acid to account for polymorphism and/or secondary structure in the target nucleic acid, redundancy of data and the like. In some embodiments, where more than one probe per sequence is used, either overlapping probes or probes to different sections of a single target CA gene are used. That is, two, three, four or more probes, with three being preferred, are used to build in a redundancy for a particular target. The probes can be overlapping (i.e. have some sequence in common), or specific for distinct sequences of a CA gene. When multiple target polynucleotides are to be detected according to the present invention, each probe or probe group corresponding to a particular target polynucleotide is situated in a discrete area of the microarray.

[0102] Probes may be in solution, such as in wells or on the surface of a micro-array, or attached to a solid support. Examples of solid support materials that can be used include a plastic, a ceramic, a metal, a resin, a gel and a membrane. Useful types of solid supports include plates, beads, magnetic material, microbeads, hybridization chips, membranes, crystals, ceramics and self-assembling monolayers. A preferred embodiment comprises a two-dimensional or three-dimensional matrix, such as a gel or hybridization chip with multiple probe binding sites (Pevzner et al., J. Biomol. Struc. & Dyn. 9:399-410, 1991; Maskos and Southern, Nuc. Acids Res. 20:1679-84, 1992). Hybridization chips can be used to construct very large probe arrays that are subsequently hybridized with a target nucleic acid. Analysis of the hybridization pattern of the chip can assist in the identification of the target nucleotide sequence. Patterns can be manually or computer analyzed, but it is clear that positional sequencing by hybridization lends itself to computer analysis and automation. Algorithms and software, which have been developed for sequence reconstruction, are applicable to the methods described herein (R. Drmanac et al., J. Biomol. Struc. & Dyn. 5:1085-1102, 1991; P. A. Pevzner, J. Biomol. Struc. & Dyn. 7:63-73, 1989).

[0103] As will be appreciated by those in the art, nucleic acids can be attached or immobilized to a solid support in a wide variety of ways. By “immobilized” herein is meant the association or binding between the nucleic acid probe and the solid support is sufficient to be stable under the conditions of binding, washing, analysis, and removal as outlined below. The binding can be covalent or non-covalent. By “non-covalent binding” and grammatical equivalents herein is meant one or more of either electrostatic, hydrophilic, and hydrophobic interactions. Included in non-covalent binding is the covalent attachment of a molecule, such as streptavidin, to the support and the non-covalent binding of the biotinylated probe to the streptavidin. By “covalent binding” and grammatical equivalents herein is meant that the two moieties, the solid support and the probe, are attached by at least one bond, including sigma bonds, pi bonds and coordination bonds. Covalent bonds can be formed directly between the probe and the solid support or can be formed by a cross linker or by inclusion of a specific reactive group on either the solid support or the probe or both molecules. Immobilization may also involve a combination of covalent and non-covalent interactions.

[0104] Nucleic acid probes may be attached to the solid support by covalent binding such as by conjugation with a coupling agent or by, covalent or non-covalent binding such as electrostatic interactions, hydrogen bonds or antibody-antigen coupling, or by combinations thereof. Typical coupling agents include biotin/avidin, biotin/streptavidin, Staphylococcus aureus protein A/IgG antibody F_{c} fragment, and streptavidin/protein A chimeras (T. Sano and C. R. Cantor, Bio/Technology 9:1378-81 (1991)), or derivatives or combinations of these agents. Nucleic acids may be attached to the solid support by a photocleavable bond, an electrostatic bond, a disulfide bond, a peptide bond, a diester bond or a combination of these sorts of bonds. The array may also be attached to the solid support by a selectively releasable bond such as 4,4′-dimethoxytrityl or its derivative. Derivatives which have been found to be useful include 3 or 4 [bis-(4-methoxyphenyl)]-methyl-benzoic acid, N-succinimidyl-3 or 4 [bis-(4-methoxyphenyl)]-methyl-benzoic acid, N-succinimidyl-3 or 4 [bis-(4-methoxyphenyl)]-hydroxymethyl-benzoic acid, N-succinimidyl-3 or 4 [bis-(4-methoxyphenyl)]-chloromethyl-benzoic acid, and salts of these acids.

[0105] In general, the probes are attached to the biochip in a wide variety of ways, as will be appreciated by those in the art. As described herein, the nucleic acids can either be synthesized first, with subsequent attachment to the biochip, or can be directly synthesized on the biochip.

[0106] The biochip comprises a suitable solid substrate. By “substrate” or “solid support” or other grammatical equivalents herein is meant any material that can be modified to contain discrete individual sites appropriate for the attachment or association of the nucleic acid probes and is amenable to at least one detection method. The solid phase support of the present invention can be of any solid materials and structures suitable for supporting nucleotide hybridization and synthesis. Preferably, the solid phase support comprises at least one substantially rigid surface on which the primers can be immobilized and the reverse transcriptase reaction performed. The substrates with which the polynucleotide microarray elements are stably associated may be fabricated from a variety of materials, including plastics, ceramics, metals, acrylamide, cellulose, nitrocellulose, glass, polystyrene, polyethylene vinyl acetate, polypropylene, polymethacrylate, polyethylene, polyethylene oxide, polysilicates, polycarbonates, Teflon®, fluorocarbons, nylon, silicon rubber, polyanhydrides, polyglycolic acid, polylactic acid, polyorthoesters, polypropylfumerate, collagen, glycosaminoglycans, and polyamino acids. Substrates may be two-dimensional or three-dimensional in form, such as gels, membranes, thin films, glasses, plates, cylinders, beads, magnetic beads, optical fibers, woven fibers, etc. A preferred form of array is a three-dimensional array. A preferred three-dimensional array is a collection of tagged beads. Each tagged bead has different primers attached to it. Tags are detectable by signaling means such as color (Luminex, Illumina) and electromagnetic field (Pharmaseq) and signals on tagged beads can even be remotely detected (e.g., using optical fibers). The size of the solid support can be any of the standard microarray sizes, useful for DNA microarray technology, and the size may be tailored to fit the particular machine being used to conduct a reaction of the invention. In general, the substrates allow optical detection and do not appreciably fluoresce.

[0107] In a preferred embodiment, the surface of the biochip and the probe may be derivatized with chemical functional groups for subsequent attachment of the two. Thus, for example, the biochip is derivatized with a chemical functional group including, but not limited to, amino groups, carboxy groups, oxo groups and thiol groups, with amino groups being particularly preferred. Using these functional groups, the probes can be attached using functional groups on the probes. For example, nucleic acids containing amino groups can be attached to surfaces comprising amino groups, for example using linkers as are known in the art; for example, homo-or hetero-bifunctional linkers as are well known (see 1994 Pierce Chemical Company catalog, technical section on cross-linkers, pages 155-200, incorporated herein by reference). In addition, in some cases, additional linkers, such as alkyl groups (including substituted and heteroalkyl groups) may be used.

[0108] In this embodiment, the oligonucleotides are synthesized as is known in the art, and then attached to the surface of the solid support. As will be appreciated by those skilled in the art, either the 5′ or 3′ terminus may be attached to the solid support, or attachment may be via an internal nucleoside. In an additional embodiment, the immobilization to the solid support may be very strong, yet non-covalent. For example, biotinylated oligonucleotides can be made, which bind to surfaces covalently coated with streptavidin, resulting in attachment.

[0109] The arrays may be produced according to any convenient methodology, such as preforming the polynucleotide microarray elements and then stably associating them with the surface. Alternatively, the oligonucleotides may be synthesized on the surface, as is known in the art. A number of different array configurations and methods for their production are known to those of skill in the art and disclosed in WO 95/25116 and WO 95/35505 (photolithographic techniques), U.S. Pat. No. 5,445,934 (in situ synthesis by photolithography), U.S. Pat. No. 5,384,261 (in situ synthesis by mechanically directed flow paths); and U.S. Pat. No. 5,700,637 (synthesis by spotting, printing or coupling); the disclosure of which are herein incorporated in their entirety by reference. Another method for coupling DNA to beads uses specific ligands attached to the end of the DNA to link to ligand-binding molecules attached to a bead. Possible ligand-binding partner pairs include biotin-avidin/streptavidin, or various antibody/antigen pairs such as digoxygenin-antidigoxygenin antibody (Smith et al., “Direct Mechanical Measurements of the Elasticity of Single DNA Molecules by Using Magnetic Beads,” Science 258:1122-1126 (1992)). Covalent chemical attachment of DNA to the support can be accomplished by using standard coupling agents to link the 5′-phosphate on the DNA to coated microspheres through a phosphoamidate bond. Methods for immobilization of oligonucleotides to solid-state substrates are well established. See Pease et al., Proc. Natl. Acad. Sci. USA 91(11):5022-5026 (1994). A preferred method of attaching oligonucleotides to solid-state substrates is described by Guo et al., Nucleic Acids Res. 22:5456-5465 (1994). Immobilization can be accomplished either by in situ DNA synthesis (Maskos and Southern, Nucleic Acids Research, 20:1679-1684 (1992) or by covalent attachment of chemically synthesized oligonucleotides (Guo et al., supra) in combination with robotic arraying technologies.

[0110] In addition to the solid-phase technology represented by biochip arrays, gene expression can also be quantified using liquid-phase arrays. One such system is kinetic polymerase chain reaction (PCR). Kinetic PCR allows for the simultaneous amplification and quantification of specific nucleic acid sequences. The specificity is derived from synthetic oligonucleotide primers designed to preferentially adhere to single-stranded nucleic acid sequences bracketing the target site. This pair of oligonucleotide primers form specific, non-covalently bound complexes on each strand of the target sequence. These complexes facilitate in vitro transcription of double-stranded DNA in opposite orientations. Temperature cycling of the reaction mixture creates a continuous cycle of primer binding, transcription, and re-melting of the nucleic acid to individual strands. The result is an exponential increase of the target dsDNA product. This product can be quantified in real time either through the use of an intercalating dye or a sequence specific probe. SYBR® Greene I, is an example of an intercalating dye, that preferentially binds to dsDNA resulting in a concomitant increase in the fluorescent signal. Sequence specific probes, such as used with TaqMan® technology, consist of a fluorochrome and a quenching molecule covalently bound to opposite ends of an oligonucleotide. The probe is designed to selectively bind the target DNA sequence between the two primers. When the DNA strands are synthesized during the PCR reaction, the fluorochrome is cleaved from the probe by the exonuclease activity of the polymerase resulting in signal dequenching. The probe signaling method can be more specific than the intercalating dye method, but in each case, signal strength is proportional to the dsDNA product produced. Each type of quantification method can be used in multi-well liquid phase arrays with each well representing primers and/or probes specific to nucleic acid sequences of interest. When used with messenger RNA preparations of tissues or cell lines, an array of probe/primer reactions can simultaneously quantify the expression of multiple gene products of interest. See Germer, S., et al., Genome Res. 10:258-266 (2000); Heid, C. A., et al., Genome Res. 6, 986-994 (1996).

[0111] Expression of CA Proteins

[0112] In a preferred embodiment, CA nucleic acids encoding CA proteins are used to make a variety of expression vectors to express CA proteins which can then be used in screening assays, as described below. The expression vectors may be either self-replicating extrachromosomal vectors or vectors which integrate into a host genome. Generally, these expression vectors include transcriptional and translational regulatory nucleic acid operably linked to the nucleic acid encoding the CA protein. The term “control sequences” refers to DNA sequences necessary for the expression of an operably linked coding sequence in a particular host organism. The control sequences that are suitable for prokaryotes, for example, include a promoter, optionally an operator sequence, and a ribosome binding site. Eukaryotic cells are known to utilize promoters, polyadenylation signals, and enhancers.

[0113] Nucleic acid is “operably linked” when it is placed into a functional relationship with another nucleic acid sequence. For example, DNA for a presequence or secretory leader is operably linked to DNA for a polypeptide if it is expressed as a preprotein that participates in the secretion of the polypeptide; a promoter or enhancer is operably linked to a coding sequence if it affects the transcription of the sequence; or a ribosome binding site is operably linked to a coding sequence if it is positioned so as to facilitate translation. Generally, “operably linked” means that the DNA sequences being linked are contiguous, and, in the case of a secretory leader, contiguous and in reading phase. However, enhancers do not have to be contiguous. Linking is accomplished by ligation at convenient restriction sites. If such sites do not exist, synthetic oligonucleotide adaptors or linkers are used in accordance with conventional practice. The transcriptional and translational regulatory nucleic acid will generally be appropriate to the host cell used to express the CA protein; for example, transcriptional and translational regulatory nucleic acid sequences from Bacillus are preferably used to express the CA protein in Bacillus. Numerous types of appropriate expression vectors, and suitable regulatory sequences are known in the art for a variety of host cells.

[0114] In general, the transcriptional and translational regulatory sequences may include, but are not limited to, promoter sequences, ribosomal binding sites, transcriptional start and stop sequences, translational start and stop sequences, and enhancer or activator sequences. In a preferred embodiment, the regulatory sequences include a promoter and transcriptional start and stop sequences.

[0115] Promoter sequences encode either constitutive or inducible promoters. The promoters may be either naturally occurring promoters or hybrid promoters. Hybrid promoters, which combine elements of more than one promoter, are also known in the art, and are useful in the present invention.

[0116] In addition, the expression vector may comprise additional elements. For example, the expression vector may have two replication systems, thus allowing it to be maintained in two organisms, for example in mammalian or insect cells for expression and in a prokaryotic host for cloning and amplification. Furthermore, for integrating expression vectors, the expression vector contains at least one sequence homologous to the host cell genome, and preferably two homologous sequences that flank the expression construct. The integrating vector may be directed to a specific locus in the host cell by selecting the appropriate homologous sequence for inclusion in the vector. Constructs for integrating vectors are well known in the art.

[0117] In addition, in a preferred embodiment, the expression vector contains a selectable marker gene to allow the selection of transformed host cells. Selection genes are well known in the art and will vary with the host cell used.

[0118] The CA proteins of the present invention are produced by culturing a host cell transformed with an expression vector containing nucleic acid encoding a CA protein, under the appropriate conditions to induce or cause expression of the CA protein. The conditions appropriate for CA protein expression will vary with the choice of the expression vector and the host cell, and will be easily ascertained by one skilled in the art through routine experimentation. For example, the use of constitutive promoters in the expression vector will require optimizing the growth and proliferation of the host cell, while the use of an inducible promoter requires the appropriate growth conditions for induction. In addition, in some embodiments, the timing of the harvest is important. For example, the baculoviral systems used in insect cell expression are lytic viruses, and thus harvest time selection can be crucial for product yield.

[0119] Appropriate host cells include yeast, bacteria, archaebacteria, fungi, and insect, plant and animal cells, including mammalian cells. Of particular interest are Drosophila melanogaster cells, Saccharomyces cerevisiae and other yeasts, E. coli, Bacillus subtilis, Sf9 cells, C129 cells, 293 cells, Neurospora, BHK, CHO, COS, HeLa cells, THPI cell line (a macrophage cell line) and human cells and cell lines.

[0120] In a preferred embodiment, the CA proteins are expressed in mammalian cells. Mammalian expression systems are also known in the art, and include retroviral systems. A preferred expression vector system is a retroviral vector system such as is generally described in PCT/US97/01019 and PCT/US97/01048, both of which are hereby expressly incorporated by reference. Of particular use as mammalian promoters are the promoters from mammalian viral genes, since the viral genes are often highly expressed and have a broad host range. Examples include the SV40 early promoter, mouse mammary tumor virus LTR promoter, adenovirus major late promoter, herpes simplex virus promoter, and the CMV promoter. Typically, transcription termination and polyadenylation sequences recognized by mammalian cells are regulatory regions located 3′ to the translation stop codon and thus, together with the promoter elements, flank the coding sequence. Examples of transcription terminator and polyadenylation signals include those derived form SV40.

[0121] The methods of introducing exogenous nucleic acid into mammalian hosts, as well as other hosts, are well known in the art, and will vary with the host cell used. Techniques include dextran-mediated transfection, calcium phosphate precipitation, polybrene mediated transfection, protoplast fusion, electroporation, viral infection, encapsulation of the polynucleotide(s) in liposomes, and direct microinjection of the DNA into nuclei.

[0122] In a preferred embodiment, CA proteins are expressed in bacterial systems. Bacterial expression systems are well known in the art. Promoters from bacteriophage may also be used and are known in the art. In addition, synthetic promoters and hybrid promoters are also useful; for example, the tac promoter is a hybrid of the trp and lac promoter sequences. Furthermore, a bacterial promoter can include naturally occurring promoters of non-bacterial origin that have the ability to bind bacterial RNA polymerase and initiate transcription. In addition to a functioning promoter sequence, an efficient ribosome binding site is desirable. The expression vector may also include a signal peptide sequence that provides for secretion of the CA protein in bacteria. The protein is either secreted into the growth media (gram-positive bacteria) or into the periplasmic space, located between the inner and outer membrane of the cell (gram-negative bacteria). The bacterial expression vector may also include a selectable marker gene to allow for the selection of bacterial strains that have been transformed. Suitable selection genes include genes that render the bacteria resistant to drugs such as ampicillin, chloramphenicol, erythromycin, kanamycin, neomycin and tetracycline. Selectable markers also include biosynthetic genes, such as those in the histidine, tryptophan and leucine biosynthetic pathways. These components are assembled into expression vectors. Expression vectors for bacteria are well known in the art, and include vectors for Bacillus subtilis, E. coli, Streptococcus cremoris, and Streptococcus lividans, among others. The bacterial expression vectors are transformed into bacterial host cells using techniques well known in the art, such as calcium chloride treatment, electroporation, and others.

[0123] In one embodiment, CA proteins are produced in insect cells. Expression vectors for the transformation of insect cells, and in particular, baculovirus-based expression vectors, are well known in the art.

[0124] In a preferred embodiment, CA protein is produced in yeast cells. Yeast expression systems are well known in the art, and include expression vectors for Saccharomyces cerevisiae, Candida albicans and C. maltosa, Hansenula polymorpha, Kluyveromyces fragilis and K. lactis, Pichia guillerimondii and P. pastoris, Schizosaccharomyces pombe, and Yarrowia lipolytica.

[0125] The CA protein may also be made as a fusion protein, using techniques well known in the art. Thus, for example, for the creation of monoclonal antibodies. If the desired epitope is small, the CA protein may be fused to a carrier protein to form an immunogen. Alternatively, the CA protein may be made as a fusion protein to increase expression, or for other reasons. For example, when the CA protein is a CA peptide, the nucleic acid encoding the peptide may be linked to other nucleic acid for expression purposes.

[0126] In one embodiment, the CA nucleic acids, proteins and antibodies of the invention are labeled. By “labeled” herein is meant that a compound has at least one element, isotope or chemical compound attached to enable the detection of the compound. In general, labels fall into three classes: a) isotopic labels, which may be radioactive or heavy isotopes; b) immune labels, which may be antibodies or antigens; and c) colored or fluorescent dyes. The labels may be incorporated into the CA nucleic acids, proteins and antibodies at any position. For example, the label should be capable of producing, either directly or indirectly, a detectable signal. The detectable moiety may be a radioisotope, such as ³H, ¹⁴C, ³²P, ³⁵S, or ¹²⁵I, a fluorescent or chemiluminescent compound, such as fluorescein isothiocyanate, rhodamine, or luciferin, or an enzyme, such as alkaline phosphatase, beta-galactosidase or horseradish peroxidase. Any method known in the art; for conjugating the antibody to the label may be employed, including those methods described by Hunter et al., Nature, 144:945 (1962); David et al., Biochemistry, 13:1014 (1974); Pain et al., J. Immunol. Meth., 40:219 (1981); and Nygren, J. Histochem. and Cytochem., 30:407 (1982).

[0127] Accordingly, the present invention also provides CA protein sequences. A CA protein of the present invention may be identified in several ways. “Protein” in this sense includes proteins, polypeptides, and peptides. As will be appreciated by those in the art, the nucleic acid sequences of the invention can be used to generate protein sequences. There are a variety of ways to do this, including cloning the entire gene and verifying its frame and amino acid sequence, or by comparing it to known sequences to search for homology to provide a frame, assuming the CA protein has homology to some protein in the database being used. Generally, the nucleic acid sequences are input into a program that will search all three frames for homology. This is done in a preferred embodiment using the following NCBI Advanced BLAST parameters. The program is blastx or blastn. The database is nr. The input data is as “Sequence in FASTA format”. The organism list is “none”. The “expect” is 10; the filter is default. The “descriptions” is 500, the “alignments” is 500, and the “alignment view” is pairwise. The “query Genetic Codes” is standard (1). The matrix is BLOSUM 62; gap existence cost is 11, per residue gap cost is 1; and the lambda ratio is 0.85 default. This results in the generation of a putative protein sequence.

[0128] In general, the term “polypeptide” as used herein refers to both the fill-length polypeptide encoded by the recited polynucleotide, the polypeptide encoded by the gene represented by the recited polynucleotide, as well as portions or fragments thereof. The present invention encompasses variants of the naturally occurring proteins, wherein such variants are homologous or substantially similar to the naturally occurring protein, and can be of an origin of the same or different species as the naturally occurring protein (e.g., human, murine, or some other species that naturally expresses the recited polypeptide, usually a mammalian species). In general, variant polypeptides have a sequence that has at least about 80%, at least about 81%, at least about 82%, at least about 83%, at least about 84%, at least about 85%, at least about 86%, at least about 87%, at least about 88%, at least about 89%, usually at least about 90%, at least 91%, at least 92%, at least 93%, at least 94%, at least 95%, at least 96%, at least 97%, at least 98% and more usually at least about 99% sequence identity with a differentially expressed polypeptide described herein, as determined by the Smith-Waterman homology search algorithm using an affine gap search with a gap open penalty of 12 and a gap extension penalty of 2, BLOSUM matrix of 62. The Smith-Waterman homology search algorithm is taught in Smith and Waterman, Adv. Appl. Math. (1981) 2: 482-489. The variant polypeptides can be naturally or non-naturally glycosylated, i.e., the polypeptide has a glycosylation pattern that differs from the glycosylation pattern found in the corresponding naturally occurring protein.

[0129] Also within the scope of the invention are variants. Variants of polypeptides include mutants, fragments, and fusions. Mutants can include amino acid substitutions, additions or deletions. The amino acid substitutions can be conservative amino acid substitutions or substitutions to eliminate non-essential amino acids, such as to alter a glycosylation site, a phosphorylation site or an acetylation site, or to minimize misfolding by substitution or deletion of one or more cysteine residues that are not necessary for function. Conservative amino acid substitutions are those that preserve the general charge, hydrophobicity/hydrophilicity, and/or steric bulk of the amino acid substituted. Variants can be designed so as to retain or have enhanced biological activity of a particular region of the protein (e.g., a functional domain and/or, where the polypeptide is a member of a protein family, a region associated with a consensus sequence). Selection of amino acid alterations for production of variants can be based upon the accessibility (interior vs. exterior) of the amino acid (see, e.g., Go, et al, Int. J. Peptide Protein Res. (1980) 15:211), the thermostability of the variant polypeptide (see, e.g., Querol et al., Prot. Eng. (1996) 9:265), desired glycosylation sites (see, e.g., Olsen and Thomsen, J. Gen. Microbiol. (1991) 137:579), desired disulfide bridges (see, e.g., Clarke et al., Biochemistry (1993) 32:4322; and Wakarchuk et al., Protein Eng. (1994) 7:1379), desired metal binding sites (see, e.g., Toma et al., Biochemistry (1991) 30:97, and Haezerbrouck et al., Protein Eng. (1993) 6:643), and desired substitutions within proline loops (see, e.g., Masul et al., Appl. Env. Microbiol. (1994) 60:3579). Cysteine-depleted muteins can be produced as disclosed in U.S. Pat. No. 4,959,314.

[0130] Variants also include fragments of the polypeptides disclosed herein, particularly biologically active fragments and/or fragments corresponding to functional domains. Fragments of interest will typically be at least about 8 amino acids (aa) 10 aa, 15 aa, 20 aa, 25 aa, 30 aa, 35 aa, 40 aa, to at least about 45 aa in length, usually at least about 50 aa in length, at least about 75 aa, at least about 100 aa, at least about 125 aa, at least about 150 aa in length, at least about 200 aa, at least about 300 aa, at least about 400 aa and can be as long as 500 aa in length or longer, but will usually not exceed about 1000 aa in length, where the fragment will have a stretch of amino acids that is identical to a polypeptide encoded by a polynucleotide having a sequence of any one of the polynucleotide sequences provided herein, or a homolog thereof. The protein variants described herein are encoded by polynucleotides that are within the scope of the invention. The genetic code can be used to select the appropriate codons to construct the corresponding variants.

[0131] While altered expression of the polynucleotides associated with cancer is observed, altered levels of expression of the polypeptides encoded by these polynucleotides may likely play a role in cancers.

[0132] Also included within one embodiment of CA proteins are amino acid variants of the naturally occurring sequences, as determined herein. Preferably, the variants are preferably greater than about 75% homologous to the wild-type sequence, more preferably greater than about 80%, even more preferably greater than about 85% and most preferably greater than 90%. The present application is also directed to proteins containing polypeptides at least 80%, 85%, 90%, 95%, 96%, 97%, 98% or 99% identical to a CA polypeptide sequence set forth herein. As for nucleic acids, homology in this context means sequence similarity or identity, with identity being preferred. This homology will be determined using standard techniques known in the art as are outlined above for the nucleic acid homologies.

[0133] CA proteins of the present invention may be shorter or longer than the wild type amino acid sequences. Thus, in a preferred embodiment, included within the definition of CA proteins are portions or fragments of the wild type sequences herein. In addition, as outlined above, the CA nucleic acids of the invention may be used to obtain additional coding regions, and thus additional protein sequence, using techniques known in the art.

[0134] In a preferred embodiment, the CA proteins are derivative or variant CA proteins as compared to the wild-type sequence. That is, as outlined more fully below, the derivative CA peptide will contain at least one amino acid substitution, deletion or insertion, with amino acid substitutions being particularly preferred. The amino acid substitution, insertion or deletion may occur at any residue within the CA peptide.

[0135] Also included in an embodiment of CA proteins of the present invention are amino acid sequence variants. These variants fall into one or more of three classes: substitutional, insertional or deletional variants. These variants ordinarily are prepared by site-specific mutagenesis of nucleotides in the DNA encoding the CA protein, using cassette or PCR mutagenesis or other techniques well known in the art, to produce DNA encoding the variant, and thereafter expressing the DNA in recombinant cell culture as outlined above. However, variant CA protein fragments having up to about 100-150 residues may be prepared by in vitro synthesis using established techniques. Amino acid sequence variants are characterized by the predetermined nature of the variation, a feature that sets them apart from naturally occurring allelic or interspecies variation of the CA protein amino acid sequence. The variants typically exhibit the same qualitative biological activity as the naturally occurring analogue, although variants can also be selected which have modified characteristics as will be more fully outlined below.

[0136] While the site or region for introducing an amino acid sequence variation is predetermined, the mutation per se need not be predetermined. For example, in order to optimize the performance of a mutation at a given site, random mutagenesis may be conducted at the target codon or region and the expressed CA variants screened for the optimal combination of desired activity. Techniques for making substitution mutations at predetermined sites in DNA having a known sequence are well known, for example, Ml 3 primer mutagenesis and LAR mutagenesis. Screening of the mutants is done using assays of CA protein activities.

[0137] Amino acid substitutions are typically of single residues; insertions usually will be on the order of from about 1 to 20 amino acids, although considerably larger insertions may be tolerated. Deletions range from about 1 to about 20 residues, although in some cases deletions may be much larger.

[0138] Substitutions, deletions, insertions or any combination thereof may be used to arrive at a final derivative. Generally these changes are done on a few amino acids to minimize the alteration of the molecule. However, larger changes may be tolerated in certain circumstances. When small alterations in the characteristics of the CA protein are desired, substitutions are generally made in accordance with the following chart:

CHART 1

| Original Residue | Exemplary Substitutions |
|---|---|
| Ala | Ser |
| Arg | Lys |
| Asn | Gln, His |
| Asp | Glu |
| Cys | Ser |
| Gln | Asn |
| Glu | Asp |
| Gly | Pro |
| His | Asn, Gln |
| Ile | Leu, Val |
| Leu | Ile, Val |
| Lys | Arg, Gln, Glu |
| Met | Leu, Ile |
| Phe | Met, Leu, Tyr |
| Ser | Thr |
| Thr | Ser |
| Trp | Tyr |
| Tyr | Trp, Phe |
| Val | Ile, Leu |

[0139] Substantial changes in function or immunological identity are made by selecting substitutions that are less conservative than those shown in Chart I. For example, substitutions may be made full length to more significantly affect one or more of the following: the structure of the polypeptide backbone in the area of the alteration (e.g., the alpha-helical or beta-sheet structure); the charge or hydrophobicity of the molecule at the target site; and the bulk of the side chain. The substitutions which in general are expected to produce the greatest changes in the polypeptide's properties are those in which (a) a hydrophilic residue, e.g. seryl or threonyl is substituted for (or by) a hydrophobic residue, e.g. leucyl, isoleucyl, phenylalanyl, valyl or alanyl; (b) a cysteine or proline is substituted for (or by) any other residue; (c) a residue having an electropositive side chain, e.g. lysyl, arginyl, or histidyl, is substituted for (or by) an electronegative residue, e.g. glutamyl or aspartyl; or (d) a residue having a bulky side chain, e.g. phenylalanine, is substituted for (or by) one not having a side chain, e.g. glycine.

[0140] The variants typically exhibit the same qualitative biological activity and will elicit the same immune response as the naturally-occurring analogue, although variants also are selected to modify the characteristics of the CA proteins as needed. Alternatively, the variant may be designed such that the biological activity of the CA protein is altered. For example, glycosylation sites may be altered or removed, dominant negative mutations created, etc.

[0141] Covalent modifications of CA polypeptides are included within the scope of this invention, for example for use in screening. One type of covalent modification includes reacting targeted amino acid residues of a CA polypeptide with an organic derivatizing agent that is capable of reacting with selected side chains or the N-or C-terminal residues of a CA polypeptide. Derivatization with bifunctional agents is useful, for instance, for crosslinking CA polypeptides to a water-insoluble support matrix or surface for use in the method for purifying anti-CA antibodies or screening assays, as is more fully described below. Commonly used crosslinking agents include, e.g., 1,1-bis(diazoacetyl)-2-phenylethane, glutaraldehyde, N-hydroxysuccinimide esters, for example, esters with 4-azidosalicylic acid, homobifunctional imidoesters, including disuccinimidyl esters such as 3,3′-dithiobis(succinimidylpropionate), bifunctional maleimides such as bis-N-maleimido-1,8-octane and agents such as methyl-3-[(p-azidophenyl) dithio]propioimidate.

[0142] Other modifications include deamidation of glutaminyl and asparaginyl residues to the corresponding glutamyl and aspartyl residues, respectively, hydroxylation of proline and lysine, phosphorylation of hydroxyl groups of seryl, threonyl or tyrosyl residues, methylation of the a-amino groups of lysine, arginine, and histidine side chains [T. E. Creighton, Proteins: Structure and Molecular Properties, W.H. Freeman & Co., San Francisco, pp. 79-86 (1983)], acetylation of the N-terminal amine, and amidation of any C-terminal carboxyl group.

[0143] Another type of covalent modification of the CA polypeptide included within the scope of this invention comprises altering the native glycosylation pattern of the polypeptide. “Altering the native glycosylation pattern” is intended for purposes herein to mean deleting one or more carbohydrate moieties found in native sequence CA polypeptide, and/or adding one or more glycosylation sites that are not present in the native sequence CA polypeptide.

[0144] Addition of glycosylation sites to CA polypeptides may be accomplished by altering the amino acid sequence thereof. The alteration may be made, for example, by the addition of, or substitution by, one or more serine or threonine residues to the native sequence CA polypeptide (for O-linked glycosylation sites). The CA amino acid sequence may optionally be altered through changes at the DNA level, particularly by mutating the DNA encoding the CA polypeptide at preselected bases such that codons are generated that will translate into the desired amino acids.

[0145] Another means of increasing the number of carbohydrate moieties on the CA polypeptide is by chemical or enzymatic coupling of glycosides to the polypeptide. Such methods are described in the art, e.g., in WO 87/05330 published 11 Sep. 1987, and in Aplin and Wriston, L A Crit. Rev. Biochem., pp. 259-306 (1981).

[0146] Removal of carbohydrate moieties present on the CA polypeptide may be accomplished chemically or enzymatically or by mutational substitution of codons encoding for amino acid residues that serve as targets for glycosylation. Chemical deglycosylation techniques are known in the art and described, for instance, by Hakimuddin, et al., Arch. Biochem. Biophys., 259:52 (1987) and by Edge et al., Anal. Biochem., 118:131 (1981). Enzymatic cleavage of carbohydrate moieties on polypeptides can be achieved by the use of a variety of endo-and exo-glycosidases as described by Thotakura et al., Meth. Enzymol., 138:350 (1987).

[0147] Another type of covalent modification of CA comprises linking the CA polypeptide to one of a variety of nonproteinaceous polymers, e.g., polyethylene glycol, polypropylene glycol, or polyoxyalkylenes, in the manner set forth in U.S. Pat. Nos. 4,640,835; 4,496,689; 4,301,144; 4,670,417; 4,791,192 or 4,179,337.

[0148] CA polypeptides of the present invention may also be modified in a way to form chimeric molecules comprising a CA polypeptide fused to another, heterologous polypeptide or amino acid sequence. In one embodiment, such a chimeric molecule comprises a fusion of a CA polypeptide with a tag polypeptide that provides an epitope to which an anti-tag antibody can selectively bind. The epitope tag is generally placed at the amino-or carboxyl-terminus of the CA polypeptide, although internal fusions may also be tolerated in some instances. The presence of such epitope-tagged forms of a CA polypeptide can be detected using an antibody against the tag polypeptide. Also, provision of the epitope tag enables the CA polypeptide to be readily purified by affinity purification using an anti-tag antibody or another type of affinity matrix that binds to the epitope tag. In an alternative embodiment, the chimeric molecule may comprise a fusion of a CA polypeptide with an immunoglobulin or a particular region of an immunoglobulin. For a bivalent form of the chimeric molecule, such a fusion could be to the Fe region of an IgG molecule.

[0149] Various tag polypeptides and their respective antibodies are well known in the art. Examples include poly-histidine (poly-his) or poly-histidine-glycine (poly-his-gly) tags; the flu HA tag polypeptide and its antibody 12CA5 [Field et al., Mol. Cell. Biol., 8:2159-2165 (1988)]; the c-myc tag and the 8F9, 3C7, 6E10, G4, B7 and 9E10 antibodies thereto [Evan et al., Molecular and Cellular Biology, 5:3610-3616 (1985)]; and the Herpes Simplex virus glycoprotein D (gD) tag and its antibody [Paborsky et al., Protein Engineering, 3(6):547-553 (1990)]. Other tag polypeptides include the Flag-peptide [Hopp et al., BioTechnology, 6:1204-1210 (1988)]; the KT3 epitope peptide [Martin et al., Science, 255:192-194 (1992)]; tubulin epitope peptide [Skinner et al., J. Biol. Chem., 266:15163-15166 (1991)]; and the T7 gene 10 protein peptide tag [Lutz-Freyernuth et al., Proc. Natl. Acad. Sci. USA, 87:6393-6397 (1990)].

[0150] Also included with the definition of CA protein in one embodiment are other CA proteins of the CA family, and CA proteins from other organisms, which are cloned and expressed as outlined below. Thus, probe or degenerate polymerase chain reaction (PCR) primer sequences may be used to find other related CA proteins from humans or other organisms. As will be appreciated by those in the art, particularly useful probe and/or PCR primer sequences include the unique areas of the CA nucleic acid sequence. As is generally known in the art, preferred PCR primers are from about 15 to about 35 nucleotides in length, with from about 20 to about 30 being preferred, and may contain inosine as needed. The conditions for the PCR reaction are well known in the art.

[0151] In addition, as is outlined herein, CA proteins can be made that are longer than those encoded by the nucleic acids of the figures, for example, by the elucidation of additional sequences, the addition of epitope or purification tags, the addition of other fusion sequences, etc.

[0152] CA proteins may also be identified as being encoded by CA nucleic acids. Thus, CA proteins are encoded by nucleic acids that will hybridize to the sequences of the sequence listings, or their complements, as outlined herein.

[0153] CA Antigens and Antibodies Thereto

[0154] In one embodiment, the invention provides CA specific antibodies. In a preferred embodiment, when the CA protein is to be used to generate antibodies, for example for immunotherapy, the CA protein should share at least one epitope or determinant with the full-length protein. By “epitope” or “determinant” herein is meant a portion of a protein that will generate and/or bind an antibody or T-cell receptor in the context of MHC. Thus, in most instances, antibodies made to a smaller CA protein will be able to bind to the full-length protein. In a preferred embodiment, the epitope is unique; that is, antibodies generated to a unique epitope show little or no cross-reactivity.

[0155] Any polypeptide sequence encoded by the CA polynucleotide sequences may be analyzed to determine certain preferred regions of the polypeptide. Regions of high antigenicity are determined from data by DNASTAR analysis by choosing values that represent regions of the polypeptide that are likely to be exposed on the surface of the polypeptide in an environment in which antigen recognition may occur in the process of initiation of an immune response. For example, the amino acid sequence of a polypeptide encoded by a CA polynucleotide sequence may be analyzed using the default parameters of the DNASTAR computer algorithm (DNASTAR, Inc., Madison, Wis.; http://www.dnastar.com/).

[0156] Polypeptide features that may be routinely obtained using the DNASTAR computer algorithm include, but are not limited to, Gamier-Robson alpha-regions, beta-regions, turn-regions, and coil-regions (Gamier et al. J. Mol. Biol., 120: 97 (1978)); Chou-Fasman alpha-regions, beta-regions, and turn-regions (Adv. in Enzymol., 47:45-148 (1978)); Kyte-Doolittle hydrophilic regions and hydrophobic regions (J. Mol. Biol., 157:105-132 (1982)); Eisenberg alpha- and beta-amphipathic regions; Karplus-Schulz flexible regions; Emini surface-forming regions (J. Virol., 55(3):836-839 (1985)); and Jameson-Wolf regions of high antigenic index (CABIOS, 4(1):181-186 (1988)). Kyte-Doolittle hydrophilic regions and hydrophobic regions, Emini surface-forming regions, and Jameson-Wolf regions of high antigenic index (i.e., containing four or more contiguous amino acids having an antigenic index of greater than or equal to 1.5, as identified using the default parameters of the Jameson-Wolf program) can routinely be used to determine polypeptide regions that exhibit a high degree of potential for antigenicity. One approach for preparing antibodies to a protein is the selection and preparation of an amino acid sequence of all or part of the protein, chemically synthesizing the sequence and injecting it into an appropriate animal, typically a rabbit, hamster or a mouse. Oligopeptides can be selected as candidates for the production of an antibody to the CA protein based upon the oligopeptides lying in hydrophilic regions, which are thus likely to be exposed in the mature protein. Additional oligopeptides can be determined using, for example, the Antigenicity Index, Welling, G. W. et al., FEBS Lett. 188:215-218 (1985), incorporated herein by reference.

[0157] In one embodiment, the term “antibody” includes antibody fragments, as are known in the art, including Fab, Fab₂, single chain antibodies (Fv for example), chimeric antibodies, etc., either produced by the modification of whole antibodies or those synthesized de novo using recombinant DNA technologies.

[0158] Methods of preparing polyclonal antibodies are known to the skilled artisan. Polyclonal antibodies can be raised in a mammal, for example, by one or more injections of an immunizing agent and, if desired, an adjuvant. Typically, the immunizing agent and/or adjuvant will be injected in the mammal by multiple subcutaneous or intraperitoneal injections. The immunizing agent may include a protein encoded by a nucleic acid of the figures or fragment thereof or a fusion protein thereof. It may be useful to conjugate the immunizing agent to a protein known to be immunogenic in the mammal being immunized. Examples of such immunogenic proteins include but are not limited to keyhole limpet hemocyanin, serum albumin, bovine thyroglobulin, and soybean trypsin inhibitor. Examples of adjuvants that may be employed include Freund's complete adjuvant and MPL-TDM adjuvant (monophosphoryl Lipid A, synthetic trehalose dicorynomycolate). The immunization protocol may be selected by one skilled in the art without undue experimentation.

[0159] The antibodies may, alternatively, be monoclonal antibodies. Monoclonal antibodies may be prepared using hybridoma methods, such as those described by Kohler and Milstein, Nature, 256:495 (1975). In a hybridoma method, a mouse, hamster, or other appropriate host animal, is typically immunized with an immunizing agent to elicit lymphocytes that produce or are capable of producing antibodies that will specifically bind to the immunizing agent. Alternatively, the lymphocytes may be immunized in vitro. The immunizing agent will typically include a polypeptide encoded by a nucleic acid of Tables 1-9, or fragment thereof or a fusion protein thereof. Generally, either peripheral blood lymphocytes (“PBLs”) are used if cells of human origin are desired, or spleen cells or lymph node cells are used if non-human mammalian sources are desired. The lymphocytes are then fused with an immortalized cell line using a suitable fusing agent, such as polyethylene glycol, to form a hybridoma cell (Goding, Monoclonal Antibodies: Principles and Practice, Academic Press, (1986) pp. 59-103). Immortalized cell lines are usually transformed mammalian cells, particularly myeloma cells of rodent, bovine and human origin. Usually, rat or mouse myeloma cell lines are employed. The hybridoma cells may be cultured in a suitable culture medium that preferably contains one or more substances that inhibit the growth or survival of the unfused, immortalized cells. For example, if the parental cells lack the enzyme hypoxanthine guanine phosphoribosyl transferase (HGPRT or HPRT), the culture medium for the hybridomas typically will include hypoxanthine, aminopterin, and thymidine (“HAT medium”), which substances prevent the growth of HGPRT-deficient cells.

[0160] Monoclonal antibody technology is used in implementing research, diagnosis and therapy. Monoclonal antibodies are used in radioimmunoassays, enzyme-linked immunosorbent assays, immunocytopathology, and flow cytometry for in vitro diagnosis, and in vivo for diagnosis and immunotherapy of human disease. Waldmann, T. A. (1991) Science 252:1657-1662. In particular, monoclonal antibodies have been widely applied to the diagnosis and therapy of cancer, wherein it is desirable to target malignant lesions while avoiding normal tissue. See, e.g., U.S. Pat. Nos. 4,753,894 to Frankel, et al.; 4,938,948 to Ring et al.; and 4,956,453 to Bjorn et al.

[0161] In one embodiment, the antibodies are bispecific antibodies. Bispecific antibodies are monoclonal, preferably human or humanized, antibodies that have binding specificities for at least two different antigens. A number of “humanized” antibody molecules comprising an antigen-binding site derived from a non-human immunoglobulin have been described, including chimeric antibodies having rodent V regions and their associated CDRs fused to human constant domains (Winter et al. (1991) Nature 349:293-299; Lobuglio et al. (1989) Proc. Nat. Acad. Sci. USA 86:4220-4224; Shaw et al. (1987) J Immunol. 138:4534-4538; and Brown et al. (1987) Cancer Res. 47:3577-3583), rodent CDRs grafted into a human supporting FR prior to fusion with an appropriate human antibody constant domain (Riechmann et al. (1988) Nature 332:323-327; Verhoeyen et al. (1988) Science 239:1534-1536; and Jones et al. (1986) Nature 321:522-525), and rodent CDRs supported by recombinantly veneered rodent FRs (European Patent Publication No. 519,596, published Dec. 23, 1992). These “humanized” molecules are designed to minimize unwanted immunological response toward rodent antihuman antibody molecules which limits the duration and effectiveness of therapeutic applications of those moieties in human recipients. In the present case, one of the binding specificities is for a protein encoded by a nucleic acid of Tables 1-9, or a fragment thereof, the other one is for any other antigen, and preferably for a cell-surface protein or receptor or receptor subunit, preferably one that is tumor specific.

[0162] In a preferred embodiment, the antibodies to CA are capable of reducing or eliminating the biological function of CA, as is described below. That is, the addition of anti-CA antibodies (either polyclonal or preferably monoclonal) to CA (or cells containing CA) may reduce or eliminate the CA activity. Generally, at least a 25% decrease in activity is preferred, with at least about 50% being particularly preferred and about a 95-100% decrease being especially preferred.

[0163] In a preferred embodiment the antibodies to the CA proteins are humanized antibodies. “Humanized” antibodies refer to a molecule having an antigen binding site that is substantially derived from an immunoglobulin from a non-human species and the remaining immunoglobulin structure of the molecule based upon the structure and/or sequence of a human immunoglobulin. The antigen binding site may comprise either complete variable domains fused onto constant domains or only the complementarity determining regions (CDRs) grafted onto appropriate framework regions in the variable domains. Antigen binding sites may be wild type or modified by one or more amino acid substitutions, e.g., modified to resemble human immunoglobulin more closely. Alternatively, a humanized antibody may be derived from a chimeric antibody that retains or substantially retains the antigen-binding properties of the parental, non-human, antibody but which exhibits diminished immunogenicity as compared to the parental antibody when administered to humans. The phrase “chimeric antibody,” as used herein, refers to an antibody containing sequence derived from two different antibodies (see, e.g., U.S. Pat. No. 4,816,567) that typically originate from different species. Typically, in these chimeric antibodies, the variable region of both light and heavy chains mimics the variable regions of antibodies derived from one species of mammals, while the constant portions are homologous to the sequences in antibodies derived from another. Most typically, chimeric antibodies comprise human and murine antibody fragments, generally human constant and mouse variable regions. Humanized antibodies include human immunoglobulins (recipient antibody) in which residues form a complementary determining region (CDR) of the recipient are replaced by residues from a CDR of a non-human species (donor antibody) such as mouse, rat or rabbit having the desired specificity, affinity and capacity. In some instances, Fv framework residues of the human immunoglobulin are replaced by corresponding non-human residues. Humanized antibodies may also comprise residues that are found neither in the recipient antibody nor in the imported CDR or framework sequences. In general, the humanized antibody will comprise substantially all of at least one, and typically two, variable domains, in which all or substantially all of the CDR regions correspond to those of a non-human immunoglobulin and all or substantially all of the framework residues (FR) regions are those of a human immunoglobulin consensus sequence. The humanized antibody optimally also will comprise at least a portion of an immunoglobulin constant region (Fe), typically that of a human immunoglobulin (Jones et al., Nature, 321:522-525 (1986); Riechmann et al., Nature, 332:323-329 (1988); and Presta, Curr. Op. Struct. Biol., 2:593-596 (1992)). One clear advantage to such chimeric forms is that, for example, the variable regions can conveniently be derived from presently known sources using readily available hybridomas or B cells from non human host organisms in combination with constant regions derived from, for example, human cell preparations. While the variable region has the advantage of ease of preparation, and the specificity is not affected by its source, the constant region being human, is less likely to elicit an immune response from a human subject when the antibodies are injected than would the constant region from a non-human source. However, the definition is not limited to this particular example.

[0164] Because humanized antibodies are far less immunogenic in humans than the parental mouse monoclonal antibodies, they can be used for the treatment of humans with far less risk of anaphylaxis. Thus, these antibodies may be preferred in therapeutic applications that involve in vivo administration to a human such as, e.g., use as radiation sensitizers for the treatment of neoplastic disease or use in methods to reduce the side effects of, e.g., cancer therapy. Methods for humanizing non-human antibodies are well known in the art. Generally, a humanized antibody has one or more amino acid residues introduced into it from a source that is non-human. These non-human amino acid residues are often referred to as import residues, which are typically taken from an import variable domain. Humanization can be essentially performed following the method of Winter and co-workers (Jones et al., Nature 321:522-525 (1986); Riechmann et al., Nature 332:323-327 (1988); Verhoeyen et al., Science 239:1534-1536 (1988)), by substituting rodent CDRs or CDR sequences for the corresponding sequences of a human antibody. Accordingly, such humanized antibodies are chimeric antibodies (U.S. Pat. No. 4,816,567), wherein substantially less than an intact human variable domain has been substituted by the corresponding sequence from a non-human species. In practice, humanized antibodies are typically human antibodies in which some CDR residues and possibly some FR residues are substituted by residues from analogous sites in rodent antibodies.

[0165] Human antibodies can also be produced using various techniques known in the art, including phage display libraries [Hoogenboom and Winter, J. Mol. Biol., 227:381 (1991); Marks et al., J. Mol. Biol., 222:581 (1991)]. The techniques of Cole et al. and Boerner et al. are also available for the preparation of human monoclonal antibodies [Cole et al., Monoclonal Antibodies and Cancer Therapy, Alan R. Liss, p. 77 (1985) and Boerner et al., J. Immunol., 147(1):86-95 (1991)]. Humanized antibodies may be achieved by a variety of methods including, for example: (1) grafting the non-human complementarity determining regions (CDRs) onto a human framework and constant region (a process referred to in the art as “humanizing”), or, alternatively, (2) transplanting the entire non-human variable domains, but “cloaking” them with a human-like surface by replacement of surface residues (a process referred to in the art as “veneering”). In the present invention, humanized antibodies will include both “humanized” and “veneered” antibodies. Similarly, human antibodies can be made by introducing human immunoglobulin loci into transgenic animals, e.g., mice in which the endogenous immunoglobulin genes have been partially or completely inactivated. Upon challenge, human antibody production is observed, which closely resembles that seen in humans in all respects, including gene rearrangement, assembly, and antibody repertoire. This approach is described, for example, in U.S. Pat. Nos. 5,545,807; 5,545,806; 5,569,825; 5,625,126; 5,633,425; 5,661,016, and in the following scientific publications: Marks et al., Bio/Technology 10, 779-783 (1992); Lonberg et al., Nature 368 856-859 (1994); Morrison, Nature 368, 812-13 (1994); Fishwild et al., Nature Biotechnology 14, 845-51 (1996); Neuberger, Nature Biotechnology 14, 826 (1996); Lonberg and Huszar, Intern. Rev. Immunol. 13 65-93 (1995); Jones et al., Nature 321:522-525 (1986); Morrison et al., Proc. Natl. Acad. Sci, U.S.A., 81:6851-6855 (1984); Morrison and Oi, Adv. Immunol., 44:65-92 (1988); Verhoeyer et al., Science 239:1534-1536 (1988); Padlan, Molec. Immun. 28:489-498 (1991); Padlan, Molec. Immunol. 31 (3):169-217 (1994); and Kettleborough, C. A. et al., Protein Eng. 4(7):773-83 (1991) each of which is incorporated herein by reference.

[0166] The phrase “complementarity determining region” refers to amino acid sequences which together define the binding affinity and specificity of the natural Fv region of a native immunoglobulin binding site. See, e.g., Chothia et al., J. Mol. Biol. 196:901-917 (1987); Kabat et al., U.S. Dept. of Health and Human Services NIH Publication No. 91-3242 (1991). The phrase “constant region” refers to the portion of the antibody molecule that confers effector functions. In the present invention, mouse constant regions are substituted by human constant regions. The constant regions of the subject humanized antibodies are derived from human immunoglobulins. The heavy chain constant region can be selected from any of the five isotypes: alpha, delta, epsilon, gamma or mu. One method of humanizing antibodies comprises aligning the non-human heavy and light chain sequences to human heavy and light chain sequences, selecting and replacing the non-human framework with a human framework based on such alignment, molecular modeling to predict the conformation of the humanized sequence and comparing to the conformation of the parent antibody. This process is followed by repeated back mutation of residues in the CDR region that disturb the structure of the CDRs until the predicted conformation of the humanized sequence model closely approximates the conformation of the non-human CDRs of the parent non-human antibody. Such humanized antibodies may be further derivatized to facilitate uptake and clearance, e.g, via Ashwell receptors. See, e.g., U.S. Pat. Nos. 5,530,101 and 5,585,089 which are incorporated herein by reference.

[0167] Humanized antibodies to CA polypeptides can also be produced using transgenic animals that are engineered to contain human immunoglobulin loci. For example, WO 98/24893 discloses transgenic animals having a human Ig locus wherein the animals do not produce functional endogenous immunoglobulins due to the inactivation of endogenous heavy and light chain loci. WO 91/10741 also discloses transgenic non-primate primate mammalian hosts capable of mounting an immune response to an immunogen, wherein the antibodies have primate constant and/or variable regions, and wherein the endogenous immunoglobulin-encoding loci are substituted or inactivated. WO 96/30498 discloses the use of the Cre/Lox system to modify the immunoglobulin locus in a mammal, such as to replace all or a portion of the constant or variable region to form a modified antibody molecule. WO 94/02602 discloses non-human mammalian hosts having inactivated endogenous Ig loci and functional human Ig loci. U.S. Pat. No. 5,939,598 discloses methods of making transgenic mice in which the mice lack endogenous heavy chains, and express an exogenous immunoglobulin locus comprising one or more xenogeneic constant regions.

[0168] Using a transgenic animal described above, an immune response can be produced to a selected antigenic molecule, and antibody-producing cells can be removed from the animal and used to produce hybridomas that secrete human monoclonal antibodies. Immunization protocols, adjuvants, and the like are known in the art, and are used in immunization of, for example, a transgenic mouse as described in WO 96/33735. The monoclonal antibodies can be tested for the ability to inhibit or neutralize the biological activity or physiological effect of the corresponding protein.

[0169] In the present invention, CA polypeptides of the invention and variants thereof are used to immunize a transgenic animal as described above. Monoclonal antibodies are made using methods known in the art, and the specificity of the antibodies is tested using isolated CA polypeptides. Methods for preparation of the human or primate CA or an epitope thereof include, but are not limited to chemical synthesis, recombinant DNA techniques or isolation from biological samples. Chemical synthesis of a peptide can be performed, for example, by the classical Merrifeld method of solid phase peptide synthesis (Merrifeld, J. Am. Chem. Soc. 85:2149, 1963 which is incorporated by reference) or the FMOC strategy on a Rapid Automated Multiple Peptide Synthesis system (E. I. du Pont de Nemours Company, Wilmington, Del.) (Caprino and Han, J. Org. Chem. 37:3404, 1972 which is incorporated by reference).

[0170] Polyclonal antibodies can be prepared by immunizing rabbits or other animals by injecting antigen followed by subsequent boosts at appropriate intervals. The animals are bled and sera assayed against purified CA proteins usually by ELISA or by bioassay based upon the ability to block the action of CA proteins. When using avian species, e.g., chicken, turkey and the like, the antibody can be isolated from the yolk of the egg. Monoclonal antibodies can be prepared after the method of Milstein and Kohler by fusing splenocytes from immunized mice with continuously replicating tumor cells such as myeloma or lymphoma cells. (Milstein and Kohler, Nature 256:495-497, 1975; Gulfre and Milstein, Methods in Enzymology: Immunochemical Techniques 73:1-46, Langone and Banatis eds., Academic Press, 1981 which are incorporated by reference). The hybridoma cells so formed are then cloned by limiting dilution methods and supemates assayed for antibody production by ELISA, RIA or bioassay.

[0171] The unique ability of antibodies to recognize and specifically bind to target proteins provides an approach for treating an overexpression of the protein. Thus, another aspect of the present invention provides for a method for preventing or treating diseases involving overexpression of a CA polypeptide by treatment of a patient with specific antibodies to the CA protein.

[0172] Specific antibodies, either polyclonal or monoclonal, to the CA proteins can be produced by any suitable method known in the art as discussed above. For example, murine or human monoclonal antibodies can be produced by hybridoma technology or, alternatively, the CA proteins, or an immunologically active fragment thereof, or an anti-idiotypic antibody, or fragment thereof can be administered to an animal to elicit the production of antibodies capable of recognizing and binding to the CA proteins. Such antibodies can be from any class of antibodies including, but not limited to IgG, IgA, IgM, IgD, and IgE or in the case of avian species, IgY and from any subclass of antibodies.

[0173] By immunotherapy is meant treatment of a cancer with an antibody raised against a CA protein. As used herein, immunotherapy can be passive or active. Passive immunotherapy as defined herein is the passive transfer of antibody to a recipient (patient). Active immunization is the induction of antibody and/or T-cell responses in a recipient (patient). Induction of an immune response is the result of providing the recipient with an antigen to which antibodies are raised. As appreciated by one of ordinary skill in the art, the antigen may be provided by injecting a polypeptide against which antibodies are desired to be raised into a recipient, or contacting the recipient with a nucleic acid capable of expressing the antigen and under conditions for expression of the antigen.

[0174] In a preferred embodiment, oncogenes which encode secreted growth factors may be inhibited by raising antibodies against CA proteins that are secreted proteins as described above. Without being bound by theory, antibodies used for treatment, bind and prevent the secreted protein from binding to its receptor, thereby inactivating the secreted CA protein.

[0175] In another preferred embodiment, the CA protein to which antibodies are raised is a transmembrane protein. Without being bound by theory, antibodies used for treatment, bind the extracellular domain of the CA protein and prevent it from binding to other proteins, such as circulating ligands or cell-associated molecules. The antibody may cause down-regulation of the transmembrane CA protein. As will be appreciated by one of ordinary skill in the art, the antibody may be a competitive, non-competitive or uncompetitive inhibitor of protein binding to the extracellular domain of the CA protein. The antibody is also an antagonist of the CA protein. Further, the antibody prevents activation of the transmembrane CA protein. In one aspect, when the antibody prevents the binding of other molecules to the CA protein, the antibody prevents growth of the cell. The antibody may also sensitize the cell to cytotoxic agents, including, but not limited to TNF-α, TNF-β, IL-1, INF-γ and IL-2, or chemotherapeutic agents including; 5FU, vinblastine, actinomycin D, cisplatin, methotrexate, and the like. In some instances the antibody belongs to a sub-type that activates serum complement when complexed with the transmembrane protein thereby mediating cytotoxicity. Thus, cancers may be treated by administering to a patient antibodies directed against the transmembrane CA protein.

[0176] In another preferred embodiment, the antibody is conjugated to a therapeutic moiety. In one aspect the therapeutic moiety is a small molecule that modulates the activity of the CA protein. In another aspect the therapeutic moiety modulates the activity of molecules associated with or in close proximity to the CA protein. The therapeutic moiety may inhibit enzymatic activity such as protease or protein kinase activity associated with cancer.

[0177] In a preferred embodiment, the therapeutic moiety may also be a cytotoxic agent. In this method, radioisotopes, natural toxins, chemotherapy agents, or other substances (such as biological response modifiers) are chemically linked or conjugated to a monoclonal antibody to form “immunoconjugates” and “immunotoxins” which target the cytotoxic agent to tumor tissue or cells resulting in a reduction in the number of afflicted cells, thereby reducing symptoms associated with cancers, including lymphoma. Cytotoxic agents are numerous and varied and include, but are not limited to, cytotoxic drugs or toxins or active fragments of such toxins. Suitable toxins and their corresponding fragments include diphtheria A chain, exotoxin A chain, ricin A chain, abrin A chain, curcin, crotin, phenomycin, enomycin and the like. Cytotoxic agents also include radiochemicals made by conjugating radioisotopes to antibodies raised against CA proteins, or binding of a radionuclide to a chelating agent that has been covalently attached to the antibody. Targeting the therapeutic moiety to transmembrane CA proteins not only serves to increase the local concentration of therapeutic moiety in the cancer of interest, i.e., lymphoma, but also serves to reduce deleterious side effects that may be associated with the therapeutic moiety. A number of investigators have used monoclonal antibodies as carriers of cytotoxic substances in attempts to selectively direct those agents to malignant tissue. More particularly, a number of monoclonal antibodies have been conjugated to toxins such as ricin, abrin, diphtheria toxin and Pseudomonas exotoxin or to enzymatically active portions. (A chains) thereof via heterobifunctional agents. See, e.g., U.S. Pat. No. 4,753,894 to Frankel et al.; Nevelle, et al. (1982) Immunol Rev 62:75-91; Ross et al. (1980) Eur. J. Biochem 104; Vitteta et al. (1982) Immunol Rev 62:158-183; Raso et al. (1982) Cancer Res 42:457-464, and Trowbridge et al. (1981) Nature 294:171-173.

[0178] In another preferred embodiment, the CA protein against which the antibodies are raised is an intracellular protein. In this case, the antibody may be conjugated to a protein that facilitates entry into the cell. In one case, the antibody enters the cell by endocytosis. In another embodiment, a nucleic acid encoding the antibody is administered to the individual or cell. Moreover, wherein the CA protein can be targeted within a cell, e.g., the nucleus, an antibody thereto contains a signal for that target localization, e.g., a nuclear localization signal.

[0179] The CA antibodies of the invention specifically bind to CA proteins. By “specifically bind” herein is meant that the antibodies bind to the protein with a binding constant in the range of 10⁻⁴-10⁻⁶ M⁻¹, with a preferred range being 10⁻⁷-10⁻⁹ M⁻¹.

[0180] In a preferred embodiment, the CA protein is purified or isolated after expression. CA proteins may be isolated or purified in a variety of ways known to those skilled in the art depending on what other components are present in the sample. Standard purification methods include electrophoretic, molecular, immunological and chromatographic techniques, including ion exchange, hydrophobic, affinity, and reverse-phase HPLC chromatography, and chromatofocusing. For example, the CA protein may be purified using a standard anti-CA antibody column. Ultrafiltration and diafiltration techniques, in conjunction with protein concentration, are also useful. For general guidance in suitable purification techniques, see Scopes, R., Protein Purification, Springer-Verlag, NY (1982). The degree of purification necessary will vary depending on the use of the CA protein. In some instances no purification will be necessary.

[0181] Detection of Cancer Phenotype

[0182] Once expressed and purified if necessary, the CA proteins and nucleic acids are useful in a number of applications. In one aspect, the expression levels of genes are determined for different cellular states in the cancer phenotype; that is, the expression levels of genes in normal tissue and in cancer tissue (and in some cases, for varying severities of lymphoma that relate to prognosis, as outlined below) are evaluated to provide expression profiles. An expression profile of a particular cell state or point of development is essentially a “fingerprint” of the state; while two states may have any particular gene similarly expressed, the evaluation of a number of genes simultaneously allows the generation of a gene expression profile that is unique to the state of the cell. By comparing expression profiles of cells in different states, information regarding which genes are important (including both up- and down-regulation of genes) in each of these states is obtained. Then, diagnosis may be done or confirmed: does tissue from a particular patient have the gene expression profile of normal or cancer tissue.

[0183] “Differential expression,” or equivalents used herein, refers to both qualitative as well as quantitative differences in the temporal and/or cellular expression patterns of genes, within and among the cells. Thus, a differentially expressed gene can qualitatively have its expression altered, including an activation or inactivation, in, for example, normal versus cancer tissue. That is, genes may be turned on or turned off in a particular state, relative to another state. As is apparent to the skilled artisan, any comparison of two or more states can be made. Such a qualitatively regulated gene will exhibit an expression pattern within a state or cell type which is detectable by standard techniques in one such state or cell type, but is not detectable in both. Alternatively, the determination is quantitative in that expression is increased or decreased; that is, the expression of the gene is either up-regulated, resulting in an increased amount of transcript, or down-regulated, resulting in a decreased amount of transcript. The degree to which expression differs need only be large enough to quantify via standard characterization techniques as outlined below, such as by use of Affymetrix GeneChip® expression arrays, Lockhart, Nature Biotechnology, 14:1675-1680 (1996), hereby expressly incorporated by reference. Other techniques include, but are not limited to, quantitative reverse transcriptase PCR, Northern analysis and RNase protection. As outlined above, preferably the change in expression (i.e. upregulation or downregulation) is at least about 50%, more preferably at least about 100%, more preferably at least about 150%, more preferably, at least about 200%, with from 300 to at least 1000% being especially preferred.

[0184] As will be appreciated by those in the art, this may be done by evaluation at either the gene transcript, or the protein level; that is, the amount of gene expression may be monitored using nucleic acid probes to the DNA or RNA equivalent of the gene transcript, and the quantification of gene expression levels, or, alternatively, the final gene product itself (protein) can be monitored, for example through the use of antibodies to the CA protein and standard immunoassays (ELISAs, etc.) or other techniques, including mass spectroscopy assays, 2D gel electrophoresis assays, etc. Thus, the proteins corresponding to CA genes, i.e. those identified as being important in a particular cancer phenotype, i.e., lymphoma, can be evaluated in a diagnostic test specific for that cancer.

[0185] In a preferred embodiment, gene expression monitoring is done and a number of genes, i.e. an expression profile, is monitored simultaneously, although multiple protein expression monitoring can be done as well. Similarly, these assays may be done on an individual basis as well.

[0186] In this embodiment, the CA nucleic acid probes may be attached to biochips as outlined herein for the detection and quantification of CA sequences in a particular cell. The assays are done as is known in the art. As will be appreciated by those in the art, any number of different CA sequences may be used as probes, with single sequence assays being used in some cases, and a plurality of the sequences described herein being used in other embodiments. In addition, while solid-phase assays are described, any number of solution based assays may be done as well.

[0187] In a preferred embodiment, both solid and solution based assays may be used to detect CA sequences that are up-regulated or down-regulated in cancers as compared to normal tissue. In instances where the CA sequence has been altered but shows the same expression profile or an altered expression profile, the protein will be detected as outlined herein.

[0188] In a preferred embodiment nucleic acids encoding the CA protein are detected. Although DNA or RNA encoding the CA protein may be detected, of particular interest are methods wherein the mRNA encoding a CA protein is detected. The presence of mRNA in a sample is an indication that the CA gene has been transcribed to form the mRNA, and suggests that the protein is expressed. Probes to detect the mRNA can be any nucleotide/deoxynucleotide probe that is complementary to and base pairs with the mRNA and includes but is not limited to oligonucleotides, cDNA or RNA. Probes also should contain a detectable label, as defined herein. In one method the mRNA is detected after immobilizing the nucleic acid to be examined on a solid support such as nylon membranes and hybridizing the probe with the sample. Following washing to remove the non-specifically bound probe, the label is detected. In another method detection of the mRNA is performed in situ. In this method permeabilized cells or tissue samples are contacted with a detectably labeled nucleic acid probe for sufficient time to allow the probe to hybridize with the target mRNA. Following washing to remove the non-specifically bound probe, the label is detected. For example a digoxygenin labeled riboprobe (RNA probe) that is complementary to the mRNA encoding a CA protein is detected by binding the digoxygenin with an anti-digoxygenin secondary antibody and developed with nitro blue tetrazolium and 5-bromo-4-chloro-3-indoyl phosphate.

[0189] In a preferred embodiment, any of the three classes of proteins as described herein (secreted, transmembrane or intracellular proteins) are used in diagnostic assays. The CA proteins, antibodies, nucleic acids, modified proteins and cells containing CA sequences are used in diagnostic assays. This can be done on an individual gene or corresponding polypeptide level, or as sets of assays.

[0190] As described and defined herein, CA proteins find use as markers of cancers, including lymphomas such as, but not limited to, Hodgkin's and non-Hodgkin's lymphoma. Detection of these proteins in putative cancer tissue or patients allows for a determination or diagnosis of the type of cancer. Numerous methods known to those of ordinary skill in the art find use in detecting cancers. In one embodiment, antibodies are used to detect CA proteins. A preferred method separates proteins from a sample or patient by electrophoresis on a gel (typically a denaturing and reducing protein gel, but may be any other type of gel including isoelectric focusing gels and the like). Following separation of proteins, the CA protein is detected by immunoblotting with antibodies raised against the CA protein. Methods of immunoblotting are well known to those of ordinary skill in the art.

[0191] In another preferred method, antibodies to the CA protein find use in in situ imaging techniques. In this method cells are contacted with from one to many antibodies to the CA protein(s). Following washing to remove non-specific antibody binding, the presence of the antibody or antibodies is detected. In one embodiment the antibody is detected by incubating with a secondary antibody that contains a detectable label. In another method the primary antibody to the CA protein(s) contains a detectable label. In another preferred embodiment each one of multiple primary antibodies contains a distinct and detectable label. This method finds particular use in simultaneous screening for a plurality of CA proteins. As will be appreciated by one of ordinary skill in the art, numerous other histological imaging techniques are useful in the invention.

[0192] In a preferred embodiment the label is detected in a fluorometer that has the ability to detect and distinguish emissions of different wavelengths. In addition, a fluorescence activated cell sorter (FACS) can be used in the method.

[0193] In another preferred embodiment, antibodies find use in diagnosing cancers from blood samples. As previously described, certain CA proteins are secreted/circulating molecules. Blood samples, therefore, are useful as samples to be probed or tested for the presence of secreted CA proteins. Antibodies can be used to detect the CA proteins by any of the previously described immunoassay techniques including ELISA, immunoblotting (Western blotting), immunoprecipitation, BIACORE technology and the like, as will be appreciated by one of ordinary skill in the art.

[0194] In a preferred embodiment, in situ hybridization of labeled CA nucleic acid probes to tissue arrays is done. For example, arrays of tissue samples, including CA tissue and/or normal tissue, are made. In situ hybridization as is known in the art can then be done.

[0195] It is understood that when comparing the expression fingerprints between an individual and a standard, the skilled artisan can make a diagnosis as well as a prognosis. It is further understood that the genes that indicate diagnosis may differ from those that indicate prognosis.

[0196] In a preferred embodiment, the CA proteins, antibodies, nucleic acids, modified proteins and cells containing CA sequences are used in prognosis assays. As above, gene expression profiles can be generated that correlate to cancer, especially lymphoma, severity, in terms of long term prognosis. Again, this may be done on either a protein or gene level, with the use of genes being preferred. As above, the CA probes are attached to biochips for the detection and quantification of CA sequences in a tissue or patient. The assays proceed as outlined for diagnosis.

[0197] Screening for CA-Targeted Drugs

[0198] In one embodiment, any of the CA sequences as described herein are used in drug screening assays. The CA proteins, antibodies, nucleic acids, modified proteins and cells containing CA sequences are used in drug screening assays or by evaluating the effect of drug candidates on a “gene expression profile” or expression profile of polypeptides. In one embodiment, the expression profiles are used, preferably in conjunction with high throughput screening techniques to allow monitoring for expression profile genes after treatment with a candidate agent, Zlokarnik, et al., Science 279, 84-8 (1998), Heid, et al., Genome Res., 6:986-994 (1996).

[0199] In another embodiment, the CA proteins, antibodies, nucleic acids, modified proteins and cells containing the native or modified CA proteins are used in screening assays. That is, the present invention provides novel methods for screening for compositions that modulate the cancer phenotype. As above, this can be done by screening for modulators of gene expression or for modulators of protein activity. Similarly, this may be done on an individual gene or protein level or by evaluating the effect of drug candidates on a “gene expression profile”. In a preferred embodiment, the expression profiles are used, preferably in conjunction with high throughput screening techniques to allow monitoring for expression profile genes after treatment with a candidate agent, see Zlokarnik, supra.

[0200] Having identified the CA genes herein, a variety of assays to evaluate the effects of agents on gene expression may be executed. In a preferred embodiment, assays may be run on an individual gene or protein level. That is, having identified a particular gene as aberrantly regulated in cancer, candidate bioactive agents may be screened to modulate the gene's regulation. “Modulation” thus includes both an increase and a decrease in gene expression or activity. The preferred amount of modulation will depend on the original change of the gene expression in normal versus tumor tissue, with changes of at least 10%, preferably 50%, more preferably 100-300%, and in some embodiments 300-1000% or greater. Thus, if a gene exhibits a 4 fold increase in tumor compared to normal tissue, a decrease of about four fold is desired; a 10 fold decrease in tumor compared to normal tissue gives a 10 fold increase in expression for a candidate agent is desired, etc. Alternatively, where the CA sequence has been altered but shows the same expression profile or an altered expression profile, the protein will be detected as outlined herein.

[0201] As will be appreciated by those in the art, this may be done by evaluation at either the gene or the protein level; that is, the amount of gene expression may be monitored using nucleic acid probes and the quantification of gene expression levels, or, alternatively, the level of the gene product itself can be monitored, for example through the use of antibodies to the CA protein and standard immunoassays. Alternatively, binding and bioactivity assays with the protein may be done as outlined below.

[0202] In a preferred embodiment, gene expression monitoring is done and a number of genes, i.e. an expression profile, is monitored simultaneously, although multiple protein expression monitoring can be done as well.

[0203] In this embodiment, the CA nucleic acid probes are attached to biochips as outlined herein for the detection and quantification of CA sequences in a particular cell. The assays are further described below.

[0204] Generally, in a preferred embodiment, a candidate bioactive agent is added to the cells prior to analysis. Moreover, screens are provided to identify a candidate bioactive agent that modulates a particular type of cancer, modulates CA proteins, binds to a CA protein, or interferes between the binding of a CA protein and an antibody.

[0205] The term “candidate bioactive agent” or “drug candidate” or grammatical equivalents as used herein describes any molecule, e.g., protein, oligopeptide, small organic or inorganic molecule, polysaccharide, polynucleotide, etc., to be tested for bioactive agents that are capable of directly or indirectly altering either the cancer phenotype, binding to and/or modulating the bioactivity of a CA protein, or the expression of a CA sequence, including both nucleic acid sequences and protein sequences. In a particularly preferred embodiment, the candidate agent suppresses a CA phenotype, for example to a normal tissue fingerprint. Similarly, the candidate agent preferably suppresses a severe CA phenotype. Generally a plurality of assay mixtures are run in parallel with different agent concentrations to obtain a differential response to the various concentrations. Typically, one of these concentrations serves as a negative control, i.e., at zero concentration or below the level of detection.

[0206] In one aspect, a candidate agent will neutralize the effect of a CA protein. By “neutralize” is meant that activity of a protein is either inhibited or counter acted against so as to have substantially no effect on a cell.

[0207] Candidate agents encompass numerous chemical classes, though typically they are organic or inorganic molecules, preferably small organic compounds having a molecular weight of more than 100 and less than about 2,500 Daltons. Preferred small molecules are less than 2000, or less than 1500 or less than 1000 or less than 500 D. Candidate agents comprise functional groups necessary for structural interaction with proteins, particularly hydrogen bonding, and typically include at least an amine, carbonyl, hydroxyl or carboxyl group, preferably at least two of the functional chemical groups. The candidate agents often comprise cyclical carbon or heterocyclic structures and/or aromatic or polyaromatic structures substituted with one or more of the above functional groups. Candidate agents are also found among biomolecules including peptides, saccharides, fatty acids, steroids, purines, pyrimidines, derivatives, structural analogs or combinations thereof. Particularly preferred are peptides.

[0208] Candidate agents are obtained from a wide variety of sources including libraries of synthetic or natural compounds. For example, numerous means are available for random and directed synthesis of a wide variety of organic compounds and biomolecules, including expression of randomized oligonucleotides. Alternatively, libraries of natural compounds in the form of bacterial, fungal, plant and animal extracts are available or readily produced. Additionally, natural or synthetically produced libraries and compounds are readily modified through conventional chemical, physical and biochemical means. Known pharmacological agents may be subjected to directed or random chemical modifications, such as acylation, alkylation, esterification, or amidification to produce structural analogs.

[0209] In one embodiment, the candidate bioactive agents are proteins. By “protein” herein is meant at least two covalently attached amino acids, which includes proteins, polypeptides, oligopeptides and peptides. The protein may be made up of naturally occurring amino acids and peptide bonds, or synthetic peptidomimetic structures. Thus “amino acid”, or “peptide residue”, as used herein means both naturally occurring and synthetic amino acids. For example, homo-phenylalanine, citrulline and norleucine are considered amino acids for the purposes of the invention. “Amino acid” also includes imino acid residues such as proline and hydroxyproline. The side chains may be in either the (R) or the (S) configuration. In the preferred embodiment, the amino acids are in the (S) or L-configuration. If non-naturally occurring side chains are used, non-amino acid substituents may be used, for example to prevent or retard in vivo degradations.

[0210] In a preferred embodiment, the candidate bioactive agents are naturally occurring proteins or fragments of naturally occurring proteins. Thus, for example, cellular extracts containing proteins, or random or directed digests of proteinaceous cellular extracts, may be used. In this way libraries of prokaryotic and eukaryotic proteins may be made for screening in the methods of the invention. Particularly preferred in this embodiment are libraries of bacterial, fungal, viral, and mammalian proteins, with the latter being preferred, and human proteins being especially preferred.

[0211] In another preferred embodiment, the candidate bioactive agents are peptides of from about 5 to about 30 amino acids, with from about 5 to about 20 amino acids being preferred, and from about 7 to about 15 being particularly preferred. The peptides may be digests of naturally occurring proteins as is outlined above, random peptides, or “biased” random peptides. By “randomized” or grammatical equivalents herein is meant that each nucleic acid and peptide consists of essentially random nucleotides and amino acids, respectively. Since generally these random peptides (or nucleic acids, discussed below) are chemically synthesized, they may incorporate any nucleotide or amino acid at any position. The synthetic process can be designed to generate randomized proteins or nucleic acids, to allow the formation of all or most of the possible combinations over the length of the sequence, thus forming a library of randomized candidate bioactive proteinaceous agents.

[0212] In one embodiment, the library is fully randomized, with no sequence preferences or constants at any position. In a preferred embodiment, the library is biased. That is, some positions within the sequence are either held constant, or are selected from a limited number of possibilities. For example, in a preferred embodiment, the nucleotides or amino acid residues are randomized within a defined class, for example, of hydrophobic amino acids, hydrophilic residues, sterically biased (either small or large) residues, towards the creation of nucleic acid binding domains, the creation of cysteines, for cross-linking, prolines for SH-3 domains, serines, threonines, tyrosines or histidines for phosphorylation sites, etc., or to purines, etc.

[0213] In one embodiment, the candidate bioactive agents are nucleic acids. As described generally for proteins, nucleic acid candidate bioactive agents may be naturally occurring nucleic acids, random nucleic acids, or “biased” random nucleic acids. In another embodiment, the candidate bioactive agents are organic chemical moieties, a wide variety of which are available in the literature.

[0214] In assays for testing alteration of the expression profile of one or more CA genes, after the candidate agent has been added and the cells allowed to incubate for some period of time, a nucleic acid sample containing the target sequences to be analyzed is prepared. The target sequence is prepared using known techniques (e.g., converted from RNA to labeled cDNA, as described above) and added to a suitable microarray. For example, an in vitro reverse transcription with labels covalently attached to the nucleosides is performed. Generally, the nucleic acids are labeled with a label as defined herein, especially with biotin-FITC or PE, Cy3 and Cy5.

[0215] As will be appreciated by those in the art, these assays can be direct hybridization assays or can comprise “sandwich assays”, which include the use of multiple probes, as is generally outlined in U.S. Pat. Nos. 5,681,702, 5,597,909, 5,545,730, 5,594,117, 5,591,584, 5,571,670, 5,580,731, 5,571,670, 5,591,584, 5,624,802, 5,635,352, 5,594,118, 5,359,100, 5,124,246 and 5,681,697, all of which are hereby incorporated by reference. In this embodiment, in general, the target nucleic acid is prepared as outlined above, and then added to the biochip comprising a plurality of nucleic acid probes, under conditions that allow the formation of a hybridization complex.

[0216] A variety of hybridization conditions may be used in the present invention, including high, moderate and low stringency conditions as outlined above. The assays are generally run under stringency conditions that allow formation of the label probe hybridization complex only in the presence of target. Stringency can be controlled by altering a step parameter that is a thermodynamic variable, including, but not limited to, temperature, formamide concentration, salt concentration, chaotropic salt concentration, pH, organic solvent concentration, etc. These parameters may also be used to control non-specific binding, as is generally outlined in U.S. Pat. No. 5,681,697. Thus it may be desirable to perform certain steps at higher stringency conditions to reduce non-specific binding.

[0217] The reactions outlined herein may be accomplished in a variety of ways, as will be appreciated by those in the art. Components of the reaction may be added simultaneously, or sequentially, in any order, with preferred embodiments outlined below. In addition, the reaction may include a variety of other reagents in the assays. These include reagents like salts, buffers, neutral proteins, e.g. albumin, detergents, etc which may be used to facilitate optimal hybridization and detection, and/or reduce non-specific or background interactions. Also reagents that otherwise improve the efficiency of the assay, such as protease inhibitors, nuclease inhibitors, anti-microbial agents, etc., may be used, depending on the sample preparation methods and purity of the target. In addition, either solid phase or solution based (i.e., kinetic PCR) assays may be used.

[0218] Once the assay is run, the data are analyzed to determine the expression levels, and changes in expression levels as between states, of individual genes, forming a gene expression profile.

[0219] In a preferred embodiment, as for the diagnosis and prognosis applications, having identified the differentially expressed gene(s) or mutated gene(s) important in any one state, screens can be run to test for alteration of the expression of the CA genes individually. That is, screening for modulation of regulation of expression of a single gene can be done. Thus, for example, in the case of target genes whose presence or absence is unique between two states, screening is done for modulators of the target gene expression.

[0220] In addition, screens can be done for novel genes that are induced in response to a candidate agent. After identifying a candidate agent based upon its ability to suppress a CA expression pattern leading to a normal expression pattern, or modulate a single CA gene expression profile so as to mimic the expression of the gene from normal tissue, a screen as described above can be performed to identify genes that are specifically modulated in response to the agent. Comparing expression profiles between normal tissue and agent treated CA tissue reveals genes that are not expressed in normal tissue or CA tissue, but are expressed in agent treated tissue. These agent specific sequences can be identified and used by any of the methods described herein for CA genes or proteins. In particular these sequences and the proteins they encode find use in marking or identifying agent-treated cells. In addition, antibodies can be raised against the agent-induced proteins and used to target novel therapeutics to the treated CA tissue sample.

[0221] Thus, in one embodiment, a candidate agent is administered to a population of CA cells, that thus has an associated CA expression profile. By “administration” or “contacting” herein is meant that the candidate agent is added to the cells in such a manner as to allow the agent to act upon the cell, whether by uptake and intracellular action, or by action at the cell surface. In some embodiments, nucleic acid encoding a proteinaceous candidate agent (i.e., a peptide) may be put into a viral construct such as a retroviral construct and added to the cell, such that expression of the peptide agent is accomplished; see PCT US97/01019, hereby expressly incorporated by reference.

[0222] Once the candidate agent has been administered to the cells, the cells can be washed if desired and are allowed to incubate under preferably physiological conditions for some period of time. The cells are then harvested and a new gene expression profile is generated, as outlined herein.

[0223] Thus, for example, CA tissue may be screened for agents that reduce or suppress the CA phenotype. A change in at least one gene of the expression profile indicates that the agent has an effect on CA activity. By defining such a signature for the CA phenotype, screens for new drugs that alter the phenotype can be devised. With this approach, the drug target need not be known and need not be represented in the original expression screening platform, nor does the level of transcript for the target protein need to change.

[0224] In a preferred embodiment, as outlined above, screens may be done on individual genes and gene products (proteins). That is, having identified a particular differentially expressed gene as important in a particular state, screening of modulators of either the expression of the gene or the gene product itself can be done. The gene products of differentially expressed genes are sometimes referred to herein as “CA proteins” or “CAP”. The CAP may be a fragment, or alternatively, be the full-length protein to the fragment encoded by the nucleic acids of Tables 1-9 (human genomic sequences of SEQ ID NOS: 4, 14, 36, 48, 58, 68, 84, 96 and 108, and sequences of SEQ ID NOS: 5, 7, 9, 15, 17, 19, 21, 23, 25, 27, 29, 31, 37, 39, 41, 43, 49, 51, 53, 59, 61, 63, 69, 71, 73, 75, 77, 79, 85, 87, 89, 91, 97, 99, 101, 103, 109, 111 and 113 corresponding to the human mRNAs generated therefrom). In a preferred embodiment, the CAP is selected from the human protein sequences shown in Tables 1-9 (of SEQ ID NOS: 6, 8, 10, 16, 18, 20, 22, 24, 26, 28, 30, 32, 38, 40, 42, 44, 50, 52, 54, 60, 62, 64, 70, 72, 74, 76, 78, 80, 86, 88, 90, 92, 98, 100, 102, 104, 110, 112 and 114). In another embodiment, the sequences are sequence variants as further described herein.

[0225] Preferably, the CAP is a fragment approximately 14 to 24 amino acids in length. More preferably the fragment is a soluble fragment. Preferably, the fragment includes a non-transmembrane region. In a preferred embodiment, the fragment has an N-terminal Cys to aid in solubility. In one embodiment, the C-terminus of the fragment is kept as a free acid and the N-terminus is a free amine to aid in coupling, e.g., to a cysteine.

[0226] In one embodiment the CA proteins are conjugated to an immunogenic agent as discussed herein. In one embodiment the CA protein is conjugated to BSA.

[0227] In a preferred embodiment, screening is done to alter the biological function of the expression product of the CA gene. Again, having identified the importance of a gene in a particular state, screening for agents that bind and/or modulate the biological activity of the gene product can be run as is more fully outlined below.

[0228] In a preferred embodiment, screens are designed to first find candidate agents that can bind to CA proteins, and then these agents may be used in assays that evaluate the ability of the candidate agent to modulate the CAP activity and the cancer phenotype. Thus, as will be appreciated by those in the art, there are a number of different assays that may be run; binding assays and activity assays.

[0229] In a preferred embodiment, binding assays are done. In general, purified or isolated gene product is used; that is, the gene products of one or more CA nucleic acids are made. In general, this is done as is known in the art. For example, antibodies are generated to the protein gene products, and standard immunoassays are run to determine the amount of protein present. Alternatively, cells comprising the CA proteins can be used in the assays.

[0230] Thus, in a preferred embodiment, the methods comprise combining a CA protein and a candidate bioactive agent, and determining the binding of the candidate agent to the CA protein. Preferred embodiments utilize the human or mouse CA protein, although other mammalian proteins may also be used, for example for the development of animal models of human disease. In some embodiments, as outlined herein, variant or derivative CA proteins may be used.

[0231] Generally, in a preferred embodiment of the methods herein, the CA protein or the candidate agent is non-diffusably bound to an insoluble support having isolated sample receiving areas (e.g. a microtiter plate, an array, etc.). The insoluble support may be made of any composition to which the compositions can be bound, is readily separated from soluble material, and is otherwise compatible with the overall method of screening. The surface of such supports may be solid or porous and of any convenient shape. Examples of suitable insoluble supports include microtiter plates, arrays, membranes and beads. These are typically made of glass, plastic (e.g., polystyrene), polysaccharides, nylon or nitrocellulose, Teflon®, etc. Microtiter plates and arrays are especially convenient because a large number of assays can be carried out simultaneously, using small amounts of reagents and samples.

[0232] The particular manner of binding of the composition is not crucial so long as it is compatible with the reagents and overall methods of the invention, maintains the activity of the composition and is nondiffusable. Preferred methods of binding include the use of antibodies (which do not sterically block either the ligand binding site or activation sequence when the protein is bound to the support), direct binding to “sticky” or ionic supports, chemical crosslinking, the synthesis of the protein or agent on the surface, etc. Following binding of the protein or agent, excess unbound material is removed by washing. The sample receiving areas may then be blocked through incubation with bovine serum albumin (BSA), casein or other innocuous protein or other moiety.

[0233] In a preferred embodiment, the CA protein is bound to the support, and a candidate bioactive agent is added to the assay. Alternatively, the candidate agent is bound to the support and the CA protein is added. Novel binding agents include specific antibodies, non-natural binding agents identified in screens of chemical libraries, peptide analogs, etc. Of particular interest are screening assays for agents that have a low toxicity for human cells. A wide variety of assays may be used for this purpose, including labeled in vitro protein-protein binding assays, electrophoretic mobility shift assays, immunoassays for protein binding, functional assays (phosphorylation assays, etc.) and the like.

[0234] The determination of the binding of the candidate bioactive agent to the CA protein may be done in a number of ways. In a preferred embodiment, the candidate bioactive agent is labeled, and binding determined directly. For example, this may be done by attaching all or a portion of the CA protein to a solid support, adding a labeled candidate agent (for example a fluorescent label), washing off excess reagent, and determining whether the label is present on the solid support. Various blocking and washing steps may be utilized as is known in the art.

[0235] By “labeled” herein is meant that the compound is either directly or indirectly labeled with a label which provides a detectable signal, e.g. radioisotope, fluorescers, enzyme, antibodies, particles such as magnetic particles, chemiluminescers, or specific-binding molecules, etc. Specific binding molecules include pairs, such as biotin and streptavidin, digoxin and antidigoxin etc. For the specific binding members, the complementary member would normally be labeled with a molecule which provides for detection, in accordance with known procedures, as outlined above. The label can directly or indirectly provide a detectable signal.

[0236] In some embodiments, only one of the components is labeled. For example, the proteins (or proteinaccous candidate agents) may be labeled at tyrosine positions using ¹²⁵I, or with fluorophores. Alternatively, more than one component may be labeled with different labels; using ¹²⁵I for the proteins, for example, and a fluorophore for the candidate agents.

[0237] In a preferred embodiment, the binding of the candidate bioactive agent is determined through the use of competitive binding assays. In this embodiment, the competitor is a binding moiety known to bind to the target molecule (i.e. CA protein), such as an antibody, peptide, binding partner, ligand, etc. Under certain circumstances, there may be competitive binding as between the bioactive agent and the binding moiety, with the binding moiety displacing the bioactive agent.

[0238] In one embodiment, the candidate bioactive agent is labeled. Either the candidate bioactive agent, or the competitor, or both, is added first to the protein for a time sufficient to allow binding, if present. Incubations may be performed at any temperature which facilitates optimal activity, typically between 4 and 40° C. Incubation periods are selected for optimum activity, but may also be optimized to facilitate rapid high throughput screening. Typically between 0.1 and 1 hour will be sufficient. Excess reagent is generally removed or washed away. The second component is then added, and the presence or absence of the labeled component is followed, to indicate binding.

[0239] In a preferred embodiment, the competitor is added first, followed by the candidate bioactive agent. Displacement of the competitor is an indication that the candidate bioactive agent is binding to the CA protein and thus is capable of binding to, and potentially modulating, the activity of the CA protein. In this embodiment, either component can be labeled. Thus, for example, if the competitor is labeled, the presence of label in the wash solution indicates displacement by the agent. Alternatively, if the candidate bioactive agent is labeled, the presence of the label on the support indicates displacement.

[0240] In an alternative embodiment, the candidate bioactive agent is added first, with incubation and washing, followed by the competitor. The absence of binding by the competitor may indicate that the bioactive agent is bound to the CA protein with a higher affinity. Thus, if the candidate bioactive agent is labeled, the presence of the label on the support, coupled with a lack of competitor binding, may indicate that the candidate agent is capable of binding to the CA protein.

[0241] In a preferred embodiment, the methods comprise differential screening to identity bioactive agents that are capable of modulating the activity of the CA proteins. In this embodiment, the methods comprise combining a CA protein and a competitor in a first sample. A second sample comprises a candidate bioactive agent, a CA protein and a competitor. The binding of the competitor is determined for both samples, and a change, or difference in binding between the two samples indicates the presence of an agent capable of binding to the CA protein and potentially modulating its activity. That is, if the binding of the competitor is different in the second sample relative to the first sample, the agent is capable of binding to the CA protein.

[0242] Alternatively, a preferred embodiment utilizes differential screening to identify drug candidates that bind to the native CA protein, but cannot bind to modified CA proteins. The structure of the CA protein may be modeled, and used in rational drug design to synthesize agents that interact with that site. Drug candidates that affect CA bioactivity are also identified by screening drugs for the ability to either enhance or reduce the activity of the protein.

[0243] Positive controls and negative controls may be used in the assays. Preferably all control and test samples are performed in at least triplicate to obtain statistically significant results. Incubation of all samples is for a time sufficient for the binding of the agent to the protein. Following incubation, all samples are washed free of non-specifically bound material and the amount of bound, generally labeled agent determined. For example, where a radiolabel is employed, the samples may be counted in a scintillation counter to determine the amount of bound compound.

[0244] A variety of other reagents may be included in the screening assays. These include reagents like salts, neutral proteins, e.g. albumin, detergents, etc which may be used to facilitate optimal protein-protein binding and/or reduce non-specific or background interactions. Also reagents that otherwise improve the efficiency of the assay, such as protease inhibitors, nuclease inhibitors, anti-microbial agents, etc., may be used. The mixture of components may be added in any order that provides for the requisite binding.

[0245] Screening for agents that modulate the activity of CA proteins may also be done. In a preferred embodiment, methods for screening for a bioactive agent capable of modulating the activity of CA proteins comprise the steps of adding a candidate bioactive agent to a sample of CA proteins, as above, and determining an alteration in the biological activity of CA proteins. “Modulating the activity of a CA protein” includes an increase in activity, a decrease in activity, or a change in the type or kind of activity present. Thus, in this embodiment, the candidate agent should both bind to CA proteins (although this may not be necessary), and alter its biological or biochemical activity as defined herein. The methods include both in vitro screening methods, as are generally outlined above, and in vivo screening of cells for alterations in the presence, distribution, activity or amount of CA proteins.

[0246] Thus, in this embodiment, the methods comprise combining a CA sample and a candidate bioactive agent, and evaluating the effect on CA activity. By “CA activity” or grammatical equivalents herein is meant one of the CA protein's biological activities, including, but not limited to, its role in tumorigenesis, including cell division, preferably in lymphatic tissue, cell proliferation, tumor growth and transformation of cells. In one embodiment, CA activity includes activation of or by a protein encoded by a nucleic acid of Tables 1-9. An inhibitor of CA activity is the inhibition of any one or more CA activities.

[0247] In a preferred embodiment, the activity of the CA protein is increased; in another preferred embodiment, the activity of the CA protein is decreased. Thus, bioactive agents that are antagonists are preferred in some embodiments, and bioactive agents that are agonists may be preferred in other embodiments.

[0248] In a preferred embodiment, the invention provides methods for screening for bioactive agents capable of modulating the activity of a CA protein. The methods comprise adding a candidate bioactive agent, as defined above, to a cell comprising CA proteins. Preferred cell types include almost any cell. The cells contain a recombinant nucleic acid that encodes a CA protein. In a preferred embodiment, a library of candidate agents is tested on a plurality of cells.

[0249] In one aspect, the assays are evaluated in the presence or absence or previous or subsequent exposure of physiological signals, for example hormones, antibodies, peptides, antigens, cytokines, growth factors, action potentials, pharmacological agents including chemotherapeutics, radiation, carcinogenics, or other cells (i.e. cell-cell contacts). In another example, the determinations are determined at different stages of the cell cycle process.

[0250] In this way, bioactive agents are identified. Compounds with pharmacological activity are able to enhance or interfere with the activity of the CA protein.

[0251] Applications of the Invention

[0252] In one embodiment, a method of inhibiting cancer cell division is provided. In another embodiment, a method of inhibiting tumor growth is provided. In a further embodiment, methods of treating cells or individuals with cancer are provided.

[0253] The method comprises administration of a cancer inhibitor. In particular embodiments, the cancer inhibitor is an antisense molecule, a pharmaceutical composition, a therapeutic agent or small molecule, or a monoclonal, polyclonal, chimeric or humanized antibody. In particular embodiments, a therapeutic agent is coupled with a an antibody, preferable a monoclonal antobody.

[0254] In other embodiments, methods for detection or diagnosis of cancer cells in an individual are provided. In particular embodiments, the diagnostic/detection agent is a small molecule that pereferentially binds to a CAP according to the invention. In one embodiment, the diagnostic/detection agent is an antibody, preferably a monoclonal antobody, preferably linked to a detectable agent.

[0255] In other embodiments of the invention, animal models and transgenic animals are provided, which find use in generating animal models of cancers, particularly lymphomas and carcinomas.

[0256] (a) Antisense Molecules

[0257] In one embodiment, the cancer inhibitor is an antisense molecule. Antisense molecules as used herein include antisense or sense oligonucleotides comprising a single-stranded nucleic acid sequence (either RNA or DNA) capable of binding to target mRNA (sense) or DNA (antisense) sequences for cancer molecules. Antisense or sense oligonucleotides, according to the present invention, comprise a fragment generally at least about 14 nucleotides, preferably from about 14 to 30 nucleotides. The ability to derive an antisense or a sense oligonucleotide, based upon a cDNA sequence encoding a given protein is described in, for example, Stein and Cohen, Cancer Res. 48:2659, (1988) and van der Krol et al., BioTechniques 6:958, (1988).

[0258] Antisense molecules may be introduced into a cell containing the target nucleotide sequence by formation of a conjugate with a ligand binding molecule, as described in WO 91/04753. Suitable ligand binding molecules include, but are not limited to, cell surface receptors, growth factors, other cytokines, or other ligands that bind to cell surface receptors. Preferably, conjugation of the ligand binding molecule does not substantially interfere with the ability of the ligand binding molecule to bind to its corresponding molecule or receptor, or block entry of the sense or antisense oligonucleotide or its conjugated version into the cell. Alternatively, a sense or an antisense oligonucleotide may be introduced into a cell containing the target nucleic acid sequence by formation of an oligonucleotide-lipid complex, as described in WO 90/10448. It is understood that the use of antisense molecules or knock out and knock in models may also be used in screening assays as discussed above, in addition to methods of treatment.

[0259] (b) Pharmaceutical Compositions

[0260] Pharmaceutical compositions encompassed by the present invention include as active agent, the polypeptides, polynucleotides, antisense oligonucleotides, or antibodies of the invention disclosed herein in a therapeutically effective amount. An “effective amount” is an amount sufficient to effect beneficial or desired results, including clinical results. An effective amount can be administered in one or more administrations. For purposes of this invention, an effective amount of an adenoviral vector is an amount that is sufficient to palliate, ameliorate, stabilize, reverse, slow or delay the progression of the disease state.

[0261] The compositions can be used to treat cancer as well as metastases of primary cancer. In addition, the pharmaceutical compositions can be used in conjunction with conventional methods of cancer treatment, e.g., to sensitize tumors to radiation or conventional chemotherapy. The terms “treatment”, “treating”, “treat” and the like are used herein to generally refer to obtaining a desired pharmacologic and/or physiologic effect. The effect may be prophylactic in terms of completely or partially preventing a disease or symptom thereof and/or may be therapeutic in terms of a partial or complete stabilization or cure for a disease and/or adverse effect attributable to the disease. “Treatment” as used herein covers any treatment of a disease in a mammal, particularly a human, and includes: (a) preventing the disease or symptom from occurring in a subject which may be predisposed to the disease or symptom but has not yet been diagnosed as having it; (b) inhibiting the disease symptom, i.e., arresting its development; or (c) relieving the disease symptom, i.e., causing regression of the disease or symptom.

[0262] Where the pharmaceutical composition comprises an antibody that specifically binds to a gene product encoded by a differentially expressed polynucleotide, the antibody can be coupled to a drug for delivery to a treatment site or coupled to a detectable label to facilitate imaging of a site comprising cancer cells, such as prostate cancer cells. Methods for coupling antibodies to drugs and detectable labels are well known in the art, as are methods for imaging using detectable labels.

[0263] A “patient” for the purposes of the present invention includes both humans and other animals, particularly mammals, and organisms. Thus the methods are applicable to both human therapy and veterinary applications. In the preferred embodiment the patient is a mammal, and in the most preferred embodiment the patient is human.

[0264] The term “therapeutically effective amount” as used herein refers to an amount of a therapeutic agent to treat, ameliorate, or prevent a desired disease or condition, or to exhibit a detectable therapeutic or preventative effect. The effect can be detected by, for example, chemical markers or antigen levels. Therapeutic effects also include reduction in physical symptoms, such as decreased body temperature. The precise effective amount for a subject will depend upon the subject's size and health, the nature and extent of the condition, and the therapeutics or combination of therapeutics selected for administration. The effective amount for a given situation is determined by routine experimentation and is within the judgment of the clinician. For purposes of the present invention, an effective dose will generally be from about 0.01 mg/kg to about 5 mg/kg, or about 0.01 mg/kg to about 50 mg/kg or about 0.05 mg/kg to about 10 mg/kg of the compositions of the present invention in the individual to which it is administered.

[0265] A pharmaceutical composition can also contain a pharmaceutically acceptable carrier. The term “pharmaceutically acceptable carrier” refers to a carrier for administration of a therapeutic agent, such as antibodies or a polypeptide, genes, and other therapeutic agents. The term refers to any pharmaceutical carrier that does not itself induce the production of antibodies harmful to the individual receiving the composition, and which can be administered without undue toxicity. Suitable carriers can be large, slowly metabolized macromolecules such as proteins, polysaccharides, polylactic acids, polyglycolic acids, polymeric amino acids, amino acid copolymers, and inactive virus particles. Such carriers are well known to those of ordinary skill in the art. Pharmaceutically acceptable carriers in therapeutic compositions can include liquids such as water, saline, glycerol and ethanol. Auxiliary substances, such as wetting or emulsifying agents, pH buffering substances, and the like, can also be present in such vehicles. Typically, the therapeutic compositions are prepared as injectables, either as liquid solutions or suspensions; solid forms suitable for solution in, or suspension in, liquid vehicles prior to injection can also be prepared. Liposomes are included within the definition of a pharmaceutically acceptable carrier. Pharmaceutically acceptable salts can also be present in the pharmaceutical composition, e.g., mineral acid salts such as hydrochlorides, hydrobromides, phosphates, sulfates, and the like; and the salts of organic acids such as acetates, propionates, malonates, benzoates, and the like. A thorough discussion of pharmaceutically acceptable excipients is available in Remington: The Science and Practice of Pharmacy (1995) Alfonso Gennaro, Lippincott, Williams, & Wilkins.

[0266] The pharmaceutical compositions can be prepared in various forms, such as granules, tablets, pills, suppositories, capsules, suspensions, salves, lotions and the like. Pharmaceutical grade organic or inorganic carriers and/or diluents suitable for oral and topical use can be used to make up compositions containing the therapeutically-active compounds. Diluents known to the art include aqueous media, vegetable and animal oils and fats. Stabilizing agents, wetting and emulsifying agents, salts for varying the osmotic pressure or buffers for securing an adequate pH value, and skin penetration enhancers can be used as auxiliary agents.

[0267] The pharmaceutical compositions of the present invention comprise a CA protein in a form suitable for administration to a patient. In the preferred embodiment, the pharmaceutical compositions are in a water soluble form, such as being present as pharmaceutically acceptable salts, which is meant to include both acid and base addition salts. “Pharmaceutically acceptable acid addition salt” refers to those salts that retain the biological effectiveness of the free bases and that are not biologically or otherwise undesirable, formed with inorganic acids such as hydrochloric acid, hydrobromic acid, sulfuric acid, nitric acid, phosphoric acid and the like, and organic acids such as acetic acid, propionic acid, glycolic acid, pyruvic acid, oxalic acid, maleic acid, malonic acid, succinic acid, fumaric acid, tartaric acid, citric acid, benzoic acid, cinnamic acid, mandelic acid, methanesulfonic acid, ethanesulfonic acid, p-toluenesulfonic acid, salicylic acid and the like. “Pharmaceutically acceptable base addition salts” include those derived from inorganic bases such as sodium, potassium, lithium, ammonium, calcium, magnesium, iron, zinc, copper, manganese, aluminum salts and the like. Particularly preferred are the ammonium, potassium, sodium, calcium, and magnesium salts. Salts derived from pharmaceutically acceptable organic non-toxic bases include salts of primary, secondary, and tertiary amines, substituted amines including naturally occurring substituted amines, cyclic amines and basic ion exchange resins, such as isopropylamine, trimethylamine, diethylamine, triethylamine, tripropylamine, and ethanolamine.

[0268] The pharmaceutical compositions may also include one or more of the following: carrier proteins such as serum albumin; buffers; fillers such as microcrystalline cellulose, lactose, corn and other starches; binding agents; sweeteners and other flavoring agents; coloring agents; and polyethylene glycol. Additives are well known in the art, and are used in a variety of formulations.

[0269] The compounds having the desired pharmacological activity may be administered in a physiologically acceptable carrier to a host, as previously described. The agents may be administered in a variety of ways, orally, parenterally e.g., subcutaneously, intraperitoneally, intravascularly, etc. Depending upon the manner of introduction, the compounds may be formulated in a variety of ways. The concentration of therapeutically active compound in the formulation may vary from about 0.1-100% wgt/vol. Once formulated, the compositions contemplated by the invention can be (1) administered directly to the subject (e.g., as polynucleotide, polypeptides, small molecule agonists or antagonists, and the like); or (2) delivered ex vivo, to cells derived from the subject (e.g., as in ex vivo gene therapy). Direct delivery of the compositions will generally be accomplished by parenteral injection, e.g., subcutaneously, intraperitoneally, intravenously or intramuscularly, intratumoral or to the interstitial space of a tissue. Other modes of administration include oral and pulmonary administration, suppositories, and transdermal applications, needles, and gene guns or hyposprays. Dosage treatment can be a single dose schedule or a multiple dose schedule.

[0270] Methods for the ex vivo delivery and reimplantation of transformed cells into a subject are known in the art and described in e.g., International Publication No. WO 93/14778. Examples of cells useful in ex vivo applications include, for example, stem cells, particularly hematopoetic, lymph cells, macrophages, dendritic cells, or tumor cells. Generally, delivery of nucleic acids for both ex vivo and in vitro applications can be accomplished by, for example, dextran-mediated transfection, calcium phosphate precipitation, polybrene mediated transfection, protoplast fusion, electroporation, encapsulation of the polynucleotide(s) in liposomes, and direct microinjection of the DNA into nuclei, all well known in the art.

[0271] Once differential expression of a gene corresponding to a CA polynucleotide described herein has been found to correlate with a proliferative disorder, such as neoplasia, dysplasia, and hyperplasia, the disorder can be amenable to treatment by administration of a therapeutic agent based on the provided polynucleotide, corresponding polypeptide or other corresponding molecule (e.g., antisense, ribozyme, etc.). In other embodiments, the disorder can be amenable to treatment by administration of a small molecule drug that, for example, serves as an inhibitor (antagonist) of the function of the encoded gene product of a gene having increased expression in cancerous cells relative to normal cells or as an agonist for gene products that are decreased in expression in cancerous cells (e.g., to promote the activity of gene products that act as tumor suppressors).

[0272] The dose and the means of administration of the inventive pharmaceutical compositions are determined based on the specific qualities of the therapeutic composition, the condition, age, and weight of the patient, the progression of the disease, and other relevant factors. For example, administration of polynucleotide therapeutic compositions agents includes local or systemic administration, including injection, oral administration, particle gun or catheterized administration, and topical administration. Preferably, the therapeutic polynucleotide composition contains an expression construct comprising a promoter operably linked to a polynucleotide of at least 12, 22, 25, 30, or 35 contiguous nt of the polynucleotide disclosed herein. Various methods can be used to administer the therapeutic composition directly to a specific site in the body. For example, a small metastatic lesion is located and the therapeutic composition injected several times in several different locations within the body of tumor. Alternatively, arteries that serve a tumor are identified, and the therapeutic composition injected into such an artery, in order to deliver the composition directly into the tumor. A tumor that has a necrotic center is aspirated and the composition injected directly into the now empty center of the tumor. An antisense composition is directly administered to the surface of the tumor, for example, by topical application of the composition. X-ray imaging is used to assist in certain of the above delivery methods.

[0273] Targeted delivery of therapeutic compositions containing an antisense polynucleotide, subgenomic polynucleotides, or antibodies to specific tissues can also be used. Receptor-mediated DNA delivery techniques are described in, for example, Findeis et al., Trends Biotechnol. (1993) 11:202; Chiou et al., Gene Therapeutics: Methods And Applications Of Direct Gene Transfer (J. A. Wolff, ed.) (1994); Wu et al., J. Biol. Chem. (1988) 263:621; Wu et al., J. Biol. Chem. (1994) 269:542; Zenke et al., Proc. Natl. Acad. Sci. (USA) (1990) 87:3655; Wu et al., J. Biol. Chem. (1991) 266:338. Therapeutic compositions containing a polynucleotide are administered in a range of about 100 ng to about 200 mg of DNA for local administration in a gene therapy protocol. Concentration ranges of about 500 ng to about 50 mg, about 1 μg to about 2 mg, about 5 μg to about 500 μg, and about 20 μg to about 100 μg of DNA can also be used during a gene therapy protocol. Factors such as method of action (e.g., for enhancing or inhibiting levels of the encoded gene product) and efficacy of transformation and expression are considerations that will affect the dosage required for ultimate efficacy of the antisense subgenomic polynucleotides. Where greater expression is desired over a larger area of tissue, larger amounts of antisense subgenomic polynucleotides or the same amounts re-administered in a successive protocol of administrations, or several administrations to different adjacent or close tissue portions of, for example, a tumor site, may be required to effect a positive therapeutic outcome. In all cases, routine experimentation in clinical trials will determine specific ranges for optimal therapeutic effect.

[0274] The therapeutic polynucleotides and polypeptides of the present invention can be delivered using gene delivery vehicles. The gene delivery vehicle can be of viral or non-viral origin (see generally, Jolly, Cancer Gene Therapy (1994) 1:51; Kimura, Human Gene Therapy (1994) 5:845; Connelly, Human Gene Therapy (1995) 1:185; and Kaplitt, Nature Genetics (1994) 6:148). Expression of such coding sequences can be induced using endogenous mammalian or heterologous promoters. Expression of the coding sequence can be either constitutive or regulated.

[0275] Viral-based vectors for delivery of a desired polynucleotide and expression in a desired cell are well known in the art. Exemplary viral-based vehicles include, but are not limited to, recombinant retroviruses (see, e.g., WO 90/07936; WO 94/03622; WO 93/25698; WO 93/25234; U.S. Pat. No. 5,219,740; WO 93/11230; WO 93/10218; U.S. Pat. No. 4,777,127; GB Patent No. 2,200,651; EP 0 345 242; and WO 91/02805), alphavirus-based vectors (e.g., Sindbis virus vectors, Semliki forest virus (ATCC VR-67; ATCC VR-1247), Ross River virus (ATCC VR-373; ATCC VR-1246) and Venezuelan equine encephalitis virus (ATCC VR-923; ATCC VR-1250; ATCC VR 1249; ATCC VR-532)), and adeno-associated virus (AAV) vectors (see, e.g., WO 94/12649, WO 93/03769; WO 93/19191; WO 94/28938; WO 95/11984 and WO 95/00655). Administration of DNA linked to killed adenovirus as described in Curiel, Hum. Gene Ther. (1992) 3:147 can also be employed.

[0276] Non-viral delivery vehicles and methods can also be employed, including, but not limited to, polycationic condensed DNA linked or unlinked to killed adenovirus alone (see, e.g., Curiel, Hum. Gene Ther. (1992) 3:147); ligand-linked DNA (see, e.g., Wu, J. Biol. Chem. (1989) 264:16985); eukaryotic cell delivery vehicles cells (see, e.g., U.S. Pat. No. 5,814,482; WO 95/07994; WO 96/17072; WO 95/30763; and WO 97/42338) and nucleic charge neutralization or fusion with cell membranes. Naked DNA can also be employed. Exemplary naked DNA introduction methods are described in WO 90/11092 and U.S. Pat. No. 5,580,859. Liposomes that can act as gene delivery vehicles are described in U.S. Pat. No. 5,422,120; WO 95/13796; WO 94/23697; WO 91/14445; and EP 0524968. Additional approaches are described in Philip, Mol. Cell Biol. (1994) 14:2411, and in Woffendin, Proc. Natl. Acad. Sci. (1994) 91:1581.

[0277] Further non-viral delivery suitable for use includes mechanical delivery systems such as the approach described in Woffendin et al., Proc. Natl. Acad. Sci. USA (1994) 91(24):11581. Moreover, the coding sequence and the product of expression of such can be delivered through deposition of photopolymerized hydrogel materials or use of ionizing radiation (see, e.g., U.S. Pat. No. 5,206,152 and WO 92/11033). Other conventional methods for gene delivery that can be used for delivery of the coding sequence include, for example, use of hand-held gene transfer particle gun (see, e.g., U.S. Pat. No. 5,149,655); use of ionizing radiation for activating transferred gene (see, e.g., U.S. Pat. No. 5,206,152 and WO 92/11033).

[0278] The administration of the CA proteins and modulators of the present invention can be done in a variety of ways as discussed above, including, but not limited to, orally, subcutaneously, intravenously, intranasally, transdermally, intraperitoneally, intramuscularly, intrapulmonary, vaginally, rectally, or intraocularly. In some instances, for example, in the treatment of wounds and inflammation, the CA proteins and modulators may be directly applied as a solution or spray.

[0279] In a preferred embodiment, CA proteins and modulators are administered as therapeutic agents, and can be formulated as outlined above. Similarly, CA genes (including both the full-length sequence, partial sequences, or regulatory sequences of the CA coding regions) can be administered in gene therapy applications, as is known in the art. These CA genes can include antisense applications, either as gene therapy (i.e. for incorporation into the genome) or as antisense compositions, as will be appreciated by those in the art.

[0280] Thus, in one embodiment, methods of modulating CA gene activity in cells or organisms are provided. In one embodiment, the methods comprise administering to a cell an anti-CA antibody that reduces or eliminates the biological activity of an endogenous CA protein. Alternatively, the methods comprise administering to a cell or organism a recombinant nucleic acid encoding a CA protein. As will be appreciated by those in the art, this may be accomplished in any number of ways. In a preferred embodiment, for example when the CA sequence is down-regulated in cancer, the activity of the CA gene product is increased by increasing the amount of CA expression in the cell, for example by overexpressing the endogenous CA gene or by administering a gene encoding the CA sequence, using known gene-therapy techniques. In a preferred embodiment, the gene therapy techniques include the incorporation of the exogenous gene using enhanced homologous recombination (EHR), for example as described in PCT/US93/03868, hereby incorporated by reference in its entirety. Alternatively, for example when the CA sequence is up-regulated in cancer, the activity of the endogenous CA gene is decreased, for example by the administration of a CA antisense nucleic acid.

[0281] (c) Vaccines

[0282] In a preferred embodiment, CA genes are administered as DNA vaccines, either single genes or combinations of CA genes. Naked DNA vaccines are generally known in the art. Brower, Nature Biotechnology, 16:1304-1305 (1998).

[0283] In one embodiment, CA genes of the present invention are used as DNA vaccines. Methods for the use of genes as DNA vaccines are well known to one of ordinary skill in the art, and include placing a CA gene or portion of a CA gene under the control of a promoter for expression in a patient with cancer. The CA gene used for DNA vaccines can encode full-length CA proteins, but more preferably encodes portions of the CA proteins including peptides derived from the CA protein. In a preferred embodiment a patient is immunized with a DNA vaccine comprising a plurality of nucleotide sequences derived from a CA gene. Similarly, it is possible to immunize a patient with a plurality of CA genes or portions thereof. Without being bound by theory, expression of the polypeptide encoded by the DNA vaccine, cytotoxic T-cells, helper T-cells and antibodies are induced that recognize and destroy or eliminate cells expressing CA proteins.

[0284] In a preferred embodiment, the DNA vaccines include a gene encoding an adjuvant molecule with the DNA vaccine. Such adjuvant molecules include cytokines that increase the immunogenic response to the CA polypeptide encoded by the DNA vaccine. Additional or alternative adjuvants are known to those of ordinary skill in the art and find use in the invention.

[0285] (d) Antibodies

[0286] In one embodiment, a cancer inhibitor is an antibody as discussed above. In one embodiment, the CA proteins of the present invention may be used to generate polyclonal and monoclonal antibodies to CA proteins, which are useful as described herein. Similarly, the CA proteins can be coupled, using standard technology, to affinity chromatography columns. These columns may then be used to purify CA antibodies. In a preferred embodiment, the antibodies are generated to epitopes unique to a CA protein; that is, the antibodies show little or no cross-reactivity to other proteins. These antibodies find use in a number of applications. For example, the CA antibodies may be coupled to standard affinity chromatography columns and used to purify CA proteins. The antibodies may also be used therapeutically as blocking polypeptides, as outlined above, since they will specifically bind to the CA protein.

[0287] The present invention further provides methods for detecting the presence of and/or measuring a level of a polypeptide in a biological sample, which CA polypeptide is encoded by a CA polynucleotide that is differentially expressed in a cancer cell, using an antibody specific for the encoded polypeptide. The methods generally comprise: a) contacting the sample with an antibody specific for a polypeptide encoded by a CA polynucleotide that is differentially expressed in a prostate cancer cell; and b) detecting binding between the antibody and molecules of the sample.

[0288] Detection of specific binding of the antibody specific for the encoded cancer-associated polypeptide, when compared to a suitable control is an indication that encoded polypeptide is present in the sample. Suitable controls include a sample known not to contain the encoded CA polypeptide or known not to contain elevated levels of the polypeptide; such as normal tissue, and a sample contacted with an antibody not specific for the encoded polypeptide, e.g., an anti-idiotype antibody. A variety of methods to detect specific antibody-antigen interactions are known in the art and can be used in the method, including, but not limited to, standard immunohistological methods, immunoprecipitation, an enzyme immunoassay, and a radioimmunoassay. In general, the specific antibody will be detectably labeled, either directly or indirectly. Direct labels include radioisotopes; enzymes whose products are detectable (e.g., luciferase, β-galactosidase, and the like); fluorescent labels (e.g., fluorescein isothiocyanate, rhodamine, phycoerythrin, and the like); fluorescence emitting metals, e.g., ¹⁵²Eu, or others of the lanthamide series, attached to the antibody through metal chelating groups such as EDTA; chemiluminescent compounds, e.g., luminol, isoluminol, acridinium salts, and the like; bioluminescent compounds, e.g., luciferin, aequorin (green fluorescent protein), and the like. The antibody may be attached (coupled) to an insoluble support, such as a polystyrene plate or a bead. Indirect labels include second antibodies specific for antibodies specific for the encoded polypeptide (“first specific antibody”), wherein the second antibody is labeled as described above; and members of specific binding pairs, e.g., biotin-avidin, and the like. The biological sample may be brought into contact with and immobilized on a solid support or carrier, such as nitrocellulose, that is capable of immobilizing cells, cell particles, or soluble proteins. The support may then be washed with suitable buffers, followed by contacting with a detectably-labeled first specific antibody. Detection methods are known in the art and will be chosen as appropriate to the signal emitted by the detectable label. Detection is generally accomplished in comparison to suitable controls, and to appropriate standards.

[0289] In some embodiments, the methods are adapted for use in vivo, e.g., to locate or identify sites where cancer cells are present. In these embodiments, a detectably-labeled moiety, e.g., an antibody, which is specific for a cancer-associated polypeptide is administered to an individual (e.g., by injection), and labeled cells are located using standard imaging techniques, including, but not limited to, magnetic resonance imaging, computed tomography scanning, and the like. In this manner, cancer cells are differentially labeled.

[0290] (e) Detection and Diagnosis of Cancers

[0291] Without being bound by theory, it appears that the various CA sequences are important in cancers. Accordingly, disorders based on mutant or variant CA genes may be determined. In one embodiment, the invention provides methods for identifying cells containing variant CA genes comprising determining all or part of the sequence of at least one endogenous CA genes in a cell. As will be appreciated by those in the art, this may be done using any number of sequencing techniques. In a preferred embodiment, the invention provides methods of identifying the CA genotype of an individual comprising determining all or part of the sequence of at least one CA gene of the individual. This is generally done in at least one tissue of the individual, and may include the evaluation of a number of tissues or different samples of the same tissue. The method may include comparing the sequence of the sequenced CA gene to a known CA gene, i.e., a wild-type gene. As will be appreciated by those in the art, alterations in the sequence of some CA genes can be an indication of either the presence of the disease, or propensity to develop the disease, or prognosis evaluations.

[0292] The sequence of all or part of the CA gene can then be compared to the sequence of a known CA gene to determine if any differences exist. This can be done using any number of known homology programs, such as Bestfit, etc. In a preferred embodiment, the presence of a difference in the sequence between the CA gene of the patient and the known CA gene is indicative of a disease state or a propensity for a disease state, as outlined herein.

[0293] In a preferred embodiment, the CA genes are used as probes to determine the number of copies of the CA gene in the genome. For example, some cancers exhibit: chromosomal deletions or insertions, resulting in an alteration in the copy number of a gene.

[0294] In another preferred embodiment CA genes are used as probes to determine the chromosomal location of the CA genes. Information such as chromosomal location finds use in providing a diagnosis or prognosis in particular when chromosomal abnormalities such as translocations, and the like are identified in CA gene loci.

[0295] The present invention provides methods of using the polynucleotides described herein for detecting cancer cells, facilitating diagnosis of cancer and the severity of a cancer (e.g., tumor grade, tumor burden, and the like) in a subject, facilitating a determination of the prognosis of a subject, and assessing the responsiveness of the subject to therapy (e.g., by providing a measure of therapeutic effect through, for example, assessing tumor burden during or following a chemotherapeutic regimen). Detection can be based on detection of a polynucleotide that is differentially expressed in a cancer cell, and/or detection of a polypeptide encoded by a polynucleotide that is differentially expressed in a cancer cell. The detection methods of the invention can be conducted in vitro or in vivo, on isolated cells, or in whole tissues or a bodily fluid e.g., blood, plasma, serum, urine, and the like).

[0296] In some embodiments, methods are provided for detecting a cancer cell by detecting expression in the cell of a transcript that is differentially expressed in a cancer cell. Any of a variety of known methods can be used for detection, including, but not limited to, detection of a transcript by hybridization with a polynucleotide that hybridizes to a polynucleotide that is differentially expressed in a prostate cancer cell; detection of a transcript by a polymerase chain reaction using specific oligonucleotide primers; in situ hybridization of a cell using as a probe a polynucleotide that hybridizes to a gene that is differentially expressed in a prostate cancer cell. The methods can be used to detect and/or measure mRNA levels of a gene that is differentially expressed in a cancer cell. In some embodiments, the methods comprise: a) contacting a sample with a polynucleotide that corresponds to a differentially expressed gene described herein under conditions that allow hybridization; and b) detecting hybridization, if any.

[0297] Detection of differential hybridization, when compared to a suitable control, is an indication of the presence in the sample of a polynucleotide that is differentially expressed in a cancer cell. Appropriate controls include, for example, a sample that is known not to contain a polynucleotide that is differentially expressed in a cancer cell, and use of a labeled polynucleotide of the same “sense” as the polynucleotide that is differentially expressed in the cancer cell. Conditions that allow hybridization are known in the art, and have been described in more detail above. Detection can also be accomplished by any known method, including, but not limited to, in situ hybridization, PCR (polymerase chain reaction), RT-PCR (reverse transcription-PCR), TMA, bDNA, and Nasbau and “Northern” or RNA blotting, or combinations of such techniques, using a suitably labeled polynucleotide. A variety of labels and labeling methods for polynucleotides are known in the art and can be used in the assay methods of the invention. Specificity of hybridization can be determined by comparison to appropriate controls.

[0298] Polynucleotides generally comprising at least 10 nt, at least 12 nt or at least 15 contiguous nucleotides of a polynucleotide provided herein, such as, for example, those having the sequence as depicted in Tables 1-9, are used for a variety of purposes, such as probes for detection of and/or measurement of, transcription levels of a polynucleotide that is differentially expressed in a prostate cancer cell. As will be readily appreciated by the ordinarily skilled artisan, the probe can be detectably labeled and contacted with, for example, an array comprising immobilized polynucleotides obtained from a test sample (e.g., mRNA). Alternatively, the probe can be immobilized on an array and the test sample detectably labeled. These and other variations of the methods of the invention are well within the skill in the art and are within the scope of the invention.

[0299] Nucleotide probes are used to detect expression of a gene corresponding to the provided polynucleotide. In Northern blots, mRNA is separated electrophoretically and contacted with a probe. A probe is detected as hybridizing to an mRNA species of a particular size. The amount of hybridization can be quantitated to determine relative amounts of expression, for example under a particular condition. Probes are used for in situ hybridization to cells to detect expression. Probes can also be used in vivo for diagnostic detection of hybridizing sequences. Probes are typically labeled with a radioactive isotope. Other types of detectable labels can be used such as chromophores, fluorophores, and enzymes. Other examples of nucleotide hybridization assays are described in WO92/02526 and U.S. Pat. No. 5,124,246.

[0300] PCR is another means for detecting small amounts of target nucleic acids (see, e.g., Mullis et al., Meth. Enzymol. (1987) 155:335; U.S. Pat. No. 4,683,195; and U.S. Pat. No. 4,683,202). Two primer oligonucleotides that hybridize with the target nucleic acids are used to prime the reaction. The primers can be composed of sequence within or 3′ and 5′ to the CA polynucleotides disclosed herein. Alternatively, if the primers are 3′ and 5′ to these polynucleotides, they need not hybridize to them or the complements. After amplification of the target with a thermostable polymerase, the amplified target nucleic acids can be detected by methods known in the art, e.g., Southern blot. mRNA or cDNA can also be detected by traditional blotting techniques (e.g., Southern blot, Northern blot, etc.) described in Sambrook et al., “Molecular Cloning: A Laboratory Manual” (New York, Cold Spring Harbor Laboratory, 1989) (e.g., without PCR amplification). In general, mRNA or cDNA generated from mRNA using a polymerase enzyme can be purified and separated using gel electrophoresis, and transferred to a solid support, such as nitrocellulose. The solid support is exposed to a labeled probe, washed to remove any unhybridized probe, and duplexes containing the labeled probe are detected.

[0301] Methods using PCR amplification can be performed on the DNA from a single cell, although it is convenient to use at least about 10⁵ cells. The use of the polymerase chain reaction is described in Saiki et al. (1985) Science 239:487, and a review of current techniques may be found in Sambrook; et al. Molecular Cloning: A Laboratory Manual, CSH Press 1989, pp.14.2-14.33. A detectable label may be included in the amplification reaction. Suitable detectable labels include fluorochromes, (e.g. fluorescein isothiocyanate (FITC), rhodamine, Texas Red, phycoerythrin, allophycocyanin, 6-carboxyfluorescein (6-FAM), 2′,7′-dimethoxy-4′,5′-dichloro-6-carboxyfluorescein, 6-carboxy-X-rhodamine (ROX), 6-carboxy-2′,4′,7′,4,7-hexachlorofluorescein (HEX), 5-carboxyfluorescein (5-FAM) or N,N,N′,N′-tetramethyl-6-carboxyrhodamine (TAMRA)), radioactive labels, (e.g. ³²P, ³⁵S, ³H, etc.), and the like. The label may be a two stage system, where the polynucleotides is conjugated to biotin, haptens, etc. having a high affinity binding partner, e.g. avidin, specific antibodies, etc., where the binding partner is conjugated to a detectable label. The label may be conjugated to one or both of the primers. Alternatively, the pool of nucleotides used in the amplification is labeled, so as to incorporate the label into the amplification product.

[0302] The detection methods can be provided as part of a kit. Thus, the invention further provides kits for detecting the presence and/or a level of a polynucleotide that is differentially expressed in a cancer cell (e.g., by detection of an mRNA encoded by the differentially expressed gene of interest), and/or a polypeptide encoded thereby, in a biological sample. Procedures using these kits can be performed by clinical laboratories, experimental laboratories, medical practitioners, or private individuals. The kits of the invention for detecting a polypeptide encoded by a polynucleotide that is differentially expressed in a cancer cell may comprise a moiety that specifically binds the polypeptide, which may be an antibody that binds the polypeptide or fragment thereof. The kits of the invention used for detecting a polynucleotide that is differentially expressed in a prostate cancer cell may comprise a moiety that specifically hybridizes to such a polynucleotide. The kit may optionally provide additional components that are useful in the procedure, including, but not limited to, buffers, developing reagents, labels, reacting surfaces, means for detection, control samples, standards, instructions, and interpretive information. Accordingly, the present invention provides kits for detecting prostate cancer comprising at least one of polynucleotides having the sequence as shown in Tables 1-9 or fragments thereof.

[0303] The present invention further relates to methods of detecting/diagnosing a neoplastic or preneoplastic condition in a mammal (for example, a human). “Diagnosis” as used herein generally includes determination of a subject's susceptibility to a disease or disorder, determination as to whether a subject is presently affected by a disease or disorder, prognosis of a subject affected by a disease or disorder (e.g., identification of pre-metastatic or metastatic cancerous states, stages of cancer, or responsiveness of cancer to therapy), and therametrics (e.g., monitoring a subject's condition to provide information as to the effect or efficacy of therapy).

[0304] The terms “treatment”, “treating”, “treat” and the like are used herein to generally refer to obtaining a desired pharmacologic and/or physiologic effect. The effect may be prophylactic in terms of completely or partially preventing a disease or symptom thereof and/or may be therapeutic in terms of a partial or complete stabilization or cure for a disease and/or adverse effect attributable to the disease. “Treatment” as used herein covers any treatment of a disease in a mammal, particularly a human, and includes: (a) preventing the disease or symptom from occurring in a subject which may be predisposed to the disease or symptom but has not yet been diagnosed as having it; (b) inhibiting the disease symptom, i.e., arresting its development; or (c) relieving the disease symptom, i.e., causing regression of the disease or symptom.

[0305] An “effective amount” is an amount sufficient to effect beneficial or desired results, including clinical results. An effective amount can be administered in one or more administrations.

[0306] A “cell sample” encompasses a variety of sample types obtained from an individual and can be used in a diagnostic or monitoring assay. The definition encompasses blood and other liquid samples of biological origin, solid tissue samples such as a biopsy specimen or tissue cultures or cells derived therefrom, and the progeny thereof. The definition also includes samples that have been manipulated in any way after their procurement, such as by treatment with reagents, solubilization, or enrichment for certain components, such as proteins or polynucleotides. The term “cell sample” encompasses a clinical sample, and also includes cells in culture, cell supernatants, cell lysates, serum, plasma, biological fluid, and tissue samples.

[0307] As used herein, the terms “neoplastic cells”, “neoplasia”, “tumor”, “tumor cells”, “cancer” and “cancer cells”, (used interchangeably) refer to cells which exhibit relatively autonomous growth, so that they exhibit an aberrant growth phenotype characterized by a significant loss of control of cell proliferation (i.e., de-regulated cell division). Neoplastic cells can be malignant or benign.

[0308] The terms “individual,” “subject,” “host,” and “patient,” are used interchangeably herein and refer to any mammalian subject for whom diagnosis, treatment, or therapy is desired, particularly humans. Other subjects may include cattle, dogs, cats, guinea pigs, rabbits, rats, mice, horses, and so on. Examples of conditions that can be detected/diagnosed in accordance with these methods include cancers. Polynucleotides corresponding to genes that exhibit the appropriate expression pattern can be used to detect cancer in a subject. For a review of markers of cancer, see, e.g., Hanahan et al. Cell 100:57-70 (2000).

[0309] One detection/diagnostic method comprises: (a) obtaining from a mammal (e.g., a h human) a biological sample, (b) detecting the presence in the sample of a CA protein and (c) comparing the amount of product present with that in a control sample. In accordance with this method, the presence in the sample of elevated levels of a CA gene product indicates that the subject has a neoplastic or preneoplastic condition.

[0310] Biological samples suitable for use in this method include biological fluids such as serum, plasma, pleural effusions, urine and cerebro-spinal fluid, CSF, tissue samples (e.g., mammary tumor or prostate tissue slices) can also be used in the method of the invention, including samples derived from biopsies. Cell cultures or cell extracts derived, for example, from tissue biopsies can also be used.

[0311] The compound is preferably a binding protein, e.g., an antibody, polyclonal or monoclonal, or antigen binding fragment thereof, which can be labeled with a detectable marker (e.g., fluorophore, chromophore or isotope, etc). Where appropriate, the compound can be attached to a solid support such as a bead, plate, filter, resin, etc. Determination of formation of the complex can be effected by contacting the complex with a further compound (e.g., an antibody) that specifically binds to the first compound (or complex). Like the first compound, the further compound can be attached to a solid support and/or can be labeled with a detectable marker.

[0312] The identification of elevated levels of CA protein in accordance with the present invention makes possible the identification of subjects (patients) that are likely to benefit from adjuvant therapy. For example, a biological sample from a post primary therapy subject (e.g., subject having undergone surgery) can be screened for the presence of circulating CA protein, the presence of elevated levels of the protein, determined by studies of normal populations, being indicative of residual tumor tissue. Similarly, tissue from the cut site of a surgically removed tumor can be examined (e.g., by immunofluorescence), the presence of elevated levels of product (relative to the surrounding tissue) being indicative of incomplete removal of the tumor. The ability to identify such subjects makes it possible to tailor therapy to the needs of the particular subject. Subjects undergoing non-surgical therapy, e.g., chemotherapy or radiation therapy, can also be monitored, the presence in samples from such subjects of elevated levels of CA protein being indicative of the need for continued treatment. Staging of the disease (for example, for purposes of optimizing treatment regimens) can also be effected, for example, by biopsy e.g., with antibody specific for a CA protein.

[0313] (f) Animal Models and Transgenics

[0314] In another preferred embodiment CA genes find use in generating animal models of cancers, particularly lymphomas and carcinomas. As is appreciated by one of ordinary skill in the art, when the CA gene identified is repressed or diminished in CA tissue, gene therapy technology wherein antisense RNA directed to the CA gene will also diminish or repress expression of the gene. An animal generated as such serves as an animal model of CA that finds use in screening bioactive drug candidates. Similarly, gene knockout technology, for example as a result of homologous recombination with an appropriate gene targeting vector, will result in the absence of the CA protein. When desired, tissue-specific expression or knockout of the CA protein may be necessary.

[0315] It is also possible that the CA protein is overexpressed in cancer. As such, transgenic animals can be generated that overexpress the CA protein. Depending on the desired expression level, promoters of various strengths can be employed to express the transgene. Also, the number of copies of the integrated transgene can be determined and compared for a determination of the expression level of the transgene. Animals generated by such methods find use as animal models of CA and are additionally useful in screening for bioactive molecules to treat cancer.

[0316] Characterization of CA sequences

[0317] The CA nucleic acid sequences of the invention are depicted in Tables 1-9. The sequences in each Table include genomic DNA sequence (mouse genomic sequences mDxx-yyy; human genomic sequences hDxx-yyy), sequence corresponding to the mRNA(s) generated therefrom (mRxx-yyy; hRxx-yyy) and amino acid sequences of the proteins (mPxx-yyy; hPxx-yyy) encoded by the mRNA for both mouse and human genes. N/A indicates a gene that has been identified, but for which there has not been a name ascribed.

[0318] The mouse and human genomic DNA sequence, sequence corresponding to the mRNA(s) generated therefrom and amino acid sequences of the proteins as shown in Tables 1-9 are described according to SEQ ID NOS as follows in Table 10.

TABLE 10

| | | |
|---|---|---|
| DESIGNATION | SEQ ID NO: | TYPE OF SEQUENCE |

| | | |
|---|---|---|
| mD14-005 | SEQ ID NO: 1 | mouse genomic sequence |
| mR14-005 | SEQ ID NO: 2 | mouse mRNA sequence |
| mP14-005 | SEQ ID NO: 3 | mouse protein sequence |
| hD14-005 | SEQ ID NO: 4 | human genomic sequence |
| hR14-005.1 | SEQ ID NO: 5 | human mRNA sequence |
| hP14-005.1 | SEQ ID NO: 6 | human protein sequence |
| hR14-005.2 | SEQ ID NO: 7 | human mRNA sequence |
| hP14-005.2 | SEQ ID NO: 8 | human protein sequence |
| hR14-005.3 | SEQ ID NO: 9 | human mRNA sequence |
| hP14-005.3 | SEQ ID NO: 10 | human protein sequence |
| mD14-025 | SEQ ID NO: 11 | mouse genomic sequence |
| mR14-025 | SEQ ID NO: 12 | mouse mRNA sequence |
| mP14-025 | SEQ ID NO: 13 | mouse protein sequence |
| hD14-025 | SEQ ID NO: 14 | human genomic sequence |
| hR14-025.1 | SEQ ID NO: 15 | human mRNA sequence |
| hP14-025.1 | SEQ ID NO: 16 | human protein sequence |
| hR14-025.2 | SEQ ID NO: 17 | human mRNA sequence |
| hP14-025.2 | SEQ ID NO: 18 | human protein sequence |
| hR14-025.3 | SEQ ID NO: 19 | human mRNA sequence |
| hP14-025.3 | SEQ ID NO: 20 | human protein sequence |
| hR14-025.4 | SEQ ID NO: 21 | human mRNA sequence |
| hP14-025.4 | SEQ ID NO: 22 | human protein sequence |
| hR14-025.5 | SEQ ID NO: 23 | human mRNA sequence |
| hP14-025.5 | SEQ ID NO: 24 | human protein sequence |
| hR14-025.6 | SEQ ID NO: 25 | human mRNA sequence |
| hP14-025.6 | SEQ ID NO: 26 | human protein sequence |
| hR14-025.7 | SEQ ID NO: 27 | human mRNA sequence |
| hP14-025.7 | SEQ ID NO: 28 | human protein sequence |
| hR14-025.8 | SEQ ID NO: 29 | human mRNA sequence |
| hP14-025.8 | SEQ ID NO: 30 | human protein sequence |
| hR14-025.9 | SEQ ID NO: 31 | human mRNA sequence |
| hP14-025.9 | SEQ ID NO: 32 | human protein sequence |
| mD14-035 | SEQ ID NO: 33 | mouse genomic sequence |
| mR14-035 | SEQ ID NO: 34 | mouse mRNA sequence |
| mP14-035 | SEQ ID NO: 35 | mouse protein sequence |
| hD14-035 | SEQ ID NO: 36 | human genomic sequence |
| hR14-035.1 | SEQ ID NO: 37 | human mRNA sequence |
| hP14-035.1 | SEQ ID NO: 38 | human protein sequence |
| hR14-035.2 | SEQ ID NO: 39 | human mRNA sequence |
| hP14-035.2 | SEQ ID NO: 40 | human protein sequence |
| hR14-035.3 | SEQ ID NO: 41 | human mRNA sequence |
| hP14-035.3 | SEQ ID NO: 42 | human protein sequence |
| hR14-035.4 | SEQ ID NO: 43 | human mRNA sequence |
| hP14-035.4 | SEQ ID NO: 44 | human protein sequence |
| mD14-043 | SEQ ID NO: 45 | mouse genomic sequence |
| mR14-043 | SEQ ID NO: 46 | mouse mRNA sequence |
| mP14-043 | SEQ ID NO: 47 | mouse protein sequence |
| hD14-043 | SEQ ID NO: 48 | human genomic sequence |
| hR14-043.1 | SEQ ID NO: 49 | human mRNA sequence |
| hP14-043.1 | SEQ ID NO: 50 | human protein sequence |
| hR14-043.2 | SEQ ID NO: 51 | human mRNA sequence |
| hP14-043.2 | SEQ ID NO: 52 | human protein sequence |
| hR14-043.3 | SEQ ID NO: 53 | human mRNA sequence |
| hP14-043.3 | SEQ ID NO: 54 | human protein sequence |
| mD14-044 | SEQ ID NO: 55 | mouse genomic sequence |
| mR14-044 | SEQ ID NO: 56 | mouse mRNA sequence |
| mP14-044 | SEQ ID NO: 57 | mouse protein sequence |
| hD14-044 | SEQ ID NO: 58 | human genomic sequence |
| hR14-044.1 | SEQ ID NO: 59 | human mRNA sequence |
| hP14-044.1 | SEQ ID NO: 60 | human protein sequence |
| hR14-044.2 | SEQ ID NO: 61 | human mRNA sequence |
| hP14-044.2 | SEQ ID NO: 62 | human protein sequence |
| hR14-044.3 | SEQ ID NO: 63 | human mRNA sequence |
| hP14-044.3 | SEQ ID NO: 64 | human protein sequence |
| mD15-001 | SEQ ID NO: 65 | mouse genomic sequence |
| mR15-001 | SEQ ID NO: 66 | mouse mRNA sequence |
| mP15-001 | SEQ ID NO: 67 | mouse protein sequence |
| hD15-001 | SEQ ID NO: 68 | human genomic sequence |
| hR15-001.1 | SEQ ID NO: 69 | human mRNA sequence |
| hP15-001.1 | SEQ ID NO: 70 | human protein sequence |
| hR15-001.2 | SEQ ID NO: 71 | human mRNA sequence |
| hP15-001.2 | SEQ ID NO: 72 | human protein sequence |
| hR15-001.3 | SEQ ID NO: 73 | human mRNA sequence |
| hP15-001.3 | SEQ ID NO: 74 | human protein sequence |
| hR15-001.4 | SEQ ID NO: 75 | human mRNA sequence |
| hP15-001.4 | SEQ ID NO: 76 | human protein sequence |
| hR15-001.5 | SEQ ID NO: 77 | human mRNA sequence |
| hP15-001.5 | SEQ ID NO: 78 | human protein sequence |
| hR15-001.6 | SEQ ID NO: 79 | human mRNA sequence |
| hP15-001.6 | SEQ ID NO: 80 | human protein sequence |
| mD15-016 | SEQ ID NO: 81 | mouse genomic sequence |
| mR15-016 | SEQ ID NO: 82 | mouse mRNA sequence |
| mP15-016 | SEQ ID NO: 83 | mouse protein sequence |
| hD15-016 | SEQ ID NO: 84 | human genomic sequence |
| hR15-016.1 | SEQ ID NO: 85 | human mRNA sequence |
| hP15-016.1 | SEQ ID NO: 86 | human protein sequence |
| hR15-016.2 | SEQ ID NO: 87 | human mRNA sequence |
| hP15-016.2 | SEQ ID NO: 88 | human protein sequence |
| hR15-016.3 | SEQ ID NO: 89 | human mRNA sequence |
| hP15-016.3 | SEQ ID NO: 90 | human protein sequence |
| hR15-016.4 | SEQ ID NO: 91 | human mRNA sequence |
| hP15-016.4 | SEQ ID NO: 92 | human protein sequence |
| mD15-017 | SEQ ID NO: 93 | mouse genomic sequence |
| mR15-017 | SEQ ID NO: 94 | mouse mRNA sequence |
| mP15-017 | SEQ ID NO: 95 | mouse protein sequence |
| hD15-017 | SEQ ID NO: 96 | human genomic sequence |
| hR15-017.1 | SEQ ID NO: 97 | human mRNA sequence |
| hP15-017.1 | SEQ ID NO: 98 | human protein sequence |
| hR15-017.2 | SEQ ID NO: 99 | human mRNA sequence |
| hP15-017.2 | SEQ ID NO: 100 | human protein sequence |
| hR15-017.3 | SEQ ID NO: 101 | human mRNA sequence |
| hP15-017.3 | SEQ ID NO: 102 | human protein sequence |
| hR15-017.4 | SEQ ID NO: 103 | human mRNA sequence |
| hP15-017.4 | SEQ ID NO: 104 | human protein sequence |
| mD15-022 | SEQ ID NO: 105 | mouse genomic sequence |
| mR15-022 | SEQ ID NO: 106 | mouse mRNA sequence |
| mP15-022 | SEQ ID NO: 107 | mouse protein sequence |
| hD15-022 | SEQ ID NO: 108 | human genomic sequence |
| hR15-022.1 | SEQ ID NO: 109 | human mRNA sequence |
| hP15-022.1 | SEQ ID NO: 110 | human protein sequence |
| hR15-022.2 | SEQ ID NO: 111 | human mRNA sequence |
| hP15-022.2 | SEQ ID NO: 112 | human protein sequence |
| hR15-022.3 | SEQ ID NO: 113 | human mRNA sequence |
| hP15-022.3 | SEQ ID NO: 114 | human protein sequence |

[0319] The CA sequences were analyzed by Panther™ (Molecular Diagnostics, Palo Alto, Calif.) software designed to detect homologs and enable prediction of molecular function through a system for protein functional classification. Human Gene Ontlogy annotations were prepared in accordance with the Gene Ontology Consortium (Gene Ontology: tool for the unification of biology. The Gene Ontology Consortium Nature Genet. 25: 25-29 (2000)). Similar analysis was carried out by determining IPR information regarding the CA polypeptides from InterPro, which is an integrated documentation resource for protein families, domains and functional sites (Apweiler at al. Bioinformatics 16(12):1145-1150 (2000)).

[0320] The CA sequences may be classified according to the following predicted general classifications of function by Panther™ analysis, human gene ontology and IPR domain information for polypeptides having SEQ ID NOS: 6, 8, 10, 16, 18, 20, 22, 24, 26, 28, 30, 32, 38, 40, 42, 44, 50, 52, 54, 60, 62, 64, 70, 72, 74, 76, 78, 80, 86, 88, 90, 92, 98, 100, 102, 104, 110, 112 and 114 as shown in Tables 1-9.

TABLE 11

| HUMAN | |
|---|---|
| PROTEIN | CLASSIFICATION |
| hP14-005.1 | HUMAN PANTHER CLASSIFICATIONS |

| | |
|---|---|
| (SEQ ID NO: 6) | FAMILY (SUBFAMILY) |

ATP-BINDING CASSETTE TRANSPORTER (gi:

12733451)

MOLECULAR FUNCTIONS

Molecular function unclassified

BIOLOGICAL PROCESS

Biological process unclassified

HUMAN GENE ONTOLOGY

PROCESS

cell growth and maintenance > transport
cell growth and maintenance > transport
protein glycosylation > O-linked glycosylation
phenylalanine metabolism
aromatic amino-acid family amino-acid catabolism >

phenylalanine catabolism

cell motility > muscle contraction

FUNCTION

nucleotide binding > ATP binding
P—P-bond-hydrolysis-driven transporter > ATP-

binding cassette (ABC) transporter

adenosinetriphosphatase
protein binding > lipoprotein binding
enzyme > adenosinetriphosphatase
serine-type endopeptidase > subtilase

LOCATION

cell > membrane fraction
plasma membrane > integral plasma membrane

protein

gap junction > connexon
fibrillar collagen > collagen type I
cytoplasm > lysosome

HUMAN PROTEIN DOMAINS (INTERPRO SIGNATURES)

IPR003593 (AAA)
IPR001140 (ABC membrane)
IPR003439 (ABC tran)
IPR003439 (DA BOX 2)
IPR001687 (ATP GTP A2 2)
IPR003439 (sp O62673 O62673 MACMU)

| | |
|---|---|
| hP14-005.2 | HUMAN PANTHER CLASSIFICATIONS |

| | |
|---|---|
| (SEQ ID NO: 8) | FAMILY (SUBFAMILY) |

ATP-BINDING CASSETTE TRANSPORTER (gi:

12733451)

MOLECULAR FUNCTIONS

Molecular function unclassified

BIOLOGICAL PROCESS

Biological process unclassified

HUMAN GENE ONTOLOGY

PROCESS

cell growth and maintenance > transport
cell growth and maintenance > transport
protein glycosylation > O-linked glycosylation
phenylalanine metabolism
aromatic amino-acid family amino-acid catabolism >

phenylalanine catabolism

cell motility > muscle contraction

FUNCTION

nucleotide binding > ATP binding
P—P-bond-hydrolysis-driven transporter > ATP-

binding cassette (ABC) transporter

adenosinetriphosphatase
protein binding > lipoprotein binding
enzyme > adenosinetriphosphatase
nucleic acid binding > DNA binding

LOCATION

cell > membrane fraction
plasma membrane > integral plasma membrane

protein

gap junction > connexon
fibrillar collagen > collagen type I
cytoplasm > lysosome

HUMAN PROTEIN DOMAINS (INTERPRO SIGNATURES)

IPR003593 (AAA)
IPR001140 (ABC membrane)
IPR003439 (ABC tran)
IPR003439 (DA BOX)
IPR001687 (AlP GTP A2)
IPR003439 (sp O62673 O62673 MACMU)

| | |
|---|---|
| hP14-005.3 | HUMAN PANTHER CLASSIFICATIONS |

| | |
|---|---|
| (SEQ ID NO: 10) | FAMILY (SUBFAMILY) |

ATP-BINDING CASSETTE TRANSPORTER(gi:

12733451)

MOLECULAR FUNCTIONS

Molecular function unclassified

BIOLOGICAL PROCESS

Biological process unclassified

HUMAN GENE ONTOLOGY

PROCESS

cell growth and maintenance > transport
cell growth and maintenance > transport
protein glycosylation > O-linked glycosylation
phenylalanine metabolism
aromatic amino-acid family amino-acid catabolism >

phenylalanine catabolism

cell motility > muscle contraction

FUNCTION

nucleotide binding > ATP binding
P—P-bond-hydrolysis-driven transporter > ATP-

binding cassette (ABC) transporter

adenosinetriphosphatase
protein binding > lipoprotein binding
enzyme > adenosinetriphosphatase
serine-type endopeptidase > subtilase

LOCATION

cell > membrane fraction
plasma membrane > integral plasma membrane

protein

gap junction > connexon
fibrillar collagen > collagen type I
cytoplasm > lysosome

HUMAN PROTEIN DOMAINS (INTERPRO SIGNATURES)

IPR003593 (AAA)
IPR001140 (ABC membrane)
IPR003439 (ABC tran)
IPR003439 (DA BOX 2)
IP001687 (ATP GTP A2 2)
IPR003439 (sp O62673 O62673 MACMU)

| | |
|---|---|
| hP14-025.1 | HUMAN PANTHER CLASSIFICATIONS |

| | |
|---|---|
| (SEQ ID NO: 16) | FAMILY (SUBFAMILY) |

NUCLEOPLASMIN (NUCLEOPHOSMIN)

MOLECULAR FUNCTIONS

Molecular function unclassified

BIOLOGICAL PROCESS

Nucleoside, nucleotide and nucleic acid metabolism >

rRNA metabolism
HUMAN GENE ONTOLOGY
No Gene Ontology
HUMAN PROTEIN DOMAINS (INTERPRO SIGNATURES)

IPR004301 (Nucleoplasmin)
NULL (ASP RICH)

| | |
|---|---|
| hP14-025.2 | HUMAN PANTHER CLASSIFICATIONS |

| | |
|---|---|
| (SEQ ID NO: 18) | FAMILY (SUBFAMILY) |

NUCLEOPLASMIN (NUCLEOPHOSMIN)

MOLECULAR FUNCTIONS

Molecular function unclassified

BIOLOGICAL PROCESS

Nucleoside, nucleotide and nucleic acid metabolism >

rRNA metabolism
HUMAN GENE ONTOLOGY

PROCESS

cell communication > signal transduction
humoral defense mechanism > antimicrobial response
defence response > cellular defense response
intracellular protein traffic > endocytosis

FUNCTION

sugar binding > lectin
nucleic acid binding > RNA binding
molecular_function unknown > lymphocyte antigen
DNA binding > transcription factor
lectin > mannose binding lectin
mannose binding

LOCATION

plasma membrane > integral plasma membrane

protein

cell > membrane fraction
nucleus > nucleolus
cell > plasma membrane
cell > nucleus

HUMAN PROTEIN DOMAINS (INTERPRO SIGNATURES)

IPR004301 (Nucleoplasmin)
NULL (ASP RICH)

| | |
|---|---|
| hP14-025.3 | HUMAN PANTHER CLASSIFICATIONS |

| | |
|---|---|
| (SEQ ID NO: 20) | FAMILY (SUBFAMILY) |

NKG2 TYPE II INTEGRAL MEMBRANE

PROTEIN (C-TYPE LECTIN-RELATED)

MOLECULAR FUNCTIONS

Molecular function unclassified

BIOLOGICAL PROCESS

Nucleoside, nucleotide and nucleic acid metabolism >

rRNA metabolism
HUMAN GENE ONTOLOGY

FUNCTION

sugar binding > lectin
molecular_function unknown > lymphocyte antigen
nucleic acid binding > RNA binding
DNA binding > transcription factor
lectin > mannose binding lectin
mannose binding

LOCATION

plasma membrane > integral plasma membrane

protein

cell > membrane fraction
cell > plasma membrane
nucleus > nucleolus
cell > nucleus

HUMAN PROTEIN DOMAINS (INTERPRO SIGNATURES)

IPR001304 (CLECT)
IPR001304 (lectin c)
IPR001304 (C TYPE LECTIN 2)

| | |
|---|---|
| hP14-025.4 | HUMAN PANTHER CLASSIFICATIONS |

| | |
|---|---|
| (SEQ ID NO: 22) | FAMILY (SUBFAMILY) |

NUCLEOPLASMIN (NUCLEOPHOSMIN)

MOLECULAR FUNCTIONS

Molecular function unclassified

BIOLOGICAL PROCESS

Nucleoside, nucleotide and nucleic acid metabolism >

rRNA metabolism
HUMAN GENE ONTOLOGY

PROCESS

cell communication > signal transduction
transcription, DNA-dependent > transcription

regulation

protein modification > protein dephosphorylation
DNA metabolism > DNA repair
humoral defense mechanism > antimicrobial response

FUNCTION

nucleic acid binding > RNA binding
DNA binding > transcription factor
protein kinase > protein tyrosine kinase
nuclease > endonuclease
sugar binding > lectin

LOCATION

nucleus > nucleolus
cell > membrane fraction
plasma membrane > integral plasma membrane

protein

cell > nucleus
GO cellular component > extracellular

HUMAN PROTEIN DOMAINS (INTERPRO SIGNATURES)

IPR004301 (Nucleoplasmin)
NULL (ASP RICH)

| | |
|---|---|
| hP14-025.5 | HUMAN PANTHER CLASSIFICATIONS |

| | |
|---|---|
| (SEQ ID NO: 24) | FAMILY (SUBFAMILY) |

NKG2 TYPE II INTEGRAL MEMBRANE

PROTEIN (C-TYPE LECTIN-RELATED)

MOLECULAR FUNCTIONS

Molecular function unclassified

BIOLOGICAL PROCESS

Nucleoside, nucleotide and nucleic acid metabolism >

rRNA metabolism
HUMAN GENE ONTOLOGY

FUNCTION

sugar binding > lectin
molecular_function unknown > lymphocyte antigen
protein binding > lipoprotein binding

LOCATION

plasma membrane > integral plasma membrane

protein

cell > plasma membrane
cell > membrane fraction

HUMAN PROTEN DOMAINS (INTERPRO SIGNATURES)

No Domain Hit

| | |
|---|---|
| hP14-025.6 | HUMAN PANTHER CLASSIFICATIONS |

| | |
|---|---|
| (SEQ ID NO: 26) | FAMLY (SUBFAMILY) |

NUCLEOPLASMIN (NUCLEOPHOSMIN)

MOLECULAR FUNCTIONS

Molecular function unclassified

BIOLOGICAL PROCESS

Nucleoside, nucleotide and nucleic acid metabolism >

rRNA metabolism
HUMAN GENE ONTOLOGY

PROCESS

cell communication > signal transduction
humoral defense mechanism > antimicrobial response
defence response > cellular defense response
intracellular protein traffic > endocytosis

FUNCTION

sugar binding > lectin
nucleic acid binding > RNA binding
molecular_function unknown > lymphocyte antigen
DNA binding > transcription factor
lectin > mannose binding lectin
mannose binding

LOCATION

plasma membrane > integral plasma membrane

protein

nucleus > nucleolus
cell > membrane fraction
cell > plasma membrane
cell > nucleus

HUMAN PROTEIN DOMAINS (INTERPRO SIGNATURES)

IPR004301 (Nucleoplasmin)
NULL (ASP RICH)

| | |
|---|---|
| hP14-025.7 | HUMAN PANTHER CLASSIFICATIONS |

| | |
|---|---|
| (SEQ ID NO: 28) | FAMILY (SUBFAMILY) |

NKG2 TYPE II INTEGRAL MEMBRANE

PROTEIN (C-TYPE LECTIN-RELATED)

MOLECULAR FUNCTIONS

Molecular function unclassified

BIOLOGICAL PROCESS

Nucleoside, nucleotide and nucleic acid metabolism >

rRNA metabolism
HUMAN GENE ONTOLOGY

FUNCTION

sugar binding > lectin
nucleic acid binding > RNA binding
molecular_function unknown > lymphocyte antigen
DNA binding > transcription factor
lectin > mannose binding lectin
mannose binding

LOCATION

plasma membrane > integral plasma membrane

protein

cell > membrane fraction
nucleus > nucleolus
cell > plasma membrane
cell > nucleus

HUMAN PROTEIN DOMAINS (INTERPRO SIGNATURES)

IPR001304 (CLECT)
IPR001304 (lectin c)
IPR01304 (C TYPE LECTIN 2)

| | |
|---|---|
| hP14-025.8 | HUMAN PANTHER CLASSIFICATIONS |

| | |
|---|---|
| (SEQ ID NO: 30) | FAMILY (SUBFAMILY) |

NUCLEOPLASMIN (NUCLEOPHOSMIN)

MOLECULAR FUNCTIONS

Molecular function unclassified

BIOLOGICAL PROCESS

Nucleoside, nucleotide and nucleic acid metabolism >

rRNA metabolism
HUMAN GENE ONTOLOGY

PROCESS

cell communication > signal transduction
humoral defense mechanism > antimicrobial response
defence response > cellular defense response
intracellular protein traffic > endocytosis

FUNCTION

sugar binding > lectin
nucleic acid binding > RNA binding
molecular_function unknown > lymphocyte antigen
DNA binding > transcription factor
lectin > mannose binding lectin
mannose binding

LOCATION

plasma membrane > integral plasma membrane

protein

cell > membrane fraction
nucleus > nucleolus
cell > plasma membrane
cell > nucleus

HUMAN PROTEIN DOMAINS (INTERPRO SIGNATURES)

IPR004301 (Nucleoplasmin)
NULL (ASP RICH)

| | |
|---|---|
| hP14-025.9 | HUMAN PANTHER CLASSIFICATIONS |

| | |
|---|---|
| (SEQ ID NO: 32) | FAMILY (SUBFAMILY) |

NUCLEOPLASMIN(NUCLEOPHOSMIN)

MOLECULAR FUNCTIONS

Molecular function unclassified

BIOLOGICAL PROCESS

Nucleoside, nucleotide and nucleic acid metabolism >

rRNA metabolism
hUMAN GENE ONTOLOGY

PROCESS

cell communication > signal transduction
humoral defense mechanism > antimicrobial response
defence response > cellular defense response
intracellular protein traffic > endocytosis

FUNCTION

sugar binding > lectin
nucleic acid binding > RNA binding
molecular_function unknown > lymphocyte antigen
DNA binding > transcription factor
lectin > mannose binding lectin
mannose binding

LOCATION

plasma membrane > integral plasma membrane

protein

cell > membrane fraction
nucleus > nucleolus
cell > plasma membrane
cell > nucleus

HUMAN PROTEIN DOMAINS (INTERPRO SIGNATURES)

IPR004301 (Nucleoplasmin)
NULL (ASP RICH)

| | |
|---|---|
| hP14-035.1 | HUMAN PANTHER CLASSIFICATIONS |

| | |
|---|---|
| (SEQ ID NO: 38) | FAMILY (SUBFAMILY) |

NOT ANNOTATED (NOT ANNOTATED)

MOLECULAR FUNCTIONS

Molecular function unclassified

BIOLOGICAL PROCESS

Biological process unclassified

HUMAN GENE ONTOLOGY
No Gene Ontology
HUMAN PROTEIN DOMAINS (INTERPRO SIGNATURES)

IPR001611 (LEURICHRPT)
IPR000483 (LRRCT)
IPR003598 (IGc2)
IPR003599 (IG)
IPR003591 (LRR TYP)
IPR001611 (LRR)
IPR003006 (ig)
IPR000483 (LRRCT)

| | |
|---|---|
| hP14-035.2 | HUMAN PANTHER CLASSIFICATIONS |

| | |
|---|---|
| (SEQ ID NO: 40) | FAMILY (SUBFAMILY) |

NOT ANNOTATED (NOT ANNOTATED)

MOLECULAR FUNCTIONS

Molecular function unclassified

BIOLOGICAL PROCESS

Biological process unclassified

HUMAN GENE ONTOLOGY

PROCESS

cell communication > cell adhesion
cell communication > signal transduction
axon guidance > motor axon guidance
defence response > immune response
skeletal development > cartilage condensation

FUNCTION

GO molecular function > cell adhesion
ligand binding or carrier > protein binding
glycosaminoglycan binding > hyaluronic acid binding
protein binding > insulin-like growth factor binding
nucleotide binding > ATP binding

LOCATION

cell > plasma membrane
extracellular > extracellular space
cell > membrane fraction
plasma membrane > integral plasma membrane

protein

extracellular > extracellular matrix

HUMAN PROTEIN DOMAINS (INTERPRO SIGNATURES)

IPR001611 (LEURICHRPT)
IPR000483 (LRRCT)
IPR003598 (IGc2)
IPR003599 (IG)
IPR003591 (LRR TYP)
IPR003961 (fn3)
IPR001611 (LRR)
IPR00006 (ig)
IPR000483 (LRRCT)

| | |
|---|---|
| hP14-035.3 | HUMAN PANTHER CLASSIFICATIONS |

| | |
|---|---|
| (SEQ ID NO: 42) | FAMILY (SUBFAMILY) |

NOT ANNOTATED (NOT ANNOTATED)

MOLECULAR FUNCTIONS

Molecular function unclassified

BIOLOGICAL PROCESS

Biological process unclassified

HUMAN GENE ONTOLOGY

PROCESS

cell communication > cell adhesion
cell communication > signal transduction
axon guidance > motor axon guidance
defence response > immune response
skeletal development > cartilage condensation

FUNCTION

GO molecular function > cell adhesion
ligand binding or carrier > protein binding
glycosaminoglycan binding > hyaluronic acid binding
protein binding > insulin-like growth factor binding
nucleotide binding > ATP binding

LOCATION

cell > plasma membrane
extracellular > extracellular space
cell > membrane fraction
plasma membrane > integral plasma membrane

protein

extracellular > extracellular matrix

HUMAN PROTEIN DOMAINS (INTERPRO SIGNATURES)

IPR001611 (LEURICHRPT)
IPR000483 (LRRCT)
IPR003598 (IGc2)
IPR003599 (IG)
IPR003591 (LRR TYP)
IPR003961 (fn3)
IPR001611 (LRR)
IPR003006 (ig)
IPR000483 (LRRCT)

| | |
|---|---|
| hP14-035.4 | HUMAN PANTHER CLASSIFICATIONS |

| | |
|---|---|
| (SEQ ID NO: 44) | FAMILY (SUBFAMILY) |

NOT ANNOTATED(NOT ANNOTATED)

MOLECULAR FUNCTIONS

Molecular function unclassified

BIOLOGICAL PROCESS

Biological process unclassified

HUMAN GENE ONTOLOGY
No Gene Ontology
HUMAN PROTEIN DOMAINS (INTERPRO SIGNATURES)

IPR001611 (LEURICHRPT)
IPR000483 (LRRCT)
IPR003598 (IGc2)
IPR003599 (IG)
IPR003591 (LRR TYP)
IPR003961 (fn3)
IPR001611 (LRR)
IPR003006 (ig)
IPR000483 (LRRCT)

| | |
|---|---|
| hP14-043.1 | HUMAN PANTHER CLASSIFICATIONS |

| | |
|---|---|
| (SEQ ID NO: 50) | FAMILY (SUBFAMILY) |

PROTEIN TYROSINE KINASE

(INSULIN/INSULIN-LIKE GROWTH FACTOR RECEPTOR-
RELATED (PTK GROUP XVI))

MOLECULAR FUNCTIONS

Receptor > Protein kinase receptor
Kinase > Protein kinase > Tyrosine protein kinase

receptor

BIOLOGICAL PROCESS

Protein metabolism and modification > Protein

modification > Protein phosphorylation

Signal transduction > Cell surface receptor mediated

signal transduction > Receptor protein tyrosine kinase signaling
pathway
HUMAN GENE ONTOLOGY

PROCESS

protein modification > protein dephosphorylation
protein modification > protein phosphorylation
enzyme linked receptor protein signaling pathway >

transmembrane receptor protein tyrosine kinase signaling pathway

cell communication > signal transduction

FUNCTION

protein kinase > protein tyrosine kinase
nucleotide binding > ATP binding
enzyme > protein kinase
transmembrane receptor
protein tyrosine kinase > transmembrane receptor

protein tyrosine kinase

transmembrane receptor protein tyrosine kinase >

epidermal growth factor receptor

LOCATION

cell > membrane fraction
plasma membrane > integral plasma membrane

protein

cell > cytoplasm
GO cellular component > intracellular
cell > plasma membrane

HUMAN PROTEIN DOMAINS (INTERPRO SIGNATURES)

IPR001245 (TYRKINASE)
IPR000719 (PROTEIN KINASE DOM)
NULL (CYS RICH)
IPR000719 (sp P08069 IG1R HUMAN)
IPR001245 (TyrKc)
IPR002290 (S TKc)
IPR002174 (FU)
IPR003961 (FN3)
IPR003961 (fn3)
IPR000494 (Recep L domain)
IPR000719 (pkinase)
IPR002174 (Furin-like)

| | |
|---|---|
| hP14-043.2 | HUMAN PANTHER CLASSIFICATIONS |

| | |
|---|---|
| (SEQ ID NO: 52) | FAMILY (SUBFAMILY) |

PROTEIN TYROSINE

KINASE(INSULIN/INSULIN-LIKE GROWTH FACTOR
RECEPTOR-RELATED (PTK GROUP XVI))

MOLECULAR FUNCTIONS

Receptor > Protein kinase receptor
Kinase > Protein kinase > Tyrosine protein kinase

receptor

BIOLOGICAL PROCESS

Protein metabolism and modification > Protein

modification > Protein phosphorylation

Signal transduction > Cell surface receptor mediated

signal transduction > Receptor protein tyrosine kinase signaling
pathway
HUMAN GENE ONTOLOGY
No Gene Ontology
HUMAN PROTEIN DOMAINS (INTERPRO SIGNATURES)

No Domain Hit

| | |
|---|---|
| hP14-043.3 | HUMAN PANTHER CLASSIFICATIONS |

| | |
|---|---|
| (SEQ ID NO: 54) | No Panther Hit |

HUMAN GENE ONTOLOGY

PROCESS

protein modification > protein dephosphorylation
protein modification > protein phosphorylation
enzyme linked receptor protein signaling pathway>

transmembrane receptor protein tyrosine kinase signaling pathway

cell communication > signal transduction

FUNCTION

protein kinase > protein tyrosine kinase
nucleotide binding > ATP binding
enzyme > protein kinase
transmembrane receptor
protein tyrosine kinase > transmembrane receptor

protein tyrosine kinase

transmembrane receptor protein tyrosine kinase >

epidermal growth factor receptor

LOCATION

cell > membrane fraction
plasma membrane > integral plasma membrane

protein

cell > cytoplasm
GO cellular component > intracellular
cell > plasma membrane

HUMAN PROTEIN DOMAINS (INTERPRO SIGNATURES)

IPR001245 (TYRKINASE)
IPR000719 (PROTEIN KINASE DOM)
NULL (CYS RICH)
IPR000719 (sp P08069 IG1R HUMAN)
IPR001245 (TyrKc)
IPR002290 (S TKc)
IPR002174 (FU)
IPR003961 (FN3)
IPR003961 (fn3)
IPR000494 (Recep L domain)
IPR000719 (pkinase)
IPR002174 (Furin-like)

| | |
|---|---|
| hP14-044.1 | HUMAN PANTHER CLASSIFICATIONS |

| | |
|---|---|
| (SEQ ID NO: 60) | FAMILY (SUBFAMILY) |

SODIUM-INDEPENDENT ORGANIC ANION

TRANSPORTER-RELATED (SODIUM-INDEPENDENT
ORGANIC ANION TRANSPORTER SLC21A11)

MOLECULAR FUNCTIONS

Transporter > Other transporter

BIOLOGICAL PROCESS

Transport > Ion transport > Anion transport

HUMAN GENE ONTOLOGY

PROCESS

anion transport > organic anion transport
transport > lipid transport

FUNCTION

proteinase inhibitor > serine protease inhibitor

LOCATION

cell > membrane fraction
plasma membrane > integral plasma membrane

protein
HUMAN PROTEIN DOMAINS (INTERPRO SIGNATURES)

IPR004157 (OATP C)
IPR004156 (OATP N)
IPR004156 (oat)

| | |
|---|---|
| hP14-044.2 | HUMAN PANTHER CLASSIFICATIONS |

| | |
|---|---|
| (SEQ ID NO: 62) | FAMILY (SUBFAMILY) |

SODIUM-INDEPENDENT ORGANIC ANION

TRANSPORTER-RELATED (SODIUM-INDEPENDENT
ORGANIC ANION TRANSPORTER SLC21A11)

MOLECULAR FUNCTIONS

Transporter > Other transporter

BIOLOGICAL PROCESS

Transport > Ion transport > Anion transport

HUMAN GENE ONTOLOGY

PROCESS

anion transport > organic anion transport
transport > lipid transport

FUNCTION

proteinase inhibitor > serine protease inhibitor

LOCATION

cell > membrane fraction
plasma membrane > integral plasma membrane

protein
HUMAN PROTEIN DOMAINS (INTERPRO SIGNATURES)

IPR004157 (OATP C)
IPR004156 (OATP N)
IPR004156 (oat)

| | |
|---|---|
| hP14-044.3 | HUMAN PANTHER CLASSIFICATIONS |

| | |
|---|---|
| (SEQ ID NO: 64) | FAMILY (SUBFAMILY) |

SODIUM-INDEPENDENT ORGANIC ANION

TRANSPORTER-RELATED(SODIUM-INDEPENDENT ORGANIC
ANION TRANSPORTER SLC21A11)

MOLECULAR FUNCTIONS

Transporter > Other transporter

BIOLOGICAL PROCESS

Transport > Ion transport > Anion transport

HUMAN GENE ONTOLOGY
No Gene Ontology
HUMAN PROTEIN DOMAINS (INTERPRO SIGNATURES)

IPR004157 (OATP C)
IPR004156 (OATP N)
IPR004156 (oat)

| | |
|---|---|
| hP15-001.1 | HUMAN PANTHER CLASSIFICATIONS |

| | |
|---|---|
| (SEQ ID NO: 70) | FAMILY (SUBFAMILY) |

BDNF/NT-3 GROWTH FACTORS RECEPTOR-

RELATED (NT-3 GROWTH FACTOR RECEPTOR)

MOLECULAR FUNCTIONS

Receptor > Protein kinase receptor
Kinase > Protein kinase > Tyrosine protein kinase

receptor

BIOLOGICAL PROCESS

Signal transduction > Cell surface receptor mediated

signal transduction > Receptor protein tyrosine kinase signaling
pathway
HUMAN GENE ONTOLOGY

PROCESS

protein modification > protein dephosphorylation
enzyme linked receptor protein signaling pathway >

transmembrane receptor protein tyrosine kinase signaling pathway

protein modification > protein phosphorylation
ectoderm development > neurogenesis
cell communication > cell adhesion

FUNCTION

protein kinase > protein tyrosine kinase
B cell receptor
defense/immunity protein > immunoglobulin
nucleotide binding > ATP binding
enzyme > protein kinase
transmembrane receptor
protein tyrosine kinase > transmembrane receptor

protein tyrosine kinase

LOCATION

cell > membrane fraction
plasma membrane > integral plasma membrane

protein

cell > plasma membrane
plasma membrane > peripheral plasma membrane

protein

extracellular > extracellular space

HUMAN PROTEIN DOMAINS (INTERPRO SIGNATURES)

No Domain Hit

| | |
|---|---|
| hP15-001.2 | HUMAN PANTHER CLASSIFICATIONS |

| | |
|---|---|
| (SEQ ID NO: 72) | FAMILY (SUBFAMILY) |

BDNF/NT-3 GROWTH FACTORS RECEPTOR-

RELATED (NT-3 GROWTH FACTOR RECEPTOR)

MOLECULAR FUNCTIONS

Receptor > Protein kinase receptor
Kinase > Protein kinase > Tyrosine protein kinase

receptor

BIOLOGICAL PROCESS

Signal transduction > Cell surface receptor mediated

signal transduction > Receptor protein tyrosine kinase signaling
pathway
HUMAN GENE ONTOLOGY

PROCESS

protein modification > protein dephosphorylation
protein modification > protein phosphorylation
enzyme linked receptor protein signaling pathway >

transmembrane receptor protein tyrosine kinase signaling pathway

ectoderm development > neurogenesis
protein kinase cascade > MAPKKK cascade

FUNCTION

protein kinase > protein tyrosine kinase
nucleotide binding > ATP binding
enzyme > protein kinase
B cell receptor
defense/immunity protein > immunoglobulin
transmembrane receptor
protein tyrosine kinase > transmembrane receptor

protein tyrosine kinase

LOCATION

cell > membrane fraction
plasma membrane > integral plasma membrane

protein

cell > plasma membrane
plasma membrane > peripheral plasma membrane

protein

cell > cytoplasm

HUMAN PROTEIN DOMAINS (INTERPRO SIGNATURES)

IPR001245 (TyrKc)
IPR000719 (sp Q03351 TRKC RAT)
IPR000483 (LRRCT)
IPR000372 (LRRNT)
IPR003599 (IG)
IPR001611 (LRR)
IPR000372 (LRRNT)
IPR003006 (ig)
IPR000483 (LRRCT)
IPR000719 (PROTEIN KINASE DOM)

| | |
|---|---|
| hP15-001.3 | HUMAN PANTHER CLASSIFICATIONS |

| | |
|---|---|
| (SEQ ID NO: 74) | FAMILY (SUBFAMILY) |

BDNF/NT-3 GROWTH FACTORS RECEPTOR-

RELATED (NT-3 GROWTH FACTOR RECEPTOR)

MOLECULAR FUNCTIONS

Receptor > Protein kinase receptor
Kinase > Protein kinase > Tyrosine protein kinase

receptor

BIOLOGICAL PROCESS

Signal transduction > Cell surface receptor mediated

signal transduction > Receptor protein tyrosine kinase signaling
pathway
HUMAN GENE ONTOLOGY

PROCESS

protein modification > protein dephosphorylation
protein modification > protein phosphorylation
enzyme linked receptor protein signaling pathway >

transmembrane receptor protein tyrosine kinase signaling pathway

protein kinase cascade > MAPKKK cascade
cell communication > signal transduction

FUNCTION

protein kinase > protein tyrosine kinase
nucleotide binding > ATP binding
enzyme > protein kinase
transmembrane receptor
protein tyrosine kinase > transmembrane receptor

protein tyrosine kinase

B cell receptor
defense/immunity protein > immunoglobulin

LOCATION

cell > membrane fraction
plasma membrane > integral plasma membrane

protein

cell > plasma membrane
cell > cytoplasm
cell > nucleus

HUMAN PROTEIN DOMAINS (INTERPRO SIGNATURES)

IPR001245 (TYRKINASE)
IPR003006 (ig)
IPR000483 (LRRCT)
IPR000719 (PROTEIN KINASE DOM)
IPR000719 (sp Q91044 TRKC CHICK)
IP001245 (TyrKc)
IPR002290 (S TKc)
IPR000483 (LRRCT)
IPR000372 (LRRNT)
IPR003599 (IG)
IPR001611 (LRR)
IPR000719 (pkinase)
IPR000372 (LRRNT)

| | |
|---|---|
| hP15-001.4 | HUMAN PANTHER CLASSIFICATIONS |

| | |
|---|---|
| (SEQ ID NO: 76) | FAMILY (SUBFAMILY) |

BDNF/NT-3 GROWTH FACTORS RECEPTOR-

RELATED (NT-3 GROWTH FACTOR RECEPTOR)

MOLECULAR FUNCTIONS

Receptor > Protein kinase receptor
Kinase > Protein kinase > Tyrosine protein kinase

receptor

BIOLOGICAL PROCESS

Signal transduction > Cell surface receptor mediated

signal transduction > Receptor protein tyrosine kinase signaling
pathway
HUMAN GENE ONTOLOGY

PROCESS

protein modification > protein dephosphorylation
enzyme linked receptor protein signaling pathway >

transmembrane receptor protein tyrosine kinase signaling pathway

protein modification > protein phosphorylation
ectoderm development > neurogenesis
cell communication > cell adhesion

FUNCTION

protein kinase > protein tyrosine kinase
B cell receptor
defense/immunity protein > immunoglobulin
nucleotide binding > ATP binding
enzyme > protein kinase
transmembrane receptor
protein tyrosine kinase > transmembrane receptor

protein tyrosine kinase

LOCATION

cell > membrane fraction
plasma membrane > integral plasma membrane

protein

cell > plasma membrane
plasma membrane > peripheral plasma membrane

protein

extracellular > extracellular space

HUMAN PROTEIN DOMAINS (INTERPRO SIGNATURES)

IPR000483 (LRRCT)
IPR000372 (LRRNT)
IPR003599 (IG)
IPR001611 (LRR)
IPR000372 (LRRNT)
IPR003006 (ig)
IPR000483 (LRRCT)

| | |
|---|---|
| hP15-001.5 | HUMAN PANTHER CLASSIFICATIONS |

| | |
|---|---|
| (SEQ ID NO: 78) | FAMILY (SUBFAMILY) |

BDNF/NT-3 GROWTH FACTORS RECEPTOR-

RELATED (NT-3 GROWTH FACTOR RECEPTOR)

MOLECULAR FUNCTIONS

Receptor > Protein kinase receptor
Kinase > Protein kinase > Tyrosine protein kinase

receptor

BIOLOGICAL PROCESS

Signal transduction > Cell surface receptor mediated

signal transduction > Receptor protein tyrosine kinase signaling
pathway
HUMAN GENE ONTOLOGY

PROCESS

protein modification > protein dephosphorylation
protein modification > protein phosphorylation
enzyme linked receptor protein signaling pathway >

transmembrane receptor protein tyrosine kinase signaling pathway

protein kinase cascade > MAPKKK cascade
cell communication > signal transduction

FUNCTION

protein kinase > protein tyrosine kinase
nucleotide binding > ATP binding
enzyme > protein kinase
transmembrane receptor
protein tyrosine kinase > transmembrane receptor

protein tyrosine kinase

B cell receptor
defense/immunity protein > immunoglobulin

LOCATION

cell > membrane fraction
plasma membrane > integral plasma membrane

protein

cell > cytoplasm
cell > plasma membrane
cell > nucleus

HUMAN PROTEIN DOMAINS (INTERPRO SIGNATURES)

IPR001245 (TYRKINASE)
IPR003006 (ig)
IPR000483 (LRRCT)
IPR000719 (PROTEIN KINASE DOM)
IPR000719 (sp O75682 O75682 HUMAN)
IPR001245 (TyrKc)
IPR002290 (S TKc)
IPR000483 (LRRCT)
IPR000372 (LRRNT)
IPR003599 (IG)
IPR001611 (LRR)
IPR000719 (pkinase)
IPR000372 (LRRNT)

| | |
|---|---|
| hP15-001.6 | HUMAN PANTHER CLASSIFICATIONS |

| | |
|---|---|
| (SEQ ID NO: 80) | FAMILY (SUBFAMILY) |

BDNF/NT-3 GROWTH FACTORS RECEPTOR-

RELATED(NT-3 GROWTH FACTOR RECEPTOR)

MOLECULAR FUNCTIONS

Receptor > Protein kinase receptor
Kinase > Protein kinase > Tyrosine protein kinase

receptor

BIOLOGICAL PROCESS

Signal transduction > Cell surface receptor mediated

signal transduction > Receptor protein tyrosine kinase signaling
pathway
HUMAN GENE ONTOLOGY

PROCESS

protein modification > protein dephosphorylation
protein modification > protein phosphorylation
enzyme linked receptor protein signaling pathway >

transmembrane receptor protein tyrosine kinase signaling pathway

protein kinase cascade > MAPKKK cascade
cell communication > signal transduction

FUNCTION

protein kinase > protein tyrosine kinase
nucleotide binding > ATP binding
enzyme > protein kinase
transmembrane receptor
protein tyrosine kinase > transmembrane receptor

protein tyrosine kinase

B cell receptor
defense/immunity protein > immunoglobulin

LOCATION

cell > membrane fraction
plasma membrane > integral plasma membrane

protein

cell > plasma membrane
cell > cytoplasm
cell > nucleus

HUMAN PROTEIN DOMAINS (INTERPRO SIGNATURES)

IPR001245 (TYRKINASE)
IPR003006 (ig)
IPR000483 (LRRCT)
IPR000719 (PROTEIN KINASE DOM)
IPR000719 (sp Q91044 TRKC CHICK)
IPR001245 (TyrKc)
IPR002290 (S TKc)
IPR000483 (LRRCT)
IPR000372 (LRRNT)
IPR003599 (IG)
IPR001611 (LRR)
IPR000719 (pkinase)
IPR000372 (LRRNT)

| | |
|---|---|
| hP15-016.1 | HUMAN PANTHER CLASSIFICATIONS |

| | |
|---|---|
| (SEQ ID NO: 86) | FAMILY (SUBFAMILY) |

MACROPHAGE SCAVENGER RECEPTOR-

RELATED (DMBT1)

MOLECULAR FUNCTIONS

Receptor > Other receptor

BIOLOGICAL PROCESS

Signal transduction > Cell communication > Ligand-

mediated signaling

Immunity and defense > Macrophage-mediated

immunity

Oncogenesis > Tumor suppressor

HUMAN GENE ONTOLOGY

PROCESS

humoral defense mechanism > antimicrobial response
protein metabolism and modification
macromolecule catabolism > proteolysis and

peptidolysis

defence response > immune response
cell communication > cell adhesion
peptidoglycan catabolism > axon guidance
axonogenesis

FUNCTION

serine-type endopeptidase > trypsin
molecular_function unknown > lymphocyte antigen
serine-type endopeptidase > trypsin
nucleic acid binding > DNA binding
endopeptidase
serine-type peptidase > serine-type endopeptidase

LOCATION

cell > membrane fraction
plasma membrane > integral plasma membrane

protein

extracellular > extracellular space
GO cellular component > extracellular
cell > plasma membrane

HUMAN PROTEIN DOMAINS (INTERPRO SIGNATURES)

IPR001190 (SPERACTRCPTR)
IPR001190 (SR)
IPR001190 (SRCR)
IPR001190 (SRCR 2 8)

| | |
|---|---|
| hP15-016.2 | HUMAN PANTHER CLASSIFICATIONS |

| | |
|---|---|
| (SEQ ID NO: 88) | FAMILY (SUBFAMILY) |

MACROPHAGE SCAVENGER RECEPTOR-

RELATED (DMBT1)

MOLECULAR FUNCTIONS

Receptor > Other receptor

BIOLOGICAL PROCESS

Signal transduction > Cell communication > Ligand-

mediated signaling

Immunity and defense > Macrophage-mediated

immunity

Oncogenesis > Tumor suppressor

HUMAN GENE ONTOLOGY

PROCESS

humoral defense mechanism > antimicrobial response
protein metabolism and modification
macromolecule catabolism > proteolysis and

peptidolysis

defence response > immune response
cell communication > cell adhesion
peptidoglycan catabolism > axon guidance
axonogenesis

FUNCTION

serine-type endopeptidase > trypsin
molecular_function unknown > lymphocyte antigen
serine-type endopeptidase > chymotrypsin
metalloendopeptidase > astacin
peptidase > metallopeptidase

LOCATION

cell > membrane fraction
plasma membrane > integral plasma membrane

protein

extracellular > extracellular space
GO cellular component > extracellular
cell > plasma membrane

HUMAN PROTEIN DOMAINS (INTERPRO SIGNATURES)

IPR001190 (SPERACTRCPTR)
IPR000859 (CUB)
IPR001507 (ZP)
IPR001190 (SR)
IPR000859 (CUB)
IPR001507 (zona pellucida)
IPR001190 (SRCR)
IPR001190 (SRCR 2 8)
IPR000859 (CUB 2)

| | |
|---|---|
| hP15-016.3 | HUMAN PANTHER CLASSIFICATIONS |

| | |
|---|---|
| (SEQ ID NO: 90) | FAMILY (SUBFAMILY) |

MACROPHAGE SCAVENGER RECEPTOR-

RELATED (DMBT1)

MOLECULAR FUNCTIONS

Receptor > Other receptor

BIOLOGICAL PROCESS

Signal transduction > Cell communication > Ligand-

mediated signaling

Immunity and defense > Macrophage-mediated

immunity

Oncogenesis > Tumor suppressor

HUMAN GENE ONTOLOGY
No Gene Ontology
HUMAN PROTEIN DOMAINS (INTERPRO SIGNATURES)

IPR001190 (SPERACTRCPTR)
IPR000859 (CUB)
IPR001507 (ZP)
IPR001190 (SR)
IPR000859 (CUB)
IPR001507 (zona pellucida)
IPR001190 (SRCR)
IPR001190 (SRCR 2 8)
IPR000859 (CUB 2)

| | |
|---|---|
| hP15-016.4 | HUMAN PANTHER CLASSIFICATIONS |

| | |
|---|---|
| (SEQ ID NO: 92) | FAMILY (SUBFAMILY) |

MACROPHAGE SCAVENGER RECEPTOR-

RELATED(DMBT1)

MOLECULAR FUNCTIONS

Receptor > Other receptor

BIOLOGICAL PROCESS

Signal transduction > Cell communication > Ligand-

mediated signaling

Immunity and defense > Macrophage-mediated

immunity

Oncogenesis > Tumor suppressor

HUMAN GENE ONTOLOGY

PROCESS

humoral defense mechanism > antimicrobial response
protein metabolism and modification
macromolecule catabolism > proteolysis and

peptidolysis

defence response > immune response
cell communication > cell adhesion
peptidoglycan catabolism > axon guidance
axonogenesis

FUNCTION

serine-type endopeptidase > trypsin
molecular_function unknown > lymphocyte antigen
serine-type endopeptidase > chymotrypsin
metalloendopeptidase > astacin
peptidase > metallopeptidase

LOCATION

cell > membrane fraction
extracellular > extracellular space
plasma membrane > integral plasma membrane

protein

GO cellular component > extracellular
cell > plasma membrane

HUMAN PROTEIN DOMAINS (INTERPRO SIGNATURES)

IPR001190 (SPERACTRCPTR)
IPR001190 (SR)
IPR001190 (SRCR)
IPR001190 (SRCR 2 8)

| | |
|---|---|
| hP15-017.1 | HUMAN PANTHER CLASSIFICATIONS |

| | |
|---|---|
| (SEQ ID NO: 98) | FAMWY (SUBFAMILY) |

NOT ANNOTATED

HUMAN GENE ONTOLOGY

PROCESS

protein modification > protein sulfatation
biosynthesis > heparin sulfate biosynthesis
proteoglycan metabolism
protein modification > protein sulfatation
aminoglycan biosynthesis
biosynthesis > heparin sulfate biosynthesis
GO biological process > cell growth and maintenance

FUNCTION

sulfotransferase > heparin-glucosamine 3-O-

sulfotransferase

enzyme > sulfotransferase

LOCATION

cytoplasm > Golgi apparatus
cell > membrane fraction
plasma membrane > integral plasma membrane

protein
HUMAN PROTEIN DOMAINS (INTERPRO SIGNATURES)

IPR000863 (Sulfotransfer)

| | |
|---|---|
| hP15-017.2 | HUMAN PANTHER CLASSIFICATIONS |

| | |
|---|---|
| (SEQ ID NO: 100) | FAMILY (SUBFAMILY) |

NOT ANNOTATED

HUMAN GENE ONTOLOGY

PROCESS

protein modification > protein sulfatation

LOCATION

cytoplasm > Golgi apparatus

HUMAN PROTEIN DOMAINS (INTERPRO SIGNATURES)

IPR000863 (Sulfotransfer)

| | |
|---|---|
| hP15-017.3 | HUMAN PANTHER CLASSIFICATIONS |

| | |
|---|---|
| (SEQ ID NO: 102) | FAMILY (SUBFAMILY) |

NOT ANNOTATED

HUMAN GENE ONTOLOGY

PROCESS

protein modification > protein sulfatation
biosynthesis > heparin sulfate biosynthesis
proteoglycan metabolism
protein modification > protein sulfatation
aminoglycan biosynthesis
biosynthesis > heparin sulfate biosynthesis
GO biological process > cell growth and maintenance

FUNCTION

sulfotransferase > heparin-glucosamine 3-O-

sulfotransferase

enzyme > sulfotransferase

LOCATION

cytoplasm > Golgi apparatus
cell > membrane fraction
plasma membrane > integral plasma membrane

protein
HUMAN PROTEIN DOMAINS (INTERPRO SIGNATURES)

IPR000863 (Sulfotransfer)

| | |
|---|---|
| hP15-017.4 | HUMAN PANTHER CLASSIFICATIONS |

| | |
|---|---|
| (SEQ ID NO: 104) | FAMILY (SUBFAMILY) |

NOT ANNOTATED

HUMAN GENE ONTOLOGY

PROCESS

protein modification > protein sulfatation
biosynthesis > heparin sulfate biosynthesis
proteoglycan metabolism
aminoglycan biosynthesis
biosynthesis > heparinsulfate biosynthesis
protein modification > protein sulfatation
GO biological process > cell growth and maintenance

FUNCTION

sulfotransferase > heparin-glucosamine 3-O-

sulfotransferase

enzyme > sulfotransferase

LOCATION

cytoplasm > Golgi apparatus
cell > membrane fraction
plasma membrane > integral plasma membrane

protein
HUMAN PROTEIN DOMAINS (INTERPRO SIGNATURES)

IPR000863 (Sulfotransfer)

| | |
|---|---|
| hP15-022.1 | HUMAN PANTHER CLASSIFICATIONS |

| | |
|---|---|
| (SEQ ID NO: 110) | FAMILY (SUBFAMILY) |

IINSULIN/IGF/RELAXIN FAMILY

MEMBER(INSULIN-LIKE GROWTH FACTOR II-RELATED)

MOLECULAR FUNCTIONS

Signaling molecule > Growth factor

BIOLOGICAL PROCESS

Signal transduction > Cell communication > Ligand-

mediated signaling

Developmental processes

HUMAN GENE ONTOLOGY

PROCESS

cell shape and cell size control > growth pattern
nucleotide metabolism > glycolate metabolism
mesoderm development > skeletal development
ribonucleotide metabolism > imprinting
monosaccharide metabolism > glucose metabolism

FUNCTION

GO molecular function > cell cycle regulator
endonuclease > endoribonuclease
ribonuclease
protein serine/threonine kinase > IkB kinase

LOCATION

extracellular > extracellular space
cell > cytoplasm
GO cellular component > extracellular
cell > soluble fraction

HUMAN PROTEIN DOMATNS (INTERPRO SIGNATURES)

No Domain Hit

| | |
|---|---|
| hP15-022.2 | HUMAN PANTHER CLASSIFICATIONS |

| | |
|---|---|
| (SEQ ID NO: 112) | No Panther Hit |

HUMAN GENE ONTOLOGY

PROCESS

cell shape and cell size control > growth pattern
nucleotide metabolism > glycolate metabolism
mesoderm development > skeletal development
ribonucleotide metabolism > imprinting
monosaccharide metabolism > glucose metabolism

FUNCTION

GO molecular function > cell cycle regulator
endonuclease > endoribonuclease
ribonuclease
protein serine/threonine kinase > IkB kinase

LOCATION

extracellular > extracellular space
cell > cytoplasm
cell > soluble fraction

HUMAN PROTEIN DOMAINS (INTERPRO SIGNATURES)

IPR004825 (INSULINB)
IPR004825 (I1GF)
IPR004825 (Insulin)

| | |
|---|---|
| hP15-022.3 | HUMAN PANTHER CLASSIFICATIONS |

| | |
|---|---|
| (SEQ ID NO: 114) | No Panther Hit |

HUMAN GENE ONTOLOGY

PROCESS

cell shape and cell size control > growth pattern
nucleotide metabolism > glycolate metabolism
mesoderm development > skeletal development
ribonucleotide metabolism > imprinting
monosaccharide metabolism > glucose metabolism

FUNCTION

GO molecular function > cell cycle regulator
endonuclease > endoribonuclease
ribonuclease
protein serine/threonine kinase > IkB kinase

LOCATION

extracellular > extracellular space
cell < cytoplasm
cell > soluble fraction

HUMAN PROTEIN DOMAINS (INTERPRO SIGNATURES)

No Domain Hit

[0321] A CA protein (CAP) is a ATP binding protein wherein the CAP sequence is SEQ ID NOS: 6, 8, 10, 40, 42, 70, 72, 74, 76, 78 and 80.

[0322] A CA protein (CAP) is an ion transport protein wherein the CAP sequence is SEQ ID NOS: 60, 62, 64 and 72.

[0323] A CA protein (CAP) is a transcription factor wherein the CAP sequence is selected from the group consisting of SEQ ID NOS: 20, 22, 26, 28, 30 and 32.

[0324] A CA protein (CAP) is a sulfotransferase enzyme wherein the CAP sequence is selected from the group consisting of SEQ ID NOS: 98, 100, 102 and 104.

[0325] A CA protein (CAP) is a cell cycle regulator wherein the CAP sequence is selected from the group consisting of SEQ ID NOS: 110, 112 and 114.

[0326] A CA protein (CAP) is involved in rRNA metabolism wherein the CAP sequence is selected from the group consisting of SEQ ID NOS: 16, 18 and 24.

[0327] A CA protein (CAP) is involved in signalling/signal transduction wherein the CAP sequence is selected from the group consisting of SEQ ID NOS: 18, 22, 26, 30, 32, 40, 42, 50, 52, 54, 70, 72, 74, 76, 78, 80, 86, 88, 90 and 110.

[0328] A CA protein (CAP) is a cell adhesion molecule wherein the CAP sequence is selected from the group consisting of SEQ ID NOS: 40, 42, 70, 86, 88 and 92.

[0329] A CA protein (CAP) is a tyrosine protein kinase wherein the CAP sequence is selected from the group consisting of SEQ ID NOS: 50, 52, 54, 70, 72, 74, 76, 78 and 80.

[0330] A CA protein (CAP) is expressed on a cell surface, wherein the CA protein is selected from the group consisting of SEQ ID NOS: 6, 8, 10, 16, 18, 20, 22, 24, 26, 28, 30, 32, 38, 40, 42, 44, 50, 52, 54, 60, 62, 64, 70, 72, 74, 76, 78, 80, 86, 88, 90, 92, 98, 100, 102, 104, 110, 112 and 114.

[0331] Certain aspects of the present invention are described in greater detail in the non-limiting examples that follow.

### EXAMPLES

[0332] The following examples are put forth so as to provide those of ordinary skill in the art with a complete disclosure and description of how to make and use the present invention, and are not intended to limit the scope of what the inventors regard as their invention nor are they intended to represent that the experiments below are all and only experiments performed. Efforts have been made to ensure accuracy with respect to numbers used (e.g. amounts, temperature, etc.) but some experimental errors and deviations should be accounted for. Unless indicated otherwise, parts are parts by weight, molecular weight is weight average molecular weight, temperature is in degrees Celsius, and pressure is at or near atmospheric.

### Example 1

### Insertion Site Analysis Following Tumor Induction in Mice

[0333] Tumors are induced in mice using either mouse mammary tumor virus (MMTV) or murine leukemia virus (MLV). MMTV causes mammary adenocarcinomas and MLV causes a variety of different hematopoetic malignancies (primarily T- or B-cell lymphomas). Three routes of infection are used: (1) injection of neonates with purified virus preparations, (2) infection by milk-borne virus during nursing, and (3) genetic transmission of pathogenic proviruses via the germ-line (Akvr1 and/or Mtv2). The type of malignancy present in each affected mouse is determined by histological analysis of H&E-stained thin sections of formalin-fixed, paraffin-embedded biopsy samples. Host DNA sequences flanking all clonally-integrated proviruses in each tumor are recovered by nested anchored-PCR using two virus-specific primers and two primers specific for a 40 bp double stranded DNA anchor ligated to restriction enzyme digested tumor DNA. Amplified bands representing host/virus junction fragments are cloned and sequenced. Then the host sequences (called “tags”) are used to BLAST analyze the Celera mouse genomic sequence. For each individual tag, three parameters are recorded: (1) the mouse chromosome assignment, (2) base pair coordinates at which the integration occurred, and (3) provirus orientation. Using this information, all available tags from all analyzed tumors are mapped to the mouse genome. To identify the protooncogene targets of provirus insertion mutation, the provirus integration pattern at each cluster of integrants is analyzed relative to the locations of all known genes in the transcriptome. The presence of provirus at the same locus in two or more independent tumors is prima facie evidence that a protooncogene is present at or very near the proviral integration sites. This is because the genome is too large for random integrations to result in observable clustering. Any clustering that is detected is unequivocal evidence for biological selection during tumorigenesis. In order to identify the human orthologs of the protooncogene targets of provirus insertion mutation, a comparative analysis of syntenic regions of the mouse and human genomes is performed.

[0334] An example of PCR amplification of host/virus junction fragments is presented in FIG. 1. Lane 1 contains the amplification products from normal control DNA and lane 2 contains the amplification products from tumor DNA. The bands result from 5′ host/virus junction fragments present in the DNA samples. Lane 1 has bands from the env/3′ LTR junctions from all proviruses (upper) and the host/5′ LTR from the pathogenic endogenous Mtv2 provirus present in this particular mouse strain. This endogenous provirus is detected because its sequence is identical to the new clonally integrated proviruses in the tumor. All four new clonally integrated proviruses known to be in this tumor are readily detected.

### Example 2

### Analysis of Quantitative RT-PCR: Comparative CT Method.

[0335] The expression level of target genes is quantified using the ABI PRISM 7900HT Sequence Detection System (Applied Biosystems, California). The method is based on the quantitation of the initial copy number of target template in comparison to that of a reference (normalizer) housekeeper gene (Pre-Developed TaqMan® Assay Reagents Gene Expression Quantification Protocol, Applied Biosystems, 2001). Accumulation of DNA product with each PCR cycle is related to amplicon efficiency and the initial template concentration. Therefore the amplification efficiency of both the target and the normalizer must be approximately equal. The threshold cycle (C_{T}), which is dependent on the starting template copy number and the DNA amplification efficiency, is a PCR cycle during which PCR product growth is exponential. With a similar dynamic range for the target and normalizer, the comparative C_{T} method is applicable.

[0336] An example of the comparative C_{T} method of gene expression for quantitative RT-PCR is shown in FIG. 2. In the first step, assays are performed in quadruplicate on a normal tissue and several sample tissues. In these tissues, the means and standard deviations of C_{T} values are determined for housekeeper genes (chosen as controls if shown to be biologically stable among various samples, irrespective of disease state) and for the target gene. FIG. 2 shows an example of average C_{T} values for a housekeeper gene and target gene. These values can fall within a range from upper teens to 40 depending on the intrinsic expression level of the gene in the particular tissue. The coefficient of variance of all replicate sets cannot exceed 1.5%.

[0337] An assessment of how the ΔC_{T} changes with template dilution verifies that the efficiencies of the target and housekeeper amplicons are approximately equal if the log input amount of template RNA versus ΔC_{T} plot has a slope<0.10. With the relative efficiencies verified for target and housekeeper, the ΔΔC_{T} comparative calculation becomes valid, as mentioned above. An example of the calculated difference between the C_{T} values of target and housekeeper genes (ΔC_{T}) for various samples is shown in FIG. 3. The ΔΔC_{T} is calculated for each sample by subtracting its ΔC_{T} value from the ΔC_{T} value of the baseline (calibrator) sample. If the expression is increased in some samples and decreased in others, ΔΔC_{T} will be a mixture of negative and positive values. The final step in the calculation is to transform these values to absolute values. The formula for this is:

Comparative expression level=2^{-ΔΔCT}

[0338] The final value for the calibrator should always be one. FIG. 4 shows the ΔΔC_{T} and comparative expression level for each sample from FIG. 3.

### Example 3

### Detection of Elevated Levels of cDNA Associated with Cancer Using Arrays

[0339] cDNA sequences representing a variety of candidate CA genes to be screened for differential expression in cancer are assayed by hybridization on polynucleotide arrays. The cDNA sequences include cDNA clones isolated from cell lines or tissues of interest. The cDNA sequences analyzed also include polynucleotides comprising sequence overlap with sequences in the Unigene database, and which encode a variety of gene products of various origins, functionality, and levels of characterization. cDNAs are spotted onto reflective slides (Amersham) according to methods well known in the art at a density of 9,216 spots per slide representing 4,068 sequences (including controls) spotted in duplicate, with approximately 0.8 μl of an approximately 200 ng/μl solution of cDNA.

[0340] PCR products of selected cDNA clones corresponding to the gene products of interest are prepared in a 50% DMSO solution. These PCR products are spotted onto Amersham aluminum microarray slides at a density of 9216 clones per array using a Molecular Dynamics Generation III spotting robot. Clones are spotted in duplicate, for a total of 4608 different sequences per chip.

[0341] cDNA probes are prepared from total RNA obtained by laser capture microdissection (LCM, Arcturus Enginering Inc., Mountain View, Calif.) of tumor tissue samples and normal tissue samples isolated from patients.

[0342] Total RNA is first reverse transcribed into cDNA using a primer containing a T7 RNA polymerase promoter, followed by second strand DNA synthesis. cDNA is then transcribed in vitro to produce antisense RNA using the T7 promoter-mediated expression (see, e.g., Luo et al. (1999) Nature Med 5:117-122), and the antisense RNA is then converted into cDNA. The second set of cDNAs are again transcribed in vitro, using the T7 promoter, to provide antisense RNA. This antisense RNA is then fluorescently labeled, or the RNA is again converted into cDNA, allowing for a third round of T7-mediated amplification to produce more antisense RNA. Thus the procedure provides for two or three rounds of in vitro transcription to produce the final RNA used for fluorescent labeling. Probes are labeled by making fluorescently labeled cDNA from the RNA starting material. Fluorescently labeled cDNAs prepared from the tumor RNA sample are compared to fluorescently labeled cDNAs prepared from normal cell RNA sample. For example, the cDNA probes from the normal cells are labeled with Cy3 fluorescent dye (green) and the cDNA probes prepared from suspected cancer cells are labeled with Cy5 fluorescent dye (red).

[0343] The differential expression assay is performed by mixing equal amounts of probes from tumor cells and normal cells of the same patient. The arrays are prehybridized by incubation for about 2 hrs at 60° C. in 5×SSC, 0.2% SDS, 1 mM EDTA, and then washing three times in water and twice in isopropanol. Following prehybridization of the array, the probe mixture is then hybridized to the array under conditions of high stringency (overnight at 42° C. in 50% formamide, 5×SSC, and 0.2% SDS. After hybridization, the array is washed at 55° C. three times as follows: 1) first wash in 1×SSC/0.2% SDS; 2) second wash in 0.1×SSC/0.2% SDS; and 3) third wash in 0.1×SSC.

[0344] The arrays are then scanned for green and red fluorescence using a Molecular Dynamics Generation III dual color laser-scanner/detector. The images are processed using BioDiscovery Autogene software, and the data from each scan set normalized. The experiment is repeated, this time labeling the two probes with the opposite color in order to perform the assay in both “color directions.” Each experiment is sometimes repeated with two more slides (one in each color direction). The data from each scan is normalized, and the level of fluorescence for each sequence on the array expressed as a ratio of the geometric mean of 8 replicate spots/genes from the four arrays or 4 replicate spots/gene from 2 arrays or some other permutation.

[0345] Normalization: The objective of normalization is to generate a cDNA library in which all transcripts expressed in a particular cell type or tissue are equally represented (S. M. Weissman, Mol. Biol. Med. 4(3):133-143 (1987); Patanjali, et al., Proc. Natl. Acad. Sci. USA 88(5):1943-1947 (1991)), and therefore isolation of as few as 30,000 recombinant clones in an optimally normalized library may represent the entire gene expression repertoire of a cell, estimated to number 10,000 per cell.

[0346] Total RNA is extracted from harvested cells using RNeasy™ Protect Kit (Qiagen, Valencia, Calif.), following manufacturer's recommended procedures. RNA is quantified using RiboGreen™ RNA quantification kit (Molecular Probes, Inc. Eugene, Oreg.). One μg of total RNA is reverse transcribed and PCR amplified using SMART™ PCR cDNA synthesis kit (ClonTech, Palo Alto, Calif.). The cDNA products are size-selected by agarose gel electrophoresis using standard procedures (Sambrook, J. T., et al. Molecular Cloning: A Laboratory Manual, 2d ed., Cold Spring Harbor Laboratory Press, NY). The cDNA is extracted using Bio 101 Geneclean® II kit (Qbiogene, Carlsbad, Calif.). Normalization of the cDNA is carried out using kinetics of hybridization principles: 1.0 μg of cDNA is denatured by heat at 100° C. for 10 minutes, then incubated at 42° C. for 42 hours in the presence of 120 mM NaCl, 10 mM Tris.HCl (pH=8.0), 5 mM EDTA.Na+ and 50% formamide. Single-stranded cDNA (“normalized”) is purified by hydroxyapatite chromatography (#130-0520, BioRad, Hercules, Calif.) following the manufacturer's recommended procedures, amplified and converted to double-stranded cDNA by three cycles of PCR amplification, and cloned into plasmid vectors using standard procedures, (Sambrook, J. T., et al. Molecular Cloning: A Laboratory Manual, 2d ed., Cold Spring Harbor Laboratory Press, NY). All primers/adaptors used in the normalization and cloning process are provided by the manufacturer in the SMART™ PCR cDNA synthesis kit (ClonTech, Palo Alto, Calif.). Supercompetent cells (XL-2 Blue Ultracompetent Cells, Stratagene, California) are transfected with the normalized cDNA libraries, plated on solid media and grown overnight at 36° C.

[0347] The sequences of 10,000 recombinants per normalized library are analyzed by capillary sequencing using the ABI PRISM 3700 DNA Analyzer (Applied Biosystems, California). To determine the representation of transcripts in a library, BLAST analysis is performed on the clone sequences to assign transcript identity to each isolated clone, i.e., the sequences of the isolated polynucleotides are first masked to eliminate low complexity sequences using the XBLAST masking program (Clayerie “Effective Large-Scale Sequence Similarity Searches,” Computer Methods for Macromolecular Sequence Analysis, Doolittle, ed., Meth. Enzymol. 266:212-227 Academic Press, NY, N.Y. (1996); see particularly Clayerie, in “Automated DNA Sequencing and Analysis Techniques” Adams et al., eds., Chap. 36, p. 267 Academic Press, San Diego, 1994 and Clayerie et al. Comput. Chem. (1993) 17:191). Generally, masking does not influence the final search results, except to eliminate sequences of relative little interest due to their low complexity, and to eliminate multiple “hits” based on similarity to repetitive regions common to multiple sequences, e.g., Alu repeats. The remaining sequences are then used in a BLASTN vs. GenBank search. The sequences are also used as query sequence in a BLASTX vs. NRP (non-redundant proteins) database search.

[0348] Automated sequencing reactions are performed using a Perkin-Elmer PRISM Dye Terminator Cycle Sequencing Ready Reaction Kit containing AmpliTaq DNA Polymerase, FS, according to the manufacturer's directions. The reactions are cycled on a GeneAmp PCR System 9600 as per manufacturer's instructions, except that they are annealed at 20° C. or 30° C. for one minute. Sequencing reactions are ethanol precipitated, pellets are resuspended in 8 microliters of loading buffer, 1.5 microliters is loaded on a sequencing gel, and the data is collected by an ABI PRISM 3700 DNA Sequencer. (Applied Biosystems, Foster City, Calif.).

[0349] The number of times a sequence is represented in a library is determined by performing sequence identity analysis on the cloned cDNA sequences and assigning transcript identity to each isolated clone. First, each sequence is checked to determine if it is a bacterial, ribosomal; or mitochondrial contaminant. Such sequences are excluded from the subsequent analysis. Second, sequence artifacts, such as vector and repetitive elements, are masked and/or removed from each sequence.

[0350] The remaining sequences are compared via BLAST (Altschul et. al, J. Mol. Biol., 215:40, 1990) to GenBank and EST databases for gene identification and are compared with each other via FastA (Pearson & Lipman, PNAS, 85:2444, 1988) to calculate the frequency of cDNA appearance in the normalized cDNA library. The sequences are also searched against the GenBank and GeneSeq nucleotide databases using the BLASTN program (BLASTN 1.3 MP— Altschul et al., J. Mol. Bio. 215:403, 1990). Fourth, the sequences are analyzed against a non-redundant protein (NRP) database with the BLASTX program (BLASTX 1.3 MP: Altschul et al., supra). This protein database is a combination of the Swiss-Prot, PIR, and NCBI GenPept protein databases. The BLASTX program is run using the default BLOSUM-62 substitution matrix with the filter parameter: “xnu+seg”. The score cutoff utilized is 75. Assembly of overlapping clones into contigs is done using the program Sequencher (Gene Codes Corp.; Ann Arbor, Mich.). The assembled contigs are analyzed using the programs in the GCG package (Genetic Computer Group, University Research Park, 575 Science Drive, Madison, Wis. 53711) Suite Version 10.1.

### Example 4

### Detection of CA Sequences in Human Cancer Cells and Tissues

[0351] DNA from prostate and breast cancer tissues and other human cancer tissues, human colon, normal human tissues including non-cancerous prostate, and from other human cell lines are extracted following the procedure of Delli Bovi et al. (1986, Cancer Res. 46:6333-6338). The DNA is resuspended in a solution containing 0.05 M Tris HCl buffer, pH 7.8, and 0.1 mM EDTA, and the amount of DNA recovered is determined by microfluorometry using Hoechst 33258 dye. Cesarone, C. et al., Anal Biochem 100: 188-197 (1979).

[0352] Polymerase chain reaction (PCR) is performed using Taq polymerase following the conditions recommended by the manufacturer (Perkin Elmer Cetus) with regard to buffer, Mg²⁺, and nucleotide concentrations. Thermocycling is performed in a DNA cycler by denaturation at 94° C. for 3 min. followed by either 35 or 50 cycles of 94° C. for 1.5 min., 50° C. for 2 min. and 72° C. for 3 min. The ability of the PCR to amplify the selected regions of the CA gene is tested by using a cloned CA polynucleotide(s) as a positive template(s). Optimal Mg²⁺, primer concentrations and requirements for the different cycling temperatures are determined with these templates. The master mix recommended by the manufacturer is used. To detect possible contamination of the master mix components, reactions without template are routinely tested.

[0353] Southern blotting and hybridization are performed as described by Southern, E. M., (J. Mol. Biol. 98:50₃-517, 1975), using the cloned sequences labeled by the random primer procedure (Feinberg, A. P., et al., 1983, Anal. Biochem. 132:6-13). Prehybridization and hybridization are performed in a solution containing 6×SSPE, 5% Denhardt's, 0.5% SDS, 50% formamide, 100 μg/ml denaturated salmon testis DNA, incubated for 18 hrs at 42° C., followed by washings with 2×SSC and 0.5% SDS at room temperature and at 37° C. and finally in 0.1×SSC with 0.5% SDS at 68° C. for 30 min (Sambrook et al., 1989, in “Molecular Cloning: A Laboratory Manual”, Cold Spring Harbor Lab. Press). For paraffin-embedded tissue sections the conditions described by Wright and Manos (1990, in “PCR Protocols”, Innis et al., eds., Academic Press, pp. 153-158) are followed using primers designed to detect a 250 bp sequence.

### Example 5

### Detection of CA Sequences in Human Cancer Cells and Tissues

[0354] DNA from human cancer tissues, normal human tissues and from other human cell lines is extracted following the procedure of Delli Bovi et al. (1986, Cancer Res. 46:6333-6338). The DNA is resuspended in a solution containing 0.05 M Tris HCl buffer, pH 7.8, and 0.1 mM EDTA, and the amount of DNA recovered is determined by microfluorometry using Hoechst 33258 dye. Cesarone, C. et al., Anal Biochem 100:188-197 (1979).

[0355] Polymerase chain reaction (PCR) is performed using Taq polymerase following the conditions recommended by the manufacturer (Perkin Elmer Cetus) with regard to buffer, Mg²⁺, and nucleotide concentrations. Thermocycling is performed in a DNA cycler by denaturation at 94° C. for 3 min. followed by either 35 or 50 cycles of 94° C. for 1.5 min., 50° C. for 2 min. and 72° C. for 3 min. The ability of the PCR to amplify the selected regions of CA genes is tested by using a cloned CA polynucleotide(s) as a positive template(s). Optimal Mg²⁺, primer concentrations and requirements for the different cycling temperatures are determined with these templates. The master mix recommended by the manufacturer is used. To detect possible contamination of the master mix components, reactions without template are routinely tested.

[0356] Southern blotting and hybridization are perform-ed as described by Southern, E. M., (J. Mol. Biol. 98:503-517, 1975), using the cloned sequences labeled by the random primer procedure (Feinberg, A. P., et al., 1983, Anal. Biochem. 132:6-13). Prehybridization and hybridization are performed in a solution containing 6×SSPE, 5% Denhardt's, 0.5% SDS, 50% formamide, 100 μg/ml-denaturated salmon testis DNA, incubated for 18 hrs at 42° C., followed by washings with 2×SSC and 0.5% SDS at room temperature and at 37° C. and finally in 0.1×SSC with 0.5% SDS at 68° C. for 30 min (Sambrook et al., 1989, in “Molecular Cloning: A Laboratory Manual”, Cold Spring Harbor Lab. Press). For paraffin-embedded tissue sections the conditions described by Wright and Manos (1990, in “PCR Protocols”, Innis et al., eds., Academic Press, pp. 153-158) are followed using primers designed to detect a 250 bp sequence.

### Example 6

### Expression of Cloned Polynucleotides in Host Cells

[0357] To study the protein products of CA genes, restriction fragments from CA DNA are cloned into the expression vector pMT2 (Sambrook, et al., Molecular Cloning: A Laboratory Manual, Cold Spring Harbor Laboratory Press pp 16.17-16.22 (1989)) and transfected into COS cells grown in DMEM supplemented with 10% FCS. Transfections are performed employing calcium phosphate techniques (Sambrook, et al (1989) pp. 16.32-16.40, supra) and cell lysates are prepared forty-eight hours after transfection from both transfected and untransfected COS cells. Lysates are subjected to analysis by immunoblotting using anti-peptide antibody.

[0358] In immunoblotting experiments, preparation of cell lysates and electrophoresis are performed according to standard procedures. Protein concentration is determined using BioRad protein assay solutions. After semi-dry electrophoretic transfer to nitrocellulose, the membranes are blocked in 500 mM NaCl, 20 mM Tris, pH 7.5, 0.05% Tween-20 (TTBS) with 5% dry milk. After washing in TTBS and incubation with secondary antibodies (Amersham), enhanced chemiluminescence (ECL) protocols (Amersham) are performed as described by the manufacturer to facilitate detection.

### Example 7

### Generation of Antibodies Against Polypeptides

[0359] Polypeptides, unique to CA genes are synthesized or isolated from bacterial or other (e.g., yeast, baculovirus) expression systems and conjugated to rabbit serum albumin (RSA) with m-maleimido benzoic acid N-hydroxysuccinimide ester (MBS) (Pierce, Rockford, Ill.). Immunization protocols with these peptides are performed according to standard methods. Initially, a pre-bleed of the rabbits is performed prior to immunization. The first immunization includes Freund's complete adjuvant and 500 μg conjugated peptide or 100 μg purified peptide. All subsequent immunizations, performed four weeks after the previous injection, include Freund's incomplete adjuvant with the same amount of protein. Bleeds are conducted seven to ten days after the immunizations.

[0360] For affinity purification of the antibodies, the corresponding CA polypeptide is conjugated to RSA with MBS, and coupled to CNBr-activated Sepharose (Pharmacia, Uppsala, Sweden). Antiserum is diluted 10-fold in 10 mM Tris-HCl, pH 7.5, and incubated overnight with the affinity matrix. After washing, bound antibodies are eluted from the resin with 100 mM glycine, pH 2.5.

### Example 8

### Generation of Monoclonal Antibodies Against a CA Polypeptide

[0361] A non-denaturing adjuvant (Ribi, R730, Corixa, Hamilton Mont.) is rehydrated to 4 ml in phosphate buffered saline. 100 μL of this rehydrated adjuvant is then diluted with 400 μl of Hank's Balanced Salt Solution and this is then gently mixed with the cell pellet used for immunization. Approximately 500 μg conjugated peptide or 100 μg purified peptide and Freund's complete are injected into Balb/c mice via foot-pad, once a week. After 6 weeks of weekly injection, a drop of blood is drawn from the tail of each immunized animal to test the titer of antibodies against CA polypeptides using FACS analysis. When the titer reaches at least 1:2000, the mice are sacrificed in a CO₂ chamber followed by cervical dislocation. Lymph nodes are harvested for hybridoma preparation. Lymphocytes from mice with the highest titer arc fused with the mouse myeloma line X63-Ag8.653 using 35% polyethylene glycol 4000. On day 10 following the fusion, the hybridoma supernatants are screened for the presence of CAP-specific monoclonal antibodies by fluorescence activated cell sorting (FACS). Conditioned medium from each hybridoma is incubated for 30 minutes with a combined aliquot of PC3, Colo-205, LnCap, or Panc-1 cells. After incubation, the cell samples are washed, resuspended in 0.1 ml diluent and incubated with 1 μg/ml of FITC conjugated F(ab′)₂ fragment of goat anti-mouse IgG for 30 min at 4° C. The cells are washed, resuspended in 0.5 ml FACS diluent and analyzed using a FACScan cell analyzer (Becton Dickinson; San Jose, Calif.). Hybridoma clones are selected for further expansion, cloning, and characterization based on their binding to the surface of one or more of cell lines which express the CA polypeptide as assessed by FACS. A hybridoma making a monoclonal antibody designated mAbCA which binds an antigen designated Ag-CA.x and an epitope on that antigen designated Ag-CA.x.1 is selected.

### Example 9

### ELISA Assay for Detecting CA Related Antigens

[0362] To test blood samples for antibodies that bind specifically to recombinantly produced CA antigens, the following procedure is employed. After a recombinant CA related protein is purified, the recombinant protein is diluted in PBS to a concentration of 5 μg/ml (500 ng/100 μl). 100 microliters of the diluted antigen solution is added to each well of a 96-well Immulon 1 plate (Dynatech Laboratories, Chantilly, Va.), and the plate is then incubated for 1 hour at room temperature, or overnight at 4° C., and washed 3 times with 0.05% Tween 20 in PBS. Blocking to reduce nonspecific binding of antibodies is accomplished by adding to each well 200 μl of a 1% solution of bovine serum albumin in PBS/Tween 20 and incubation for 1 hour. After aspiration of the blocking solution, 100 μl of the primary antibody solution (anticoagulated whole blood, plasma, or serum), diluted in the range of 1/16 to 1/2048 in blocking solution, is added and incubated for 1 hour at room temperature or overnight at 4° C. The wells are then washed 3 times, and 100 μl of goat anti-human IgG antibody conjugated to horseradish peroxidase (Organon Teknika, Durham, N.C.), diluted 1/500 or 1/1000 in PBS/Tween 20, 100 μl of o-phenylenediamine dihydrochloride (OPD, Sigma) solution is added to each well and incubated for 5-15 minutes. The OPD solution is prepared by dissolving a 5 mg OPD tablet in 50 ml 1% methanol in H₂O and adding 50 μl 30% H₂O₂ immediately before use. The reaction is stopped by adding 25 l of 4M H₂SO₄. Absorbances are read at 490 nm in a microplate reader (Bio-Rad).

### Example 10

### Identification and Characterization of CA Antigen on Cancer Cell Surface

[0363] A cell pellet of proximately 25 μl packed cell volume of a cancer cell preparation is lysed by first diluting the cells to 0.5 ml in water followed by freezing and thawing three times. The solution is centrifuged at 14,000 rpm. The resulting pellet, containing the cell membrane fragments, is resuspended in 50 μl of SDS sample buffer (Invitrogen, Carlsbad, Calif.). The sample is heated at 80° C. for 5 minutes and then centrifuged for 2 minutes at 14,000 rpm to remove any insoluble materials.

[0364] The samples are analyzed by Western blot using a 4 to 20% polyacrylamide gradient gel in Tris-Glycine SDS (Invitrogen; Carlsbad Calif.) following the manufacturer's directions. Ten microliters of membrane sample are applied to one lane on the polyacrylamide gel. A separate 10 μL sample is reduced first by the addition of 2 PL of dithiothreitol (100 mM) with heating at 80° C. for 2 minutes and then loaded into another lane. Pre-stained molecular weight markers SeeBlue Plus2 (Invitrogen; Carlsbad, Calif.) are used to assess molecular weight on the gel. The gel proteins are transferred to a nitrocellulose membrane using a transfer buffer of 14.4 g/l glycine, 3 g/l of Tris Base, 10% methanol, and 0.05% SDS. The membranes are blocked, probed with a CAP-specific monoclonal antibody (at a concentration of 0.5 μg/ml), and developed using the Invitrogen WesternBreeze Chromogenic Kit-AntiMouse according to the manufacturer's directions. In the reduced sample of the tumor cell membrane samples, a prominent band is observed migrating at a molecular weight within about 10% of the predicted molecular weight of the corresponding CA protein.

### Example 11

### Preparation of Vaccines

[0365] The present invention also relates to a method of stimulating an immune response against cells that express CA polypeptides in a patient using CA polypeptides of the invention that act as an antigen produced by or associated with a malignant cell. This aspect of the invention provides a method of stimulating an immune response in a human against cancer cells or cells that express CA polynucleotides and polypeptides. The method comprises the step of administering to a human an immunogenic amount of a polypeptide comprising: (a) the amino acid sequence of a huma CA protein or (b) a mutein or variant of a polypeptide comprising the amino acid sequence of a human endogenous retrovirus CA protein.

### Example 12

### Generation of Transgenic Animals Expressing Polypeptides as a Means for Testing Therapeutics.

[0366] CA nucleic acids are used to generate genetically modified non-human animals, or site specific gene modifications thereof, in cell lines, for the study of function or regulation of prostate tumor-related genes, or to create animal models of diseases, including prostate cancer. The term “transgenic” is intended to encompass genetically modified animals having an exogenous CA gene(s) that is stably transmitted in the host cells where the gene(s) may be altered in sequence to produce a modified protein, or having an exogenous CA LTR promoter operably linked to a reporter gene. Transgenic animals may be made through a nucleic acid construct randomly integrated into the genome. Vectors for stable integration include plasmids, retroviruses and other animal viruses, YACs, and the like. Of interest are transgenic mammals, e.g. cows, pigs, goats, horses, etc., and particularly rodents, e.g. rats, mice, etc.

[0367] The modified cells or animals are useful in the study of CA gene function and regulation. For example, a series of small deletions and/or substitutions may be made in the CA genes to determine the role of different genes in tumorigenesis. Specific constructs of interest include, but are not limited to, antisense constructs to block CA gene expression, expression of dominant negative CA gene mutations, and over-expression of a CA gene. Expression of a CA gene or variants thereof in cells or tissues where it is not normally expressed or at abnormal times of development is provided. In addition, by providing expression of proteins derived from CA in cells in which it is otherwise not normally produced, changes in cellular behavior can be induced.

[0368] DNA constructs for random integration need not include regions of homology to mediate recombination. Conveniently, markers for positive and negative selection are included. For various techniques for transfecting mammalian cells, see Keown et al., Methods in Enzymology 185:527-537 (1990).

[0369] For embryonic stem (ES) cells, an ES cell line is employed, or embryonic cells are obtained freshly from a host, e.g. mouse, rat, guinea pig, etc. Such cells are grown on an appropriate fibroblast-feeder layer or grown in the presence of appropriate growth factors, such as leukemia inhibiting factor (LIF). When ES cells are transformed, they may be used to produce transgenic animals. After transformation, the cells are plated onto a feeder layer in an appropriate medium. Cells containing the construct may be detected by employing a selective medium. After sufficient time for colonies to grow, they are picked and analyzed for the occurrence of integration of the construct. Those colonies that are positive may then be used for embryo manipulation and blastocyst injection. Blastocysts are obtained from 4 to 6 week old superovulated females. The ES cells are trypsinized, and the modified cells are injected into the blastocoel of the blastocyst. After injection, the blastocysts are returned to each uterine horn of pseudopregnant females. Females are then allowed to go to term and the resulting chimeric animals screened for cells bearing the construct. By providing for a different phenotype of the blastocyst and the ES cells, chimeric progeny can be readily detected.

[0370] The chimeric animals are screened for the presence of the modified gene and males and females having the modification are mated to produce homozygous progeny. If the gene alterations cause lethality at some point in development, tissues or organs are maintained as allogeneic or congenic grafts or transplants, or in in vitro culture. The transgenic animals may be any non-human mammal, such as laboratory animals, domestic animals, etc. The transgenic animals are used in functional studies, drug screening, etc., e.g. to determine the effect of a candidate drug on prostate cancer, to test potential therapeutics or treatment regimens, etc.

### Example 13

### Diagnostic Imaging Using CA Specific Antibodies

[0371] The present invention encompasses the use of antibodies to CA polypeptides to accurately stage cancer patients at initial presentation and for early detection of metastatic spread of cancer. Radioimmunoscintigraphy using monoclonal antibodies specific for CA polypeptides can provide an additional cancer-specific diagnostic test. The monoclonal antibodies of the instant invention are used for histopathological diagnosis of carcinomas.

[0372] Subcutaneous human xenografts of cancer cells in nude mice is used to test whether a technetium-99m (^{99m}Tc)-labeled monoclonal antibody of the invention can successfully image the xenografted cancer by external gamma scintography as described for seminoma cells by Marks, et al., Brit. J. Urol. 75:225 (1995). Each monoclonal antibody specific for a CA polypeptide is purified from ascitic fluid of BALB/c mice bearing hybridoma tumors by affinity chromatography on protein A-Sepharose. Purified antibodies, including control monoclonal antibodies such as an avidin-specific monoclonal antibody (Skea, et al., J. Immunol. 151:3557 (1993)) are labeled with ^{99m}Tc following reduction, using the methods of Mather, et al., J. Nucl. Med. 31:692 (1990) and Zhang et al., Nucl. Med. Biol. 19:607 (1992). Nude mice bearing human cancer cells are injected intraperitoneally with 200-500 μCi of ^{99m}Tc-labeled antibody. Twenty-four hours after injection, images of the mice are obtained using a Siemens ZLC3700 gamma camera equipped with a 6 mm pinhole collimator set approximately 8 cm from the animal. To determine monoclonal antibody biodistribution following imaging, the normal organs and tumors are removed, weighed, and the radioactivity of the tissues and a sample of the injectate are measured. Additionally, CA-specific antibodies conjugated to antitumor compounds are used for cancer-specific chemotherapy.

### Example 14

### Immunohistochemical Methods

[0373] Frozen tissue samples from cancer patients are embedded in an optimum cutting temperature (OCT) compound and quick-frozen in isopentane with dry ice. Cryosections are cut with a Leica 3050 CM mictrotome at thickness of 5 μm and thaw-mounted on vectabound-coated slides. The sections are fixed with ethanol at −20° C. and allowed to air dry overnight at room temperature. The fixed sections are stored at −80° C. until use. For immunohistochemistry, the tissue sections are retrieved and first incubated in blocking buffer (PBS, 5% normal goat serum, 0.1% Tween 20) for 30 minutes at room temperature, and then incubated with the CA protein-specific monoclonal antibody and control monoclonal antibodies diluted in blocking buffer (1 μg/ml) for 120 minutes. The sections are then washed three times with the blocking buffer. The bound monoclonal antibodies are detected with a goat anti-mouse IgG+IgM (H+L) F(ab′)²-peroxidase conjugates and the peroxidase substrate diaminobenzidine (1 mg/ml, Sigma Catalog No. D 5637) in 0.1 M sodium acetate buffer pH 5.05 and 0.003% hydrogen peroxide (Sigma cat. No. H1009). The stained slides are counter-stained with hematoxylin and examined under Nikon microscope.

[0374] Monoclonal antibody against a CA protein (antigen) is used to test reactivity with various cell lines from different types of tissues. Cells from different established cell lines are removed from the growth surface without using proteases, packed and embedded in OCT compound. The cells are frozen and sectioned, then stained using a standard IHC protocol. The CellArray™ technology is described in WO 01/43869. Normal tissue (human) obtained by surgical resection are frozen and mounted. Cryosections are cut with a Leica 3050 CM mictrotome at thickness of 5 μm and thaw-mounted on vectabound-coated slides. The sections are fixed with ethanol at −20° C. and allowed to air dry overnight at room temperature. PolyMICA™ Detection kit is used to determine binding of a CA-specific monoclonal antibody to normal tissue. Primary monoclonal antibody is used at a final concentration of 1 μg/ml.

[0375] All publications and patent applications cited in this specification are herein incorporated by reference as if each individual publication or patent application were specifically and individually indicated to be incorporated by reference.

[0376] Although the foregoing invention has been described in some detail by way of illustration and example for purposes of clarity of understanding, it will be readily apparent to those of ordinary skill in the art in light of the teachings of this invention that certain changes and modifications may be made thereto without departing from the spirit or scope of the appended claims.

The application's sequence listing, which the Patent Office published only in electronic form, follows.

SEQUENCE LISTING (114 sequences)

SEQ ID NO: 1 - DNA, 170279 bp, Mus musculus
  misc_feature (1)...(170279): n = A,T,C or G
agctaatactttgctttgtccaagttttagtcaaacttaattctaagatattagatgttgcaccagcgtctgccttttttcccccctgcatcctcaacaagacaaatagccgataggcttttcagaaacattggtggaactagaaagtatccttattggagggattcatttcttttccttgctttgaaaaaaaaaaaaggttagaatttgtctcatgattataatgttgtacatctatgccttttgccatgtttatgtaatgatgtatatgtgtatgctctatctacctatctatctatctatctatctatctatctatctatctatctatctatcaatggaacatatatgccatctttcacttcttggagtacaaatatggtcctaggactcaatacatattaaatattgaggttcttgagagatccggaagtccccttttaagtttgtcttccactctacctgtccaggaccaggatttacttgttacaatggcatattctcatttctatacaacagaagagtgtgagtgtagtctgaccaggctaggctctttctgctgttggcttctgtcacagcaacatttgcctggtgaaggtagttcttgggcttgcttagaacttcactagaagaggggaagaaatgagaagatagaaaaatgcatcatataaatatatgaagatgtcagtgaacaaatgaggccctttcagtttcttcatctactgttgtcttattagcatagcatacaggcctcagaaggctcttgcattcccattattagtctcagtcgacattaccttataaactattccatcctgggtcccatccccatttccatccacagactaactggatgcactcaatgaaggccaaagaaaaagaaaagaaacactccctttgtgatatgtcctgttttcacccacacagagaagcaagagaacaaaatgtacagtgcagatcctctcagctaatcaagactgttctctctggtctagctgtacgcagagcacagtgactacacattcacctatgagggcacgccatcaggtttattcaaattctgatgatccctcttgaatttatgtagtgttcaccttttgtaactaagtttatttatttgaaaactgatatatttttgttacttaaacatactaattttatatttttcctgagataaaatggcatttatatagcaaaagatatatacattgtataagtactttcttacaaagatttgttcactaataatcgaatctgtattcgaaggtaaaactttgcagtggtcaaatctgtttaaatgaaaatgatgtaaatttgttaatctgattttacttcattagaaccactaggcttccagaaagaatgtaaacattcatatgtctttaaatacaagttttggcatataaactccaaatgctgctaccctctgtcaggcttgctgctggacaacagctgtacaggcaagcaagaaatcacagtcgctgtcagctcccacaatgcatagaggccctggtcgctgagcaggagtggcttgtccttttgaccatttggattaatcaccatagctgcaccaattgcaacgaacatggagatcaataagtaaccatcaaagagctctgaaataacaataacatttagattgtctgtgcagaataactaaaccaagacagagaatataagactattaattcttaaattttagccttccagaccaccctccaaattaattggtaatcagccttacattctgtccctcataccttaccttttaaaattataaatgagtacaaaaatgattataaagtgaatttttaaaactttagttggagttgttgaccataaagacagtgaatgataactgtaagtttctgagtacaagctctttcataattgagttgtgggggcaatgtttccttgaagttaaatgtatgttgtcttttagacattagattgaggatcatatattggactggactttgataatccaagactttaaggatcactgtgagtacccatgtgcagtaatattcccatcaatctatgttcataatctacattttaaaatcaccatgtgacctgctttattgtaaaccatccacttagagaagagctagaaataagtgaatcatctgctcttgtggtccctgtacttcactgacttgttaaatgtaacacagaaattccacagaacttatgggcaaagttttactatttcccccagtggagttcaattttttttttttttaactgtcaaactgggcagttttattttcctttacaacttagtaaatacttgatgactgcacgtggggtaaggctgctcggtggttcagaaagaccccagggacggtgttttcctgacagggtgtggtcttcagtagtgagtggaatgacatgtatgagtgacgtcactgtcagaccagcaagaccgcatttatgcacccatcgttctcaggattgttggtaacttgggcgtactttccccaaataaccttgcctccttgtgtcacaaggcccagctcgctcacattcacttcaataactgtacctttggtgatcacccccagggttgtatataatggggatgatggattctttttcacaccgagaataggcaggcaaaaggtagctttcagctcagggtgtgtgacatgggcttttttgaaacgtagacccataggcctaatgaatctttcatatttaggtggttttcttgtaaagccatcaccaacagagcagactttagtaaccgttctcttccatgccttctttttcctttttcctgttcgaataactttcaatacttctgtttccccttgggcacgaactttgggtagagggacctcccatttccccaccttttctttccgtttctgcttaatcatgttagaaaggacttttgctctcgactggccctctctgtccagcagataggcggagactgctccctgcggcgtcttctcttcatccttctgcttggggtttctcttctcatgcatcttaatagtctttttcatttgtattttctcagcatggcgctgtttatggtagagcttagccttcaggccaatcatttttttttgccttctttgaacgttcatgggcctcccaaccttctttctttctctttttctcatggtagtccaaacgatatccatatcgtttgcggtgcaattcaatatattcattttgtggcatgatgacagccgcggagcaccggtctgcgacctcccgggtctcaaaaaactcttaatttctggatgtcactggtccacgagcctgcctcattcagcccgggacgggaaagggtagtccttttcggagttcaaatttattaaactattattttagctctgtagctaacatctggctttcagcatgacactatcaatgaaaatttaacttgatgttaagaattctcttgtatgtagaaaaacttcagtgggaaaataaaaagagaatagatataaataatagaacatttcaggatcaaaattttaggaaaccccagaagattcattagtgtctgtcttcatgacaaagctatattctgtatatactctaatttttccagctcattagtaacattaataacattcctgttttgcatagctggaggagcttttagaatttctgcctaaggaactacctttaatattcataagatccaccagagtaccaaatttcatctggtcccagttgttacaaatatactaccatagatgagctgaaaatcagaggcaacaggaaacagacctggaaaaggcttcagtgtgcaaggtcagaagcttgtctataaaatgcaactttgcatataaatcaaaattatcttacccttgtaagagtatttgatttactcattttcctgtcagtttatccagctaaataatatcaaaagaagcaggaagccaaagttcctgagaactctgatagaaggctcaacagtctgtagtatttttttttttgcaagttaacctgagtttctgatgcataaccactgtacataaagataattttgaacatttcttggatgtttataaagttctcaatcctatatattcatgtatcatatttattgactttcatctcaactaagggcttattttcagcctgtctttctcacatatctggtaatcttttgagatgctgtttgtcatggtttcgggactacagactggttctagtaacagctttgtgaagaggcttgagatgctattaaacatcttggtataatacacagagcatcctcatatcaaagaataattcaactgcatgtgtaatggcacagaaatagagacatttctagtccacaaaataaataactatttgatgggagtgtttaatctaatttggagggaagaaaagctttacataagaggtgcaggctttaattttagcacttgggaggcagaggcaggtggacttctatgagttctaggacagccagggctacagagaaagcctatctcaaaaacaaacaaacaaagaatagagtagacttatctaaagtcacacagctaagtaattgatggcaccaggtttacctttcaaacttagcttttgttgccttaaaactcaagtgacttttatatactctagtacagtttccagagaaaaattggtaactatgagtaaattctgtgtttcaatggaaatactatcttattctgtatatcagccatactatcaggctcctattttctgaaagcttaaacagcagctactcatacctgagtggctttagattccctctttaggatgtcatttcatctactggatcagtaactacaacacagaatgattgcttggttgttcttgctgcattacttaaaatgagttaaaaacaaacaatcaaatgaacaccccagaagacattatttctgtctccatttctgtggaagttctatatgaataccaaatgtgtgtgtgtgtgtgtgtgtgtgtgtgttttcatgagtgtttataaacagatttgtcagactagctgtactgttggcatcagaaaacatgcccaactgatctgactatgtaacaaggcccctcttgccttaaaacagcttcgtaagactgggatatgtatttgcactgagggatccccggggcaaggtatggaaaagctgtgactgcccctacctcctacttttaataagtttttaagcatagccatcctgtccatgtgaaactaatgaggtctgctttctctctttaggaattttgtcttcctatgaagaaactttttcatccttctacttgcctagatttcagtatatccacgattgctacccatttatgataaagatccttcaggaaagattctgatacactcaaattaagttgaacgtgatggatcagagtgagatgtagtataagtacactcttctgatctctaatggggagcacctgagccactttctagcaggtcaagaagcatgtgacaggaagcttaggtcatttgtggaaagcacctggcacactgctggcacactttaagaggtgccaagtagacatgggctacttttgtcctcctttctttcttttcatcaacctttcccacttcattccttcctctttttctctttcagtcctctcagtatactttcaaaagtatgacatgagagtgaatattactcatctatactaaagaacagctctccctaaaataccagtcaaccctgcagatgaatgtgcaactattaagtgctagggcagacaaaggctgcttagctccacattgcattctgctctttcattattactgactgatcacactgtggctaggactgagagtgtgggacaagctactcaatgctctgccctgaaaagcatcccaagccacctgtgttattaccaatctgccaagcaacttaatttgaaaattaataaaccattatttctcaagttcttcctctgcagtatgtgatattagttagctttacatgagcatgtcataaggattaaaagaggcaaactacactgtaatttactcaagacatatggtaaatatctaatgaatggaagttattataatattatatgatgatatgactggtatttgaatatcttaaagagaaaaatcagcatatcttggaatcaccctttttgtttatcctaatctgttggtttcttttgaggttctcatttagagcttcagtcagaatcttacctatatctgaatgtatttcctgatatattttcacatttgtatcaggcatgtatatagatataaattctgtatatcatttcttaattatttcacttggacttgtctaatttgctgaaatctgtccaaacaagtttggactgtgatgttttacgataaaaatctagggtggatatatactcttagaacggattatactgcttacagaacatttatcaaagatatataacccttgtggcttcttggtctgtaggtttctgcttttccatcttattgaacagctgtgtaagttttgacttcatgagactaatacgaggagaaaggggttgtgagagaataggaatgcatggtgggagatttgattagaagtaatctttcacactgatggggctgaaggtttgggaccacatctgagtttgaatccactaatgtgaacatgtacttcaatgcttcattacctagaaatggcataataggcatagtagtataggcacagttattgagtgaatggttcctggaaactgcaaggacttttcactgtccttgctagaggaagcagcgtgagatcccctgcagtcgtgcagcttggccagtttgatgggctctgaaacttaattcttcagttagtgtcacgtgatggtgaaaacaaggaagaactgataacaaatttgtttcagaatctgtgtatcatatgtgatgggtcacactagcatttacaaacaaaggtgagggtggggaaaggataaatcaagttcagtcacagggatgtgaaaagtcaaccgtgagaaccaagtttcaatcttgtcatactggagagagaaaaacacacaaggagagtacttgaaaatgataagtcagaagacatagaaactttcctgtagtgtctatctgtaacaacttcatctttgtgttattttttctttttaaatcaaatttggctactaaaaattaaatgtctttacagctatttcaaggtaaggaaaaagctggtgtagatacaggaactagagctataaagcctcttggccacaagattcattaatttaaatttattttcttatcttagaagtattatgaactatatattttacttgtgtcataatttgatgcccacaagtcaaaaattagataattcacaagtaaatacccttgcttttttttgtttgttttggtttttcaattttgtattagatattttcttcatttacatttcaaatgctacggtgaggcaagaatcaggcctcaaaactttcaaactctaattttggaacagtcagccctaaatgggatatctctatcaaatctatcaaacagtcagccctaaatgggatctatcaaatccctgccttcgggggtcagggaacccttcagaagaggcagaaagagtctaaaccagagaagatggagaaaatcatgaagacaaggccctctaaatcaacatggtcatagcccatatgaacgtagacactgaggaagcatgcatggagccgttatgacaccagatcctctgtgtgtatattatagtttccagtttagcattatttgtgggattactgagtgttcgaacaagtcactctctttcttatgcccctgtttcttatgggctctgtttcttttctctctctctctctttttttttaattaggtattttcctcatttacatttccaatgctatcccaaaagtcccccatcccctccctcccatcccctccccccctcccactttttggccctggcgttcccctgtactggggcatataaagtttgcaagtccaatgggcctctctttccagtgatggccgactaggccatcttttgatacatatgcagctagagtcaagagctccggggtactggttagttcattgttgttccacctatagggttgcagatccctttagctccttgggtattgtctctagctcctccattgggctctgtttcttatgggctcctttctgattgttttgtccaagtctaatgtgtttttaacttttattttattttattttattattatcctttagaagcctgtttgtttcctaatgatggatagaaagggagcgatccagatgacactggagatgggaaggaactaagaggaatggagggagggtaaatagtaatcaggatatattatatgaaaaaaaatgctttctttatgtgtttgtttgattttggtttttcaagacgtagtttctttgtgttgccatggttgtcctggaatttgctctgtagaccagactggcctcgaactcagagatctgcttgcctatgactcctgagtgttgagttctgggattgaaaatgtgcgtcaccactgccgggatagaaagaacgttcaattttcaataaagaaaaaaaaatttcaactctattttaacttgctttggcaaaacagggtttagatatttaagtgttgactctttacaacccagcagggttttgtgttggacacacatttctcacaccaaaaaccttggaaggaaggtgcacagcttgggaaacttccaaagcctccagggagctaaagactcaggtttttctctctgtgagcttgagtgactaggacacttttgcttcagtgactcagaggcccttttagtgtctcagtcaagatattttgcttagcagactagggaaaggaaaggagggtcatttagtttagactgtccacctgttgttttttagcacacacacatgaaataccacactgcacactgagcagggcccggaggtaaagggccctctttgctctctttgtccttgaggactttggctgtaattatgacacagcagggcattgtgacatatatgtacgacacacatgtacctcataagggaaagtagtagcttccctttccttggtaggacctttgctgtaattatgacatatcagggaattgtgacatatgtgtatgacacacatatacctcataggtatttgtgccactatggctactctagagccttcagtcaacagagcttaggtcttgtccagctcttgaagggcttactgaggtggacacctcagagtactgtggaacttgctgcttcctgagtgttctttgatacaaaagagccacattttcatctccttttcaaaatggatcttgaaaagttaactgtaactaagccaggagctaaggagacaggagaaagagggagtgaaagagaagaaaaacgaggagagaggagtgaaagggaaagaggaaggggaagaaaagaggaagaaagagaggaaagaggagagcgaaatgaaggagaaagagatgaaggtggaggaggaagaggaagagatgaagaggaaagagatgaaggcaggggaggaatgggaagaaaagagagaggaacagaaggaggagaaagagataaaggagaaagaggagaagaggaagggggagaggaagagggagagggaaagggagaaggaagagaaaggttccaggaagccaaggagatcagtgagtggtctttatttccacgaaagaagggttctaagtcccgcagattggccacggtttacccgggcccagggtcgggcccgcagtctgagccggtgttgctgtggctgcctgaaggtaggcacgcggggggctctggagggcgggcgctaaggccgagggccagggaaaaggtggcgccggcgggcgggcgggcgggcgcggggcgcgctggaggaaggagcgcaaggagcgcgcggggcgggcgcgggcgcggggcgtggagagcagcgactgtgaggctgggctaggcagcgctggctttaacctgggcggcggaggcgtggggaagaaggctgaggaaggggaggtgtgtgggacccgagtgggtggggggaattggaagcaaatgacatcacctcaggtctgagtaaaagggacgagccaaaagcattgacctggtcctggatatccagatgtcgagtccaacctgaacttagccggacacagacctcattgcctcacggagacatcatgcagaagtcgcctttggagaaagccagctttatctccaaactcttcttcaggtgagagggtactcagcggatctttgcacggacacatgtgcctatgcaggagaagggaatgaatatgggcagactttgggaaaacaggaagagatttttgttgtgtttgttttgttttaaaaggtgtgttgtcattcagtgctttaaaggaaataagcatttttgtacaataaaatgaagctgattgaatagagaacaaaatatacttgcaactgtgaatcagacttgcaacagccaaatatgctacggagcaatagatatatatttttttaatttcctgaaaaaagttatacttcataagtgtacttaatagaacattcctaagattggtctgttattttctccaagaaaagctgaccgcaagtgcagtgcctgtgtaataggtgctctgaaaacatttgttgactgaatttttttaaaagtccaggaattatattgtatttactttttgccgttgtaatattgagtaagtctaacatgctcatcacagttacattattctttttaaaaatgagcaagtcagttaaaatatctaactttaaaaagaaataatataagcaatgcattaaaaaagtgagttaccatggggatatgaaactagagttttagccactgaagctatattcaattgacaattaggacattgttctcttatcctacattgtcaaaaaaccaaaccctcaatctaataggatttttaaattagaatttaagttggaagacctaggcaagaattaagcgctttgtatttgaagtgctccgtggagcttcgtctgctctgatcctgtagtgtgaatgaatgaaaagagcagcgctcatgggtcctcagctgactcaccccccccccccacacacacaccaatgagtcagcacactgaagtatcataagtgtcgaatatgttctcaacctgccctatgctgtgggtagggggcaaggctcagccttagtcttcctgatgttcctttttcagccggtctagagctcaaggctgaggaaagacaagtgcttctgcaggagagctccccccggtggttgggagagaaggaagggctttcttctttagaatgaatatttgtggtgccttttgttacttcatctataaatctagcttatcggtctggatctattttcttattacttacaaaatcagaatgtcacttgacatacatgtgaggcttttatgaaagcctattgaggaacctaaatgtcaatgtgtctgtaaaggcaagttttcaggagaatgaatatctcttgtgtggttttcccactaagtagtaagaaacttcaaaatttttcacttatcaaagtgtttcaaaaatttcccgtttttataacccacctaataaattgtagtgtgctttacaaatgttcttaggctgatttggaaaggaaatgtattataatggctgtgaaatttgttaagaacatactcatttctgccctccaaatgatttcataatcagttgctttaagaataggtgtgtttttaagagtttagttcctactatttataggaactgacatttagctaagtactagtcagtgattataaacttccttctggactttaattttcaaagagtaaaacccttttctccactggactaggcagtgccgcctagtgaccagggcagtgggccctggattcccatggcctggactcaggctgcagatctactgcttagtaggcaagccctttggtgtctctgcatgacttcagtgctacaacttggagtctgtcagtgtgacacataatgtaatgggttagtctgttgaggaatatatgctgtgctttgaggacatgttagctgcccttactgttgtttacatgtttacattcctcgaagtgctgggatcctcactgtaaaggacagtgagtttatttctgctgggtgcacttttgtgactatagcctgtatctatgccatttgcttgagaagttagcataggggatagatagcctcacgtagcatgggcttgttagatacttagatgaaagccatgctcttacatcagatctccttcagtgccttagaatttaacctatcccatcaagcttagggttataaaagactcctaaaagctgacttctatgtgtctactattatggtcttggttttggattatattaattaacattttaattatttagattatgttactgagaaaccaaaacaagtttaataataatttaagtactttttatttttttaagttttcagtaagtaaaaaaatggaaagacattggaattggtctaacacagaagataattttaccatgaaaatttcaagtaattttttttactttcatggaaaataaatgcattaacttgaaggtgtaatgataacatttatgaaataagttgtttcaaaacaagtggtgatatatttatacagaatttatgattgacatattagtggaattaattcctaaaaacctttgatttgtagaaatgtttgaactttacactttcatagagatttaagaaaaaagattatgcctaacgtgtacctgttagtgtgtgtgtgtgtgtgtatgtgcgcgtatgcatgtttgtatgaccatagagtgcagtataagctatcatctcttgagtcatgtctctcattggcctgaatctcaccagttatgttagacagacttgccagtgaacccaagggctttccctgactctaccttctcagcactgggattacaatcttgtgtcactctgcccgccttttcacctaggagcttgggattgagctcggttcttcattcatgtgaagttcttctctgactgggttatgaacagtcccaagaaattgggtagcaacatttccattctgtttgtgatccatattacagagattatacttgacaaaacttaggttatccaaatctgaaggccacttttgatatactgaggatatggtatttagaaaaccaagaattgctgtcccttcagttgatggatgtcatacagtggccacagctccagatttcatttggcttttctttaatagaaatgggaagaagccacatctaggatggagagaccctctgtttggacagtgtacaagcactgcccgatactggctctgtgccagcaacttaggactcccttctgtttattttcttttcactgataatgtttggttgttacacagctcagaaatttcaacttgggatttatgttaggttcatgtcagttttgtttagtttaatcaacagttctaagagcacctcttgtacaggacatgatgaaatcatgattttgtgtatgtgcatatatatgtgtataataaatatctctatacagtgaaatttattttagttgatatcacaattattaaaatttattttaaggttttatagcacattactacacaatatattttgatagtcaattcctcagagcagaggaagctattatcttaaaaataacttcttcaacattttgtttgatatacgatgaaatactactcagtgcacactgatatacaagggaaatcaaggctttttgttttctttatggaagtttgacttaactgtgataattcctaagtgttaaaacatgtttaagaggtccacaaataaatatcaccataaagtatgttattactgttaatgccctttcataggaacctgtaatttcactgcggtagcactatagataagtataggattgccaaaccataagggaagggcggtaaccatttagcatgcagtgagatattatttgttgagactttaaaaacacatctgagtcagcagagtttgggccgttttgatttgctcttcaccatgcatcttgtgcatttcctcagagccaagtctgcaaagcagtgagtataagaggcgaaaactatgaaagaggtccacttatttggagatactaacagagggatttcataaatacatttttcatcatcagtaagggaaacattttaatggcttcccttcagctcttaagaatggaatggatgcaccatgtagggttttctttgtaaaatcagcattacaaagtggcctcttcatggacttgattgtcagagaacttaggcttttagcaagaatactctagtagttcagatgaggcttgtcaaaatgtcaatttcagtataagccattaattaattatcttttgacattaatgactatttgaaattgtaaactacttttgtgtttagtattcacatcatttcatgactccaggattacatgattataatacctgtttcttgttgaaattgtctcacaatgctaaacatcatctatatgcagtatacatacatactctaccctcaaaataatgggacaatcattttgatacaatgggtgaggggaaacaactgttgacacattttttaatagagtaagtattccttcacattttccttgtgatgtttatcatataaactcttcagaaggcagtctactttatgactccttgttctagggcagtagttctcaacctgtgtgtttcaagggttaaatgacccttacacatgtgttgcatataagctatcctacatatcagctcttcaccatacaatgaataacaatagaagaattagactcatgaagtagcaacaaaaattatcttataatttggattcaccataacatgagaaactgtattaaagagttccagcaatagaaaggttgaggaccactgcgctagggtaagggaatggtttggagatttttgaagtctttagcattgttagacttcttagcttggaagatattctcttgatatcataagattagctgtcctccccacccaagtcaaaggggtatttccccagtatttcctgtaggtcatgatgactcagagcaatgtttggagggcaatttcattcactcccttttcaccaccaccgtactccatgcttggcattaaggtggtagaggcgctgccctctgaatgaatgaataccttaaaactgatgatctcaagccacagagatccctaacccatactcgtggctgtctagcaaggtttgatagagaagtgttgtataggaattgcaagaacaagtgagagaacagcagtggttcagagaaggtctggagtctgtcctgaaagcatgggacagaacttgggggtagatctggaaactagcaagggctagacccctgggtaccttatatatttcttagggctttattgcactgctcatgaaatgaaaggtgggaaattttaagcaggcagagatgtgattatttcaagattgttggcgtttttttttttgtttttttgtttttttgttttttttaaagactgacagaagggatagagaaagatgcctgaaagatgtttgggaagcaaaataatcatatttttaaattagaggtggaaggtgagagtgaggaaaaaataagagggcttggatgggtcagtttgggtggtagaatggtaggtgatacatactatgaagtggggtccttctattagaggcagaggcctggtgtgaggttagatgcctatgcaagactgcagtctctaaaagaaagtgcaactggcttgaggtgggttatacagtttgaatgaattctttgtcttgtcaatactgtttttcaacaaataataattagtcagaactaatattttatttggtagtgctaggcaccaaacccagacccatgtctatattaaagcattctcctactaaactgcaccccagccccaagtaattacttcttagcagagaaattcctagcacttagttcagacagatttgccaactaagaactcacatttgcttttctactccattacacctgacatttaatagtcactgttttctttacataaaaatattggtctctccctctctctctgtctctctgtctctctgtctctgtctgtctgtctctctctctctttctctctctctctctctctctctctctcacacacacacaattaaaagccatcatggatcagtgtcagtgatcgagtaagacattaggtattcccataattcagtgcatcaagtacataattacaatgagacctaaaaaattattcactcttttaagagtttatagacctgttgaatttaagagtccgagatagcaatcccaatagcagggccaaggatttttgcaacagaatttgatgaaccagataggcactataagatgagttcattatggtgaggataataaccttgaaatataaatgtgactttttagtgatgtgttaattatttatttatgcaagcctgtgtatgcgcatttatttgtcattactagtgagcctctatacttaccaggtttctaacagttaacagtcttagactctatataagaatttattaaaaattctgtttattctgcctaaagtttcattgtattatttttaataacgcaacctttttttctttgtaataagatggctatcacattcatttataggttctgtaattatattacttagtttaattagactaggcattaattttgattcataaaatcattgactgtttaaagtagttgatatataataaaatattacagttaaaaatggactttcttgaaaacaaaaattattgaatatttaaaaaaattaatgaaatctttcacctgtgttgttagcaaaatgtaacttcatttagaaatgtgtaatgtgttagtagtcctttactcggccggcccatggattccctggagtatgaaactgctgacttgttggcacaggtgtcatcggagccttgagagccaggtgctttgctgccacagaaggggagcagaagcagtctcttgtggttcactctccttttgtcaccattgtgaccactgcttctgcagagtgacatcagacacagtccagtggacttacaactcattagtaaagcagtatgtcagggctctgcacttaatggaaacttgttcagggttagtggtgtggtaagatggaacccagctgtaagttgtaatattttattatgtatcaactactttacatagtcagtgattttataaatcaaaattaaaacaggatgaggagattcttgaaattagaaccttctacttcacaaacaacagccatttctatagcttttctttactctgacaaatactaagtatctatataggttctctgtggaatatagcacacacataaaatggaaaatatattaaatatgccaagtcctagatcccatgtgtacctgttaattaaatttatgggaaagaacaacttctatgatctcctttaacaaatgctaaggtaattcttctttttgctaacatctaaaatcatcaactcaacgataaaacaggtttggataacccaacaggtcttcattgggctaacatcctcctcctcctcctcctccccctcttcctcctcctcctcctcctcttcagtaaattaacaataaagacacaaaaataggtcaactcggaattctgtagttttgcctctatcttccagcccttattaagtacactcaagagattacatacattatctcagtgaagtttttaatctgtctttgataattgcacatataagaaatgtggttttaggggactgcagtttagcagccaccaagctaagagatgtgatgtcagatgtatctttagattggtgtaaatccagacataaaattttaatcaatacatcacacacctagaatagaattgatcaattatttcacatggctttatatatactttaatgttttttcttgggtctgaaataattttttactgcatttgtttatagacaacattaaacaggccatcagttagtcttcttggaagggcttgttgctttaacaacaacaaagaattactttattttatgtgtacagtagtttttccagcttgtttgtttgtgcacattctgccagtggaagccagaagagggtgctgaatagactggagttgcaggtagtggagagacatctgaagatgctgaaaactgaggtgagggcctctggaagagcagctcttaagcccatctcttctctgagccatctcttcagcccatttattcagtctgtttcttagcataggtctttatgacatccacaggaggcaggatggaactttcctaaaaataacaatatccttatagtttactttcagtattatttgaaaacaaaacaaaacaaaacaataaaaacagacaatatagcaggccagaaaacgtggcagtagctaaacattgtcacagtaacagctcagttacagtgagtgtgattccagctgtgcttcctgtcctgaataaggtagctaagtactaggcagtgccttttactcagccccactttcctactttccattttctctctaggataccaagctgggactttgagttttcacctcctaaccctacttcccttcactctctaagcacatcacagccatctttggcatctatgccagcattaccacccagtacttgttctcatcattcatgtcatctgatttttctattggtctttcttcttatccacctgctaaggttgcaggaagtggtagagacacctgatagatggttcttcaattttatacttgtcactttatatatacaaatttcagattttcttcatatggtagtatctatagttcttttagaaagtgcttttatcagtaagtcttcatggaatttaaatacttcatgaaatttctagtgtaaacatgtatgtatggcaataaaagaattgcttttccacaaacaaaaagatataaagtcccaaataaaagcaaaacatttatataatattttaagcattattttcttgattcccttttctgtgttttacacaattatatacttctgaaattgaattgtcttataattgatttttttcccaaacttctttctggccatcagatccaggaataaattattatcaacacataaaagttgcatatttcctgtatcctgtgacttcaagtgattttttttttttacttttggcattaatttcacccaacaatgttgacttttaactttgattgcttgatattccttgagaaagagtactttatgatccagttttggaagtatcaggtaatgtgtacttggatgcttgtctggcatgctaggcattgtaattacagtagacattcaccaagtttagtactctaccttaacttgaaattgtacacctgtcccagaggtgaaggggttctgaaggcagatttacactataaacctattcatagattctaaagggcaagagtgattcagaaaactaatttttacttgagtatgaaaatggcttaggctaaaactttaattatggttccaaaagtaataagtacttatataaatgattatataattttaatttctaaaaacagtatgtcatgtacattttgacagtggaagtgttggtttaatagtgaatctcataatcagtgtcaccttagaatgaacataaccactttattttaaaaacatgataatgtcacctatggtttgtcacttatcacttcctaggggttttgttgccctgggttatgctgtgatcttgtgtcaacaggtgtactgcaggcatgctaggctgttaactgagtttggctcatatgtcctatagggacatgctcacttatgcactgtagagataacagtaaatatcacagtaagtttcaatattcaccaaaaaagaaatgtccggtgaagttttcctatttgtaggactattatgggactaaaattatcatatatttaagaatatgtaattttttattccttttattcctaaaaaaaaaaatgaaaccaactcagtcactttaaaagatatacatttcagatcaaaattttgtggggtgtgtctggagagtggcagatattaggattcaagatttcaaagacattgaaggtagattatgcttatcttgattgtgcctggcaatttttgagtcccatgcttcatctccccatgcttttagaaaagtctcacatttagcttctctgtcagttcttaggaaccagcgtgtagcggaagaaatgtgcactttggaatcaggcttagctggagtcctcattctgtgacttattaacgtgtgttcttaggcacttaatctttctgatactcaattattctcactgggataatgagttactttcatttcaacctggcctaagaatataataatattcaatattctctgagtacttactctgtatattagagttctcctgagaataagaatcaatagtaaatctatttaatatataagattatttataaagaattagcttccgtgactaagaaaactgtcaagttcaatacttgcagggttgttttcaaagtggagactgggaaagctaatattcaggtttgagttcaaaagcagtcgccaggagttcggtgtcatttggggaggctggtctttttttttgtcagactcatgttttcagtggattagggaagacagcttacattagagagcatgtagtggtgcacagacatctggcttcccttgtgatttccggaacagaattaacacaaataatagaacaatccataacaggagctcaacctgctctaacctaaatgctctcatttaatgttagtctgacctccaagtatcttatcaattgccatagccatcacccctgtgaggactttctgtgtcttcagtgataagtagtgcaagatacagaatgcctctttaataagtaaatggtaacagtcttatgaacactaaggcacttaacacctttccagtgtgtaacagactagctcgctctttcctacatctaacattcctctcctagaaagtaggcacaacatgtcactgaattataattctctttcccaaaatcccttgcccagtctacaagttttgtttaccatagactttcatcctcaattgtgtgtgtgtgtgttcattgctgggtttgaactcctgggtaaatgcagcatactaagcaaatgctctgaggcactgagttacacttccaaccctcatcttaaattttaagtttattttaagcattcaggctactctttttgctccgacatatttcctttctgtttggggcccatgtgtttgcagaggctgctatcacatagtatataaactgaatggattagacactcaaaatttatcgttatagttctaaatgctacaaggctgacatcaaggtgttagttaattgttttttcccaagggatgtgagtgagaatctattctgtgctttctggcctagcgtttgtcagcatgctggtggggatccttagcattttgagatctgtagaggtatcacctccagaggcacccttttcacagatttctccttgtatcttcagataaatgtccaaaatcaattcctttgtaaggaaaacagtcatgttgtctggaacctactaaatgtgtttactccacatgttttgagggtcataggttagagggggtgggtgggtggatgagcaccttcatagaagcagggggaggaggatgggatagggggtttccagcagggaaaccaggaaaggggctaacatttaaaatgtaaataaataatatatccaataaaaaagtaaatacatatatatccttaaaaatatggagacactacagaggacactgtaagacgggataagggaactatctagggagtagttcatgaatctttagtatatctttagtatatctgtactaaaacattaatgaagatcaaatattgagaaggtttagataatgaaaaatatttcataaaattttattcaacaaaattaaataaattcttggttgaatatttagtattgtgggccattaatgatatgtaaaatgaacatgttatctctgaccaagtacaaatcctcaatgtttacattacattcttgtagagttggtttttcttttctcctttcggtgccttgaccagaagtaatgaataagcaaaacgtccttgcaatcagtgtccttagggtgccataaacatactatgtttgtggaattaattactaacagatcaattcaccaagtttctaatttgctcagtgcaatgaacaggacaatgaacataggaagataaattatacactatgttgtccttatgaatttaatcttgtgaggaaaaataagcagagtgaaatatcttaacttttaaattcaacaatttaaaatattaagtgagaattatgtgccatgttcagtggacagtgcagagtagacagtgcagcttaaacagagctctttatgcaatgtggtatacagtttagtgtacttggggacccgtggttgataaagggaggaatagagaaaggcggggtagggtaggacagtgtacacaggagactgattaaccagactggagagagagaggctcttcctgaccaatatcaatgcactaaaccttcttagaaatagaagtcaggctttgtttcaaggaagctatcagtttttattcagtgtaactcagcaaaatcagagattagcttgctcagtgatggtgataggaaaatctttttaaatattaagagccaccctattatcagtgttttcatccagttgaactcctgcagagttcaaaagctggagagtctggctcaatgtttcctttaaagttcattttcttaaaacctaaatggaaacaaaagatcatgacatcttgaggaaaaaaggaaaacaaaacctttaaatagttataaaaataatttttattaatctaccatggtttgtgttaggagctatccttttaagtacctgattgctaagatggctaacttgatctcttaaattgcttattagaaacaatgaattaatcactattatttatatatgttatagtcttgaaaaaatcagcaattttaatttttgacagatcttaaaaggtttgtattaacatgcattgctatgcttaaatgaacataaaaatattaagtagagacttaaagtaaggccttggagtagttttctttcatggcaaatcctggactaatctggtcaacaactccattccctgctgaatctcaattttccaaaggaatacgtggtgagaaagggtgaggacgagcctctgttttcctctcctgcagctctggggagcttcagtgtttgttcttagtgatgccaaggtttttggacaatgcaaatagaaatactttgcctcccaaattcaggaacaggatatgaaccttatagtccgagtcatgaactgtgcctacttacatcctcctcagcactaaaagggaaaaggcataaagatttgaaacttccatttcaatttgttgcataatagaaggtaaaaaggattaaaatgacattaataaacaaatttcatatttaactgggaggtaggaaaatatccacagatgagaagcccaaatcaaatgccacaccactcttctaatcccactggggattcacagtgggtatcagtgccttaaaagtggcatcatacttaaacaaacttggggaagaggaggttaagacaatgaggaaaatttcagactgacttatcagactagttgattgcatggagaactatggaaactatgtttaccacaaactgaagtttaaccttgtcttcctggtaccaaattacttcttctagaaaacattaacattcttattgtgtatacatggaatgtgttttgattaaatcctcctcctatctctttccctctcatatatcctcttcttcctactacttttgcctcccaacttcatgtgctcttatttatttaaatttaatacccactgaagccattcagtactgccttatatgactatatgtgcatggagaccatctactaaacatacgtatccagcctttcaggaatgggcatccctgaatactgattctcccttccccagcagctacggattcccaataacttctcagatagagctaagacttcatgagtcccttcccagtccatgctggggttttgactggcttaatcctgttactattttcatttaaaaaatgatatagatgcctctaatctctgctgtatcattttatctgccaagcaaatctatcaaatgagaaaatgatctcaaatgatgtgggcagatgcattttaaaattacatttgtgtctttgtgtgtgtgtgtgcacatatacacatgcacacacacactgctgtgtactaatgtatggaggtcagaggacaacttgtaagtcagtcctctctttctaccatatagtttctatgtgttgagcttaggtcatcaaacttgacaccaactacctcctaagccatctgctggtcctggaatatatagaagtcattttgatgtaatgaatgacaaacatctatcaaaagacaaaaagaacttctttgtacacatagtgaggagctattaaatgatttagatattgaagatcacgagaagttgtactttgtgttttatgtgccatggctcatgccagatgatatctgtaggaatctaccacctgtccagaacctcatagaagttctttgtctctaagaaataattatgttctttatacatttggggaaaaccttggagagtcaagtaggtatgcttccaaatatttagtcactgtcagaatgacagtcatggctcagtaaaggacatgcttatttccgtgataaatgaaaagtattgaatttgggtctttgtgatgccatctgataaagcaaaatgaacaaagaaccacaataaaggatacaaagttctagagaaggggagaaaacactgaaataaatcgaataattatttttaaaaaagcagcaaggaaatgcgtatctcccatataggagatgtcatgaatgccacttgtgcacagtcaagtctttcagttgcctagtcagaagccgggaggagcttatgcccatcttccactttcacacttccgtgaggatgcggtgagagtgcttctgacctctgtgttccaggagatgattcaacactgcacagagggtcagttccctgatagcacagaggtttccatctgaaagcttgcacacatgcctgtccataactnnnnnnnnnnnnnnnnnnnnacatatacacatgcacacacacactgctgtgtactaatgtatggaggtcagaggacaacttgtaagtcagtcctctctttctaccatatagtttctatgtgttgagcttaggtcatcaaacttgacaccaactacttcctaagccatcggctggtcctggaatatatagaagtcattttgatgtaatgaatgacaaacatctatcaaaagacaaaaagaacttctttgtacacatagtgaggagctattaaatgatttagatattgaagatcacgagaagttgtactttgtgttttatgtgccatggctcatgccagatgatatctgtaggaatctaccacctgtccagaacctcatagaagttctttgtctctaagagataattatgttctttatacatttggggaaaaaccttggagagtcaagtaggtatgcttccaaatatttagtcactgtcagaatgacagtcatggctcagtaaaggacatgcttattgcacacatgcctgtccataactcaggagcattgctacggtaaaactgcaacaccaggctgtttcctgtcttccttgttcttttggtttcaattatatttcttattgatgatgaaaatatcgctcagtaatttgaaagccattgtttcctcagaagtctcctaaaaggaaactcgcatgtaggaaataagcagcttcatggggcaattactactattttcttggatttggtgtaggtacagtgatatctgtagcttcacagaaaggcacttaggctgctttttcagaggacattggtacttgacagtaaatgacatcctttgtgtcttatgttacctcctaagatgagcaggattcctcccctcccttcccttcctctcccttcccctcctctcccctctgacctcccttcccacttcctctcccctcctctcccctcccctcccctccttttccctccccccttccctcctcttcccttccctttcctatttccttttctatttttttcttgtagctgttgcttgttgtctttagattttagaaatgctcgtgtcctctcactgccaacaaacacttcttcatttctatacaatataatatcacaatgccattttttcccctcagaattcatagtagttccaaaatctaagtttctggctttgagagaccggaaataaacaatgtataacattcatgttaactgatcccatgagttttttacacactgtgatatcattgtcaggagccatcagaacaactgcgtatgtgaaaaggattagagtttgaaaatcaccactggaaagtttcaccagttctacaagcatatctatctcacttagaaaacccttccagcaccaacattgatttctcaacccttcacactgcttttctaacttatagctttattgaggtagaatttacacatcaaacagtttacccatttacaatatacaaaataatgaattttaagcatatttataattttgttaaatatcacaaaataaatgtaggaacctttattcatacaaagaaagaaagaaagaaagaaggaaagaaaagaaagaaagaaaactattcagctttctcatgcctatctgcagatctgtttcaagggccttgtgtacttgaagcagatagagccacctgggaagagcctacactgagaaactggcttcatcagactggcccagaagcaaggtcattggttttatttatttatttatttatttatttatttatttatttattttttgtgtttttgtttgtttgtttgattaatgattcatgtggaagaagcaagcccactgtagacaatgccattcattagtaggtgaccttacaatatataagaaaggaaatcctataagccatagagaacaaacccataaacatactcctccttaggtcctctgcttcgattcctgtctttaggttgctgtttaagttagttactgccctgacttccattcatgataaattgtgatgcacaagtgtaagcttttcttcctcaagttgcttttggtcagtgtcttaacacagtagcagagaaacaagctctatattttgcctcccacttcttgttctaggcaactgttagtctacttctgcctttatcttgttgcttcataaaaatgaaacaattcagtgttttgtgactggtcttgttcaatggttcaaaaagttgacactattattacatggttcatcacttggtttagggatatatatgttgttaagtttttacttgacagttaatgttttttaaccatttgcctgttgtaaatgatactcatatgaatatcatttgggtattagtttttatgtagatgtatgtttttatcctttggggtatatacctaagagtggaatgggtaagtcatgctgtaaatttatgcttaatattttaaatatcttactgattattttccaaaatatatacacaaatttatattcctctagcagaacacagggttacaattttccatacatttgcaacgatttgtatgtttagtttgttgttattacagcgattctaatgggtataaaatggaatctagctgtagttttgaattgcattttcctactttgtaatgaccatttcatgtgcttactggtcatttatgtaatttctattttagataaatttttatccagctcatgtaattttaaattttggtttatgtctattactgagttagaagtcttttatatatctgatattaaaaccacttagcagatatttgacttgcagaaattatatagactatacactattttctttattgtatattttaaaggataagaagttttattcattttatccattttggttattgttgtttatgcttctggtattatatttaattatgtgctactttttcaaattagttatgaaatatggcaaattagacaaataagctttgatattacatgcctatttttaaattctaacttcacattaacaaattgcttaagcatcactagatccagtttcatatctataacatggatatgtaaggtctgtgcccagagctggtccagtgccacagtgctctgtacccaaatactgtcaggagagagctggtctcccaggagtgccaacacacatgtgaacacaggtaagaccaccacttttgattaaattcctggcccaaaagggtctcgcccagagccatcaggacacaggaaccaaggaacagctggggacaggatccttcagtttctgtctgtattctggagcttaccttgtgccacagctctccataaccaaattactccaggagggaactcccaggagtacagacacacaggtttgaaggagggacaagccacagtcagagacaggaaggccagctaacagcagagatatccagatggcaagaggcaagggcaagaacataagcaacagaaaccaaggctacttggcatcatcagaaaccagttctcccaccacagctatccctggatactccaacaaaccagaaaagtaggactctgaattaaaatcatatctcatgatgatgataagcgatgttaagaaggatataaataactctgtaaagaagtacaggggaaaacaggttaacagctagaagccttaaagaggaaacacaaaaattccttaaagaattacagaaaggccgggcgtggtggcgcacgcttttatcccagcactcgggaggcagaggcaggcggatttctgagttcgaggccagcttggtctacaaagtgagtgccaggacagccagggctacacacagagaaaccctgtctcgaaaaaccaaaaaaaaaaaaaaaaaaaaaaaagaattacagaaaaacacaaacaggtcaaggaattgaacaaaaccttccaggatctaaaaatggaaatagaaataataaagagatcacaaagggagaccagcctggagatagaaaacctaggaaaaagatcaggagttagatgcaagcatcaccaacagaacacaagagacagaaaagagaatctcaggtgcagaagataccagagaaaacattgacacaacagtcaaagaaaatgcaaaatataaaaatctaacccaaaacatccaggaaatccaggacacaatgagaagaacaaacctaagaataataggtgtagaagaaagtgaagaatcccaacttaagggccagtaaatatcttcaacaaaattatagaaggaaacttccctaacctaaaggaagagatacccataagcatacaagaagcctacagaactccaaatatattagatcagaaaagaaattcctcccatcacataatagtcaaaacaccaaatgcacaaaacaaagaaagaatattaaaagcagtaagggaaaaaggtcaagtaacatatacaggctgatctatcagaattacaccagacttctcaccagagactatgaaatctagaagattctgggcagatgttatacagagcctaagagaacgcaaatgccagcccaggttactatacccaacaaaactctcatttaccatagatggagaaaccaagatattccatgacaaaaataaacttacacaatctctctccacaaatccagtactataaagggtaatagatggaaaactccaacacaaggagggaaactacaccgtagaaaaagcatgaaagtaatcttctttcaacagatccaaaagaggatccacacaatcataaaaataatataaagaataacaggaagcaacaatcactattctttagtatctcttaacatcaatggactcagtttcccaataaaaagacatagaataacagactggatacatacacagaacccagcattttgctgcatacaggaaacccacatcagggacaaagacagaaattacctcagagtaaagggctgaaaccaattttccaagcaaatggtcccaagaaacaagctggagtagccattctaatattaaataagatcaactttcagcaaatagttatcaaaaagaataaggaaggacaccccatatgcatcaaaggaaaaatcaaccaagaagatctctccattctgaacatctatgctccaaatgcaagggcacccacattcataaaagaaactttgtactacagctcaaagtactcattgcaccccacacattaatagtgggagacttcaacaacctgctctcagcaatggacagatcatgggaacagaaactaaacagagacacagtgaaactaacagaagttatgaaccaaatggatctaacagatatctatagaacatttcaccctaaaacaaaagaatatactttcttctcagcacctcgtggtactgtctccaaaactgaccatataattggtcacaaaacaggcctcaacatatacaagaagagtgaaataatcctgtgcatcctatcagattttcaacagcaacaaaaataacagaaaacccacatccaaatggaatctgaatgttctagtcaatgataacttggtcaaggaagaagtaaagaaaaaaaattaaagactttttagagtgtaatgaaaatgaaggcacaacatacccaaacttatgggacacagtgaaagcagtgctaagagaaaaactcagcccccagtcccttttaaaagaaactggagagagcatacactagcggcttgacagcacacctgaaagctctagaacaaaaagaagcaaacacacccaagaggagtagacggcaggaaataatcaaactcagggctgaaatcaaccaagtagaaacaaaaagaactatacaaagaacaaaatcaggagctggttctttgaaaaaaaatcaacaatatagatgaactcttagccagactaaccagatgtcgcagagacagcatccaaattaacaaaatcagaaatgaaaagtgatataaaaaactgaaactgaggaaattaaaaaaaatcatcagatcctactacaaaagcctatattcaactatactggaaaatatggatgaaatggataattttctagagagatgctaaatacctaaattaaatcaggatcagataaaccatctaaatagtcccataacccctaaagaaatagaagcagccattaaaagtttctcaacagaaagaagcctaggaccagatgggtttagtgcagaattctatcagaccttcaaagaagacctaataacaatactcttcaaactgttccacaaaatagaaacagaaggaacactacccaattcattctatgaagccacagttatactcccttggagatggaatggtttctgtctaatcaggaaccggtcacaatttcataagactataaggacttcataagagattttttccatttttatcatatttaatgttacaaatagatttttttaagactggctgagtgcatattacttttagcttcagatgatatcgtgtatatttaagaggcattttgcaattatagattattttgatgacttaaaaatgtcaataccgagttgtaaatattaaaataaattcctacccccacagtgacacacctacttcaacaaggccatacccctagtcactgctcatctccttaattggcttatttggacaggtggctgagccttgtatttagcaattgtggagcagggacttccaccctcaatctctggcaacacatcatttcattattagaaatgagatgtcatcctataaaaaattagagttttcacaaagaaatggaatgaactaagctaaacagtcgggttaatatgtgcttgtttaaaaactaaaatactagcatttttcataataaaatctgaagcttttcatggttaagtgaacagaacagtatatcgaagatactaggttttttttttttcctgtgaatgttagtgaactcttaaaaatacacacgagtctgctaacttatagttgattagctagtttctgttagaagtagccaaaattttggagaccactatatttttgaggaataccattttataagtccattgagtatatacatggctgggtatgaatcaagatgcataaagtcacttggatatgaggtgaagagctatcagggataatggaaagacagaaaaggagatcctcaatgcattgcctcccgttgttccaagcgaaccaccgagactcatgaaatgcctgactgactataaattccttgcctgaacattactgaatttacacaagttcactgaatataatcagaatcactgaaaagaagaatggcttgaatttcatatcattattgcaaagtgtctaaaacttgaatgcctgtcttttaattttttaatttttttttacttttgttttatatttcttagactgacctgcagttgacagagagaactcactggtaggagacatttggtttgatttattggtttaatctcaagatataaaatctttctcgaagatgactctctggtgattgcatagagctaatagattttagtttttaaaaattctttttagacttataaagtatatgatgagtgttttgcctgtatgtaaatatgtgtactgcacatgcgcttggagccctcagaggtcaaaacaagacatctgatcccctggccctggagtcccagatgtgagtcaccatgtcggtgctgagaatcaaaccctggttctctgtaagagcagcaaatgctctaaaccactgatcatccctcctgtccctatattttagtttttataatttactttgaaccagtttcaacttgggagcataaatataggttcattttattgtaacttccaaaaagaaatgctaactaataataaaatacaggtggtgagctgtgtgatgtgtgggtatattatatcaccgaattttattttgccttcagtcgttgatctaaggttctcttgttaaaactagatgtcactgtataacataatatcttaaaaattctgagatagcaaagaaggtttttataaaagcatctcacacattgtgttactttgaaatgagctggaagctcatttatggggatggccactatattttatacatgagccaaaagaatcatagttatattttttcaaggggataagatgatttcaaatttgcctctaaatgctttttgaggcatgggtttggaggacagtaaaattctacttgcttaaaaggtgatgtgtccaagaaaatcaagaagaaggaagaccaacgcatgcatacttcattcctccttagggaacaaaatacccatggaaggagttaacagagacaatgtttggaactgaaacaaaaggatggaccatccagagactgcctcaccctgggatccatcccataatcagccaccaaacgcagacactattgcatatgccagcaagatttttgtggaaaagaccctgatatagctgtctcttgtgaggctataccagtttctggcaaatacagaagtggatgctcattgccatctattggatggaacacagggcccccaatggaggaactagagaaattacccaagagctgaaggggtctgcaaccctataggtgaacaacaatatgaactaaccagtacccccagagcttgtgtctctatctgcatatgtatcagaagatggcctagtcggccatcaatgggaaaagaggctccttggtcttgcaaactttatatgcctcagtatgggggaatgccagggccaagaagtgggagtgggtgggtagaggagcagggcagggggagggtataggggactttcatgatagcatttgaaatgtaaatgaagaatatatctaataaaaattgaaaaataacataaaatgtgatgtgtcattttaatattttcaaatctattgcgagcacaaggcttctggtaggtggaattcatctttaaactgtgttctaaggaccaccatccttcctgtcccatcccatcagccgtctgagatttccaatctcggccagtcgtcaacacacgtgaatctttctagctgaattgaactgtgaactagctgctaagcacagccgtttttaaatttcagattgtagaacctaaattatgatatggtaaacaaaggttaaagaggttgtcactttgcatttattttgtaccttgctgttatggtattaagggcatttgtgcttgctgtctctgaggaggtaggcatactactattttatgcaggttagtcctcttcccagttctcatctgtagtagctagaagctgatcatggaaagagtccttataaagcagtgactgctgaaggtcatgagtcaggtttgcttttgttttctggaaaggggtttattatttgtttacagatcacacccccaccctcagcctagtagttttcagttcccttactttaatctaagtttgtgtcttattttaatacaactcactctacctacttttgtaaagctgaacatggttaaatgaattcagaagaatgtgaagaaatctttgatgttagtaattcagaaaagttttgtgcctctgagtaccatttcctaaccctggtaataaagcaacagcccttttgtcctgtttgcctaacaggaacttaagatgcaaataaagtgctaatggtgtggaatttctttggcaattgctaaatagatactttaaaaaaattgtagtaaactcttgctttaagtttatggagaataatagcccaaatcacaacatcccacaaggccatcttccttttacctcctatacttattgccagnnnnnnnnnnnnnnnnnnnnnnnnnnnnnnnnnnnnnnnnnnnnnnnnnnnnnnnnnnnnnnnnnnnnnnnnnnnnnnnnnnnnnnnnnnnnnnnnnnnnnnnnnnnnnnnnnnnnnnnnnnnnnnnnnnnnnnnnnnnnnnnnnnnnnnnnnnnnnnnnnnnnnnnnnnnnnnnnnnnnnnnnnnnnnnnnnnnnnnnnnnnnnnnnnnnnnnnnnnnnnnnnnnnnnnnnnnnnnnnnnnnnnnnnnnnnnnnnnnnnnnnnnnnnnnnnccttcctttctttctttctttctttctttcttaattttttattagatattttcttcatttacatttcaaatgctatccccaaagtcccctataccctccccctgccctgctctccaacccacccactcttgcttcctggccctggaaatcccctgtactggggcatatgctcttcccaagaccaagggcctctcctcccattgatggctgactaggccatcctctgctacatatgcaactagagacatagctctagggggtactggttagttcatattgttgttccacctatagggttgcaaacccctttagctccttgggtactttctctagttccttcattaggggccctgtgttccatccaatagctgactgtgagcatccacttctgtatttgccaggcactggcatagcctcacaacggagagctatatcagggtcctgtcagcaaaaattcttaggcaaatggatcgatctggtggatatcatcctgagtgaggtaacctaatcacaaaagaacatacatgatatgcactcactgataatctggtattagcccagaaacctaggatattcaagatacaatttgcaaaacacgtgtagtaccctttcttagatgatgccactagaggcactacaccattgtggcaccattttcctcatgcatccagaccactttcataaatattcactactttttccctctcacaaaatgaccagtgaatcacagtgagctgtgaagatatctagttaacctttgtcaaagaaggcttttgttaaagtgtaagctttcaagttaaagggagaaagtgacacactaaaccatagtcaatcactaatgtcttagcaaggaatagataataagtttacttagtcttatggattgacctaaatttagattagccttaaaggcaacttacagaacaattaaggacatagggctggtgctagtgatcaagccagagatggaagtagtgtaaagaatatggacccttataagggagggaggagggtaatcatgaaggccacctggaacattgtgtcctagagaggtatcaaaatgttgacatttggcaagacatttctttgctctctcaaatgactttgatagtgtcttagttagggttttactgctgtgaacagacaccatgaccaaggcaagtcttataaaaaacaacatttaattggggctggcttacaggttcagaggttcagttcattatcatcaaggtgggagcatggcagtatccaggcagacttggcacagcaggagctgagagttctatgtcttcatctaaaggcgactagtggaagactgacttccaggcaactagggtgagaatcttaaacccacacccacagtgacacacctactccaaccaggtcacacctattccaactaggtcacacctccaaatggtgccacttcctggcccaagaatatacaaaccatcatagatagagtatgtttttctgttacatgtttatcttgcttctcagatactgacttttggtggtttagtgtgcatatttcttcttcttttttttttttttttacatcattaagaagtctcaataacgataaatcttagacatctctgagttacaaaaaggtgctgagggagaaaccagttttgtaaaccactaaatccagatgaatttcttccttaagcaaatacacaaaacttgacttgcagtaatcacacatgtctttaatctcagcactctagaggcagaaataggtggatctctatgagttcaaggtcagtatggtttacagagtgagttccaggacagctagggttacacagaaaatactgtctcaaaataacaaaaaatttaagctgagaaatatctcattcttttgaatttattttacaattttctcttgatatatgattgattttttttaaatataattctccttttcttctcagcctgtcttcctctcatatttttcaggcttcctctaatacacacacacacatacatacatacatacatacatacatacatacatttccaaaggctaatactttaatacttggtcaccagttggtgaagctctttggggaggattaagaggtgtggccgtgtgtgtgtgtgtgtgtgtgtgtgtgtgtgtgttagaatttctgatttttgtcattgtgaaggttatcctgcctgttgccttaatagttaaagcagcatgtttgagcaaatagggctaatctgcttatttcttccatcataaattatatattaaattcctaataaatatctacagtgtaaagagaacagatggtgatgattcatatttccaagcaatgatatagtgataattatatcagctaactggtataagctactcaatgtttatactcactttttaatttttttaaactttttaaaaattttattctttaatccttttttacagtccagtctttctctccctctcagtcttcccactgaccactccctgtcccctaccttccccttgtctccaagagaatgtcaccatcttccaccccaaacccaacccccagtccaccagacctccctggggcctcaagtctctagatactgctggtcttcccatggggccaccctactcctcaggttcctctagcttttccccaattcaaccacaggtttctccagcttccatatattggttgggtcctagtatctgcatccaactctttcaggtgcttgttgggcctttctgagggcagtcgtgctaggttcctgtctgcaagcacaccacagcatcagtaacagtgttatagctaacacattgctgaattgccatgggctacttttaggaaagactacactgtaatagatttcttgtctgttagaactaagcaatggcatcagtttagagatgttagtgtttatgtgggtatatcaactaagatatgaattactgcatttatgtaagttgtcttatttaactttcatctttttgtatgcatacagttggtataagaatcatgtctacattagagacccaaccaagtgaataaatctgtctgccctcttctcttttagctggaccacaccaattttgaggaaagggtacagacaccacttggagttgtcagacatataccaagccccttctgctgattcagctgaccacttgtctgaaaaactagaaaggtatgatcttatcattgactttactggcaaaagaaagatgtttttcatgtcttttaaagaacagaaagctggaatattagaggttccatttaaaagtgatgcatttaaataaaatcgtactcttgatgaatcttgatctactcaagaattaaacaatgaaacaatgaattaaagataataactttcttaagaaatggcctcttctacaaaaatagataatgcatagtctgagaatttctatctagtgttggaattgatgctttttttactctttgtcaagcattcttaacaatgaggtgcattcttagccttggccttttgatacaaaatatcattagtccaggataactctaaactcactatataaccaggatggcctcaaaacctcttcctttttgcattaacctcctaagaactaaaggcatataccaccaagtctggcttttttgaaaatatttttaagttgaagatttttataatgatggtggtctgagtgagaatggcccccataagcttatatattgaatacttggtactgagttggagaggctgtttgggaaggaatgggaagtcttgcctttaaggtttcaaaagcccatgctgttcccaattagctctctctctctctctctctctctctctctctctctctctctctctctctctctctctctctctctctcttatggttacatcttaagatatgagctctcagctgccccaggatcatgcctgcctactgctaaactccccaccatgatggtcatgaactctccctctgaaagtataagctcccaataaactaattcttctgtaagttgtctgagtcacagtgtcctggcacaatagtataaaagtaactaaaacaattatattagtcaaaatacataagccagttgaatattcttaaaatagtagtttcttttatgattattataagtaggagtagtttagctttgtgatattaaaacaaaatatatttggaatttttgagatgagaacttatgtattttttctttctaattttggtttattatattgataatttcatgcaagcatatatgtttttgtcaagtccatctttgattccagtctactcaatgcctatctgatcctccccgccccctcaccctcccagcttccatgtgctttttaaaaatcacagttagagctaccatatgcggataatataggaccatctactgggttgtgggttgcctctccagctgcatttctgaaaaccagctctccattaattactagtagctcctcaggtagtagtgggacttcataagcccctcccatccatgctgagattctcttgacatgattgtatacaggtcttgtacatgcagttgcagctgttatgagttcatatgtgctgtcatgttcagcacatactgtatttctgcatgtatccaataactttagctcttaaactcatcctacatccacttctatgatgatccctgaacatataggtatcttatttatagctgaggactccacagtcatgtcttcatatactgatcagttgtagacctcaaaattaattgctatctactgcaaaaagtagcttatctgatgaaggttgaggtatgcacaaatctgtaaatatagataacttaggcagcaggttaatactatgtctatttatcaggataatagtaataggttctcccctgggtaccaagcataactcctatcttgtgaagtgggccttcaatccaatcagaaaaaggttaattacgtgagttgacatcattcatgtctctgtgtcctactcatgggcatgtctttctgaagccagtcttcattatagatggcagtgtttatatgtaagcctgttactttttcctccagtcacatgcatagaattttcagcactatgaccaccggccactatgggtgaagcttactttttgctacctgattgatttttttttttttttttttttttacattttttggctcaagtatccaattacttgagcagtagggtgttcccatcaaactctggaagcttaccaaaaacattggcaatatgtaaagcctgtaatatttgggggattatgggatcccagtaaccaaaaactctagagagataatcactgcctggcactgggaatttttttattaatttactttatatcctgatcatagcttccccttcctcctcttctccctcctccctctcaacttaccccctctgttttctacaggatcctgtctgattagatttcccaataagattttttacttggattattgatgttttttcatttccagaatcattttagtttgaaattgtccaacaattctcttaattgaaggttattatcctatcttctaatgacttctttacttcattgatccctttattctttttaatacattcatgcctttttccagatgtttgaatatactcatactttattaggtgctattattgtaggattagtaatctgttgaggaaacatggtatcttgatttttcatgtttatttcctttctatgctgagacttgtacatctcaaatagttgttgagttccctccttctccttttcattcacatcactgcctttcactgaagtcatctacaatggccatgagagtactaggtctcagtagggttgagaatgccatttccatctgtggtgcttttagagggaatgtgggtctgagtagatggcctaagaaagggtagccagctttcctgctacctgtacaaagatacatagttgaggcatctggagcaaaatttatgtgagctgaatgtgtgaatgccattatacttcatggaaaccattatactttatgaatttgaatctttcacatttcaaccataatttctcatctcggccactctagaagaaaaaccgtaattatcttcagcttacagataaacacatcatggcttagagataatgtaatttgccaaccactgaatgatgaataattcagtcctggtgaatttatcatagttcccttttctgactattggttggggccattgtgattgtgagtgacagaagcctaatcaactaggttcatcaattaagaagaggacatttaatagctcacaaagcctaaagtatgtgagtgtctagatagatgactagcctgagggctcagtgggtccaatatatctgcactcaaatttctacttgtgatattttccctctgttggcttattttcttagattagttttctcctcaggttgacctctcagaactctatgcttatacctgtctgctccacagaagataataagcctcccttcccttcctttccccttccccttcccccttctctccttccctccttccctccttccctccatccttccttccttccttccttcctctctgctttttatttcatcaccaaatttatagaattatttagacttagttttatgtcccctattctgatagagtttttaaaatttatctattgtgttttaattcaaacgctgtctcagactggatacataagttctagtaagaaataaattctaacctatattgtctttgatacaattttgtatctctttatcttatttcttatatatttatgaaaaccactcctttacccacttggggagtgactgaagttctcagtctgtggctgagatccattgattgactcatctgcttcaattttgtgaccatgagattgaatctgcagtgtgaaaaccatgagcccactctgtgttcctaactaacttatgagctttgccagtctggaactcttttccctcattaagtttctttactgtgttgctggattaataccatctacttttattgataattgctctagagctacagatttttcaagtcctatgattaaaaataacagcttcttttcccctcaagtctatatgtcttccatttcatagctgacaattctttgctgttctcgtttccacttgtttatcattcatttatatatcaatgcctgaaatatggtttctcatcagactatgttcctcaaactgcatagatgagggataacagtgacctgttactgtcaaatgtgacactttttttttgtatttactatcctactgttattggtatcttcatcttgaaaccatttctttgatttatggacattctctcctctgcatttcctagatcattaaattataagtgaagtattgatgaaaatttttaacgagacctattgtgtggagattatactgctactatgtattttagtgccttattttttttattaaatttatttacttattccctttacaactcaatatcagcccttcctctcctcccagtaccccctgacacaagttctcctccattactcttctgaatgggaagcccccctttgggtgtccacccctccactctagcatatcaagtcactgtgggactaggtgactaggtatatcctctcccacttagactctctaaatattacagatggagaaactggctctctgtttgtgaataaagagtagaagagaaccataggttgactaggctttatagatcagctgccgttagcatgtttcttagggaagtcatggtccatgtagtgcgacttccaagcttttcattaatatcagttgtatgctcttcctatcaagtgagataggaccatatttagttatgctaacttaatgataatgagaatagccattaaagaaatccaaggcctttatctgatcattcagttctggtctgtggtttatggaattttttttcatctcaggataatttgaaaattgagatgaaagtgagactgagacatattttattccattacaaaaattgtaaatagttttttttttaaataaaaagcagtggtagtactgaaataaaactttttcaatactatttagtacctatccttactataaaacatatttttattttgctctattttcaaagagttagatactattaaatgaattcagtagttggatatgaagtttaatgatggttctctcattgtttttctttaaaactccaaatgggtttttcttgtgttaaatcacaaaatgttcccctttcattagaatgtctgttggtattgtcattgttcaggtctcttttaggcaaccaggttgtattatggctgtcacttcactgtcatttctaagagacatatcttaagtagactttctggccttctggctcttacagtgcttcagccccttctttcaagagccccacttctaaacaaagaactatagacaactgagagagaaatgtttttttctagaggtgagctccctaattagttatcaaatgccaaggagtcatccctgaatcatatttatacaagcagcactaaaaggactcaccaggttgtttgtatgtatgtatttatgtatgtaaatattttaaaataataatagatattataatcaaagacatgaggctatgaatttgagaaggaatgtggaagagggacaggggaggggctgaagggaagagacataggaggggctagaacgtgaacaatgaaagagaaaatgatgcaaattatagtagttaaaattaaaatatatatatttaaaacaaaaaattcacctgatattttgttgtttgaaagttgcatattgtgaagtatgtgacagttaaaaacacataaatatcatgaggtaacaggaaaaaagcttaaaatatgtatttttgcatcttgttctgagcacaaatgcattctcagtgttatccatcatttgctcacccttgtcattgcttttaagaaacctagtatggttctttaacatacaaaacttagtatttttataaatgaaactggacagagtgatttcatggaagaccatcagattatgacagatatctattgggcagttggtactggagcaacttcacaaggttttatcacttacatcacagttaatctctttgacactcatgggacagaaagtatgaagggagatagagcagctcatatatttgcacctgcagttcactggtttcattttcttattccttgcagagaatgggacagagaacaagcttcaaaaaagaatccccagcttatccacgcccttcggcgatgctttttctggagattcctcttctatggaattttgctatacctaggggtaagaatctcacgtgtaaatatggtgtcatatattattaagatataatcatagttttgtgattacagaagggtgaggacaatcttgtaaccaaagccttttgttttctgtttagtatttgttttcatttttttatatagaattttattacaagtccaaacacaaatgactgaaaattctatcaaagataagtgaaaattcttaaaatgtagatctcaattgatagttcaaaattagaatgggtccaaaaatcaaattacttgtttcaaaattatgctcatttatgaatccagattataatgacttaatagtatatgaggttactggcacctttacttttctgtgctaaaaaagagaatgttagaaggcaatctcataccaagaatgagactccattcagtcagtgataccaaggaatgtttatgatattttctgctcagatagatagatagatagatagatagatagatagatagatagatagatagatagatagaggtaatgtaatgtttatattttgaaaacatatatatgtatatatgtataaatagatatatagatagaattatatagagtaatgtagattaatgtttatgatattttgaaaacacacacacatatatggagagagagagagagagggagagagagagagactgaattgtttacaaaagataataaaaatttaaaatgaggtggtgaggtgcacatagaatgtattttgtcagcaccctatgtcttcatcattgtaaagagaatagcagcctgggaacctgggctttgtgctgtttaagaactttggatatatcccagatgtgttcagaagtggttattgttttctgggtcatgcgagcatcactttgaagcttgatcatagcctgtaaaaagggtgacaagtggaaagtgtgttgagtctgatgtatcaactcagcacaatactgccttggggtgttatgtttcatctgggttgacttgcattgtatttcttcaggtctttatcctcagatagcatgggctttggtttctcctcaaatgatgtatgaacaatatgtagccgtgctacttaaataattttattttatcctgtcccagaaaaagtcattaaaaatttatcttgataaaattgactataattactctagaatcttttctagtgctattattttctagaagaaattcttctggtctttcttaatccatatatatgtatgaacataaatgtatagatgcatagatttgaatttctttttaagcaaattcatgcatattatattatcacatatttccatgtagattcatatattatattcacatataataaataatgtgttatatattatagatctgttatttaatggtagttctatatatgaaagaaaagactataaaaaagataatataatttcttctagtagaatatgtgttataaaatgcatatatagacacataaagatatagacagaagaatgagatatcgtttaaagatatctttgtggtcatttttatcagtgagcacacccaagcatttgaagatattttcagtcaagatctccttgtgagtagacattaagaagagggagatgcagtaaatatgaaaaaatatttaaaattttgaagattaaaaatagcaaaaaaaaatcacaaagcattcacaatgtattaattatctatggatagtgattagaagtacttctgagacaaacggagtgctggaatgtatctctggacccatcacagcctttggagccgaagatcaaatttctgcaaatacccaataaaatgggtaaggaaaggtcctgatgggagagagtagatgaatgtgcagagtgagaaggcacgagaaacaaagtgagcaggacacagtgtaatgatgttgaagggtctcttttatccctccccatcccccatacacagtttcactgagatcacaaagttcagtgttgtaaaactgttgaaatctagatcccacttatttaggtaagtataatttccaagatctattatttatttcaatttaagttttatcttaaaatatttatttgacaaatataaattgtcattgtagaatatacagtgtatatttcaatatatgtatacaatttttcatgatcaaataagggtaattaacatacagatcactcagtcatttaccatttctttatggtgagaagagtaaaatactctcctggttgttttgagatactgttgctaactataatcactctagcagaacgtattccctcaatacttgaatttgttgctgataacagagctttcccagcatcctcgtccctcctacccttactagtctttgttatcttaactcctcttccaactcacagtggaaatgggacaaagttgagccattttaataagcttctactgtgtcaagtaaccgctgccgttgctttactgttgtgtgttctttctgagcattttcttcttcctgttaaataaacaaacattactgagacagatataacaattgtacagataaagataacgggacatacattcaaaatgtgtttatattcttggtcgctgtaggccatgataattgtggcataacaattatttagttgttttcagtattgatagaaaaaaacactattaaaaatgccttcaactatgaaaggttaagacaaaggaaataccattacaaaggaccttatttctacaacagtgatgcaattttaaaatcatattagctatagtacatccccattaactgtggacttgttttttctttatctgattcagcagccagacatagcatgctctttaatatttcagacttccagcagagaagagcaacaggctgctgaaaacctaagtaggagaatcaactaaggataatcatttttttattttattttatttttaaactagatgttttctttatttacattgctaattttgtccccttttctcatttcccctcaaaaccccccctgtcccattcccctccccttgctcactaacccacccactcccacttccctgacctggcattcccctacactggggcatcaagccttcacaagaccaagggcctctcctcccattgatgtcccacaaggtcatcatctgctatgtatgcagctggagccatgggtccctccatgtgttttctttggttggtggtttagtccctgggagctctgggggtactggttagttcatattgttgttcctcctatagggctacaaaccccttccgctccttgggtcttttctctggctcctctactggggatgctgtgcttagtctaatggttggctgagagcatccacctctatatttgtcaggtactggcagagcctctcaggagacagctaaatcagactcctatcagcaagcacttgttggcatccataatagtgtctgggtttgataactgtatatgggatggatccccaggtgggacagtcactggatgacatttccttcagtttctggctcaaactttgcctctgtatttcctacaatgggtattttgttccccctaagaaggactgaagtatcctcactgtggtcttccttcttcttgagcttcatgtggtctgtgaattgtatcttgggtattgtgaacttctgggctaatatccacttatcaatgaatgtgtgttcttttgtgattgagttacctcactcaggatgagttccatccatttgcctaagaacttcatgaattcatcatttttaatagctatgtagtactccattgtgtaaatgtgccacattttctgtattcattcctctgttgaaggatatctgggttctttccagcttctggctatcataaataaggctgctatgaacacagtgatataagtgtccttattacgtgttggagcatcttctaggtatatgcccaggagaggtattgctggatcctctggtagtcctatgtccaattttctgagcaactgccaaattgatttccagagtaccagcgtgcaatcccactagcaatggatgagtgttcctctttctccacatccttgccagcatctgctgtcacctgagttttttatcttagccattctgattggtgtgagatagactctcagggttgttttgatttgcatttctctgatgactaaggatattgaatatttctctaggtgcttctcagccactcgatattccttagttgagaattctttgtttagctctgcaccccatttaaaaatagcgttatttgattctctatagtcacttcttgagttttttgtatatattggatattagcccactattggatgtagggttggtaaagatcttttcccaatctgttggttgccattttgtcctattgacagtgtcctttgccttacagaagctttgaaattttatgaggtcccatttgtcaattcttgatcttagagcataaactatttgtgttttgttcagaaaaaaatttcctctgtgcttatgtgttggagacgctggtattggtacggtgacaggcaggtagataaatggaatagaattgaagacacagatatgaacccacacatctatggtcacctgatctttgacaaaggagctaaaaccatccagtggaaaaaaagacagcattttcaccaaatggtgctggttcaactggcagttatcatgtagaagaatgccaatcgatccattcttatctccttgtacaaagctcaagtccaaatggaccaaggatcaccacataaaagcagataaactgaaactaatagaaaagaaagtgaggaagagccttgagcacatgggcacaggagaaaattcagggtaatctaagggaagctaaataaagggaatctgtaagcatgttcctgacagactgtgatcaccagagagagcttgttactgtagaagtcacaggtgtatactcacacgtatcttcgattccatgtttccatcactacatgtaagtatcattagttcagcttaaatcgagacctttttttttaagtcccagaaagctaacggacatgaagaaagcctggttctcacaatgccacagttcttatattccccagactgttataaaagaggatctgtctctcatatttagacaaagacaggcttttgaatccaagcctcctgctcctgaagcaagagtatttgcggtaattctgcttatgagtaggctctgcctagggtactttttcttcatacatcccctcagtacgaatgctctcagcaaagcttctagaggcctgctatctaggattcacttctcatctctgtcccatccctgcgaacacccacagctggttgcttctctggattcagcttcactcacacctgaactcttcctaagccatttctctagcccctctatatgtgttattatgtcatgttttacacttacatatctatgccacttagaatttacttctccactgaattaagttccatgcattataagttaaattgttatatatatttgggtcttttactggaatttctagataaatcagtatactttctttgacctgtgacgtgtatacatgtatggtttaatatccagtagcttaaatgttcatattatttttattcttcaaatagtttcaattagaatttattcctaaattaaattcagaataattttatttgttgttttaacaaatatttattggttaagcatgctcactaagaatgtattatatatgtcataacacttgtgacaatataaacatatagccaataacctggtgcaaatttattcatttttaaaatatacttaaaatttttatgtgattacactaatcttacaaaatggattaggtgaaacatcatctttgtaatatgtagatttttttagttcagttagtttttttaaaatgtgcttagtagtttctggaatcaatcacatatcatactaatacaggtgctttttactttttatataattcatagctatcatttttctcattaaattatcttagctagacatttcagaataatgttaggtggtcatagtagtcagggttcttttgctttcctgcctcccacacttgtgtttatcaactattcctgattctggaagaaagtctttcttaggttaacaagcaatgttgcgattcagctttgtagaaattttaaccagatactgatactttttatcaaattagttatttcattgttactgtgatattcacagcttgttcagtagtatattagtattctgttagttgatttcttggtatcactagcattaatattctaaatgtaacaatatacaaaatgtgcttgcaacaagtgaaggtgatactattacttagtagctgcacaagatatagcaagaaactcttaaacctcacatgctagcaaagcaagcactcctgaactaaatccgcaggcctgtaaaatgcagtatttttttttttaagtataaagataaagtccatataatttagctgcaagcctgagtctgcacttgtttttgtatgaacttttctctatggtctgcatatgcactcaacacagacttacctgtctgtctctagaaacatctgattatttgtcaggtacaatggaaatggcttaagggtatgcatctacagtgacttagagctttgttctggaagtgcattcaggtgtcccctggtcggctgcagtgagaactgaattattcctaccatgagtgcaagtcttttagctagtttttacatggtcacttacccagatgacacatggtcttatagtgggaaggaagtatatatagactggcctggaattcataataatccttttgcagccttcctagatagggttatactcatgtggcaggcctctgcatagtactcctagactcaggtcatgcttccaggggtgatgttataggagcgaaccttgtaggtaaccagagtttgccaataaggagaactgtccaaacaacagaagtgcctgaggtgacacagaataaatatacaggaataagaatagtaaggaagaaggcatgaactcgtgagggagtcagatgggacatggatggagttggaagtgagaaagtggtaaagtgattgtttctgtgtgtgtgaagtattcatgtatgaaattctcaaaaaataaatggaaaaatgggtatttgagttttatgattctgaatttagtgttcttattgtcataaacattagtattaagcttattttctaaggaaaacaattaagaaacttgcgttttgatttatgcctgataaaattgttaaaatacgtcattgaatattatcttatttaaaatagttttgcattttttctattggatacaattctatttggagtagtatttcaatgtggtgaaaattagggaattttttttcggaaaatagtctgagcagcagaggacatgcaactcgcatgcaccaatgctgatttttaaaaaggggctgtgctttatagattaactgaggtatcagttacagtttttcttcacacttaaaaaatgtcatgtggatctatgaatggttccattgtaaatattagagaacatgatacataaaagagattaggggaaatgatagaaggagagagtctagaagtgctggttttgtccttgagaactgtgaggtagtaaggtttatgctgtgctctacaaaccatcttgttattgaaattttccagtaaagaaacaagctgtatcttactgtgtgaatatatgctcctccagagtaatactgtcagtgtccttatgagatgacgtgtattgttgaaaagatgagtatgtcttgctagttgaggcaagatgagatctaactcattagtagcaatatgtaaaataggcatgccatttaaagtattgaaagctataattactgtattaaattgtaatcaaataattaagcaaataagtctagtatgataaagtaggttattgaaaactgtaatggagttctaacattagtaaacagaagaaaaacatttaagcttataacttacaacttgaaaaaaaatctgtgtatttataagagccagaagctggaaagaacccagatgtccctcaatagaggaatggatacagaaaatgtggtacatttacacaatggagtactactcagctattaaaaacaatgagttcatgaaattcttaggcaaatggatggaactagaaaacacacacacatggagggacccatggctccagccacatatgtagcagaggatgaccttgttggcatcagtgggagaagaggaccttggtcttgtgaaggcttgatgccccagtgtcgggaaatgtgaaggtgggaaagagggagtgggtgggtgggtgggtggataggggcacaccctcatagaagcaggagaatgggtgatgggatagggaatctccagagagggagttcgttaaaggggatagaatttgaaatgtaaataaataaaatacccaataaaataaattatagataggccatatcaccctgaatgtgcctgcttagtctctaatataattcaacatctaaatatgttaaagatgtttagctatgtaataaaaatatgatgcatatgtaagatgatgtacaataagaaatattttatatactttttaaaataagttttatttattagatgtctcaaacaattggcatattatatctgggtaagaggttagaaattctttttgatacctccctttttatttggcataattcaaatccatttcaaccctgcatgtaaaaggaaagaattatatctcattttgtgattatcttggaaacttttccaaaggcttgaatcttcttttctatgcagagctttgaattatactaatatgaagtgctgtatataaagtagagaatgagcatctacaataaaggcaatgattaatgacagttaggttgtagttaattccctgtgaagatgaaggtgagatacaaaacatggtcatattctgggactggtgggacaggtagtgttggcacttgggatttggaaaagccatcatagagaacaatgaaaagcaaattaacagtaaaaatttgatgtcacatctatattaatcttctttcaagatttagccctaagttctattttactaagttatcataaaataaaaattgggagatgatgtctttttgtaattcaaaggccatttgtggttcaaatccatccatgtacatttagaagggttgatgaatcagttgaacggcttggttggtaatcagttttggattattgaagtttatgggtttattggaaactggctcaagatagagtgctctagtgcacaccttactgatgcacatacccagctctacactggcaaagggaaggaacaggacccaagcggctggctttaaataataccagtggtgctggcatgctcttccctcctgaatccagctccgctcaatggttgtactcttgagaagctgttccttctgatcataataccatggctcaaaatccttaaagaagttcattttgaaatttcttagtgtcttgcttttcttggcctccatttcttcacctgcctgcatagtgaaaacagttcgtacatgactgagagttgtgaaatcctctgggacatattttaggaatggtttgtgacatgtacatgttactagttaatgtaccacttcatcaagtacccctttacaatatagttgctattcatgcaggttttagtgaacacctcacacaaacttgtctctaaatgacttttgctgtaaactaataaccaagtcttatttcagagtatgcacaaagacactatcagcagtttcataaattgtccaaccttctctgtaaaattattttaaattattgtaaagatgaaattttcataattaaaatgtgaacaagaaatgaaatttaatcactgccttctcctgcaggaagtcaccaaggctgtccagcctgtcttgctaggaagaatcatagcatcctatgatccagaaaacaaggtggaacgttccattgccatttaccttggcataggcttatgccttctcttcattgtcaggacactgcttcttcacccagctatttttggccttcatcgcattggaatgcagatgagaacagctatgtttagcttgatttataagaaggtaatactttttggaagatgttatttggtcttgttttactatttcagtgctggatattaaattcagggtttcttgtatgccaggcaagttctttgctgagtttgctgccctgcacagtctcaggtattctacctgacatgtcttcagtgccctaaatgtgagcttgtacaagaataggtgtgaatacttattcctgttttaggtgcctatgaaatatatggcaggtgcaagtattgttctgagttatctatccttgataatgcaaagtgattcagtcgacagttattaaatatcttctgtaaattacctatatttcagatgtcatattttaggggaagtatttgaatagtttagtggttttttttaattgtcacacaaaatagacaagtgagcagtaagctaaatcaatgtcagattttttaatccactttttttcagttaaaatgacaaatagtacaagactcattgacaaaatatcatcctatgataaaattctatttttactagcaataatatatcactgttaatgataacctaagaaatacattcccaccttagccagctgccacagatggtgacagtgtcacagtggtgacactcatccatctccactgtcttactttgagtttgatttttttgtcatccagtgaattctgaaactttataacatttttgaaatagcatgtacgttgagatcatgtgaacttaactttgcttttctgcattcattagctagataagaaggctttgtaggatctaaatagattgaaatgaacagtaaacctccctgcactccagccacagccacctgccaaaccaagcaggcctctgaccaagacaaagactctcctctctgtgggacctagcctggagccccgtcctcctgcccttttcccttctgcccagggtagagtctgcccgccggttcccactctgttctcagttcttctgtgacaggcatctgaggtgttcaagactgagaacttgacgttcctagcctccatgtggcccagggaccccagaactggctcttctacaacccccagtggaaggcctgcccagtggtgccatgtgggtgtgtgcagttaaacgccctgcatctgccttgcctagtggcccgagccctgataggatgtgggatcccacttttttttttattagatattttctttatttacatttcaaatgttatcccctttcctaatttcccccctgaaaatcccctatcctatcctctcctccctcccctgctccccatcccacccattccggcttcctggccaggcattcccctattctgaagcatagaaccttcacaggaccaagggcctctcctctcattgatgactgactaggccatccacagctacatatgcagctagagccatgagtctctccatgtgttttctttgattggtggtttagtcccagggagctctggggttactggttagttcatattgttgttcctcctagggagctgcagacccctttagctcctagggtcctttctctagctccttcattggggaccctgtgttccatctaatagctaactgagcatccccttctgtattagtcaggtactggcagagcctctcaggagacagctatatcagtttcctgtcagcaagctcttgttggcatctgcaatagtgtctggggatcccactttttaactcacatctaaatgttgtcttaaattttgacaaaactcaagttatttcagtggcaccaatgtgacttcattgctctaccaagtgatcaaagaaagatatattggtggtatttagatattacctttatctttgctattttctttctttagtaacacattatatatatatttggcttataagggctatgggtctgaaattgacctctaacaagtaatccattataccactacagtacatactcaaggtcagttgtgttataaaatcttgatagccatactttattgcttaaaaaacacttttatgccaggcgtggtggcacacgcctttaatcctagcacttgggaggcagagacaggcagatttctgagttcaaggccagcctggtctacaaagtgagttccaggacagccaggactacacagagaaaccgtgtctcaaaaaaaaaaaaaaaaaaaaaaaaaaaaacaacaacaacaacaaaaaatcagttttatgaaggcagagaagaacaaaaagaagtcagagtttaattcaatctcttatgctacaaaatcatcaattcataagttccaagaaaacatgaataaacaaaaattttagagattatttggaatgtagaatctataaacttgctatcaaagaaaattgaatttactttaataaatatttgttaaaagtacttctaataaagataataactaagcatatgtatattgcaccaatgaattatttaaatgtgatctaattttatctacccacaagtttctactatagttgctattatccttcttttaaggaacccaaatcctataaagaaagaacattgaaaaaaaaggtatttcaaaactttaaaatagataagtaacagccttagaaaatggtttccaagtaattaggtaaaacagaagtatggaaacataatattgaggcaaaggacatgtgaagtaaaatgaaggggatggttaattggtaatcaagtccttagagatattggtgaagaatttgaagctgctgcatatttatttccctcacaacatcacctactgtgattgctgatcaattagtttatcttatagaccacatttaacttcccgatactggcttatcaccaaagagtatgaggacatcttcatggttctctagctggtccctacttgcactttgtcttggcttgtcccgtagcttatatccattcccctatccgtactgtttcaggttcaaggcaaggacacataggatccttccaacaacatctgcaatttatagtagagaaatccactcccattaaattctgaaaccaaacatgttatactcaaaataatgaatactaacacaagctgaactttgcccatcattttgaagattaccaagataactgaatattaactatgtgctatggatgaagctccatgctttagcctgtgcattgctttatctgacactgaaattccttctaaacatatgtaatctaccacagtgggttctccctctcttcttatttctctaataatattttgtaattacctatactcattccttcttcatctttgcttctctaaatatatctattttataattttatctctataaaatctttcatatttttaatccaaattttgagcccactctacattctgccttccttaactaatttatcatattatctatatgataaacacacactcacacacatatgtgtgagtgtgtgtttgtgtatatatatatgaattttttctaggttactcccaggaaagaattgtatcttaataaatgctaattcctgatacatacagaacaatggtttacatctattaaatactcaacaaatatgtgatgagttgaaacatataaaatgggtgctttgctgcaaagccatctaacagaaaataagttactaaatttcaccaggcaaaggattactctatttcatgatcataatttatctaataagttaaaacattaatttatagataaataaatgtttttaatcagtgatcttccatgtttttcctttgtaatatttgaagactttgttttgttaacataaaaatactgattcagttattagtaacatacttttgttggatttaagtacttttatcccaaagaattagtgaaggactttatgaaaaaattaagacaaggattcactgccttaggttccatcttttatttctaaactttcaatttttttattgtttgacgtctttaaatggttacataattaattttagttatctgtatcctcagtttctctctcattccttgccttccctctctggaactcattgtagcagtactcgtctattttaatgcctttttgcgtgtggctcattaagtttaatgagagcatgggtgcaatgatatttagtggagcaagggacgcttacatgtgttgcagacatgagaacagaataggacaactcctctctaacaaccatgagcctgcctcacccatcctaaaatgttttaccatgtacagataaccccagctctaatgggttcatgactgtaagtggtatgtcctgtagcaaaggtgtgtgtctactctttctataggtcagctcttaaattcttcatgctcccacttctgccatgttctctgaatcatggtggaatgatacaaccttcccatttatgtcaaatattctgttaccacttatttgccactggttaggtttctgcagtcaccgggaaccattgtagtaagaaacttttacaataacagctgggtgcaagctctaatctatggtataaacatgagtagtgagaaggtagcttgataacatgaccatttagcagaataacagttacttgcataccttggtggtcaaagacctccccagtcagagacttaaccagggttacagaaccaaatataagttcccatttgtggaacaggccatacatataatcagcaagcaggtagtcatcaccataagaattacactactgctctactagaggacacattttacaaaggtatgtgattactatagcttatagtcccagctgggtaaggctgatgatgctttccccagtgacttgcatatgctgcctctggcactacgaaccagtaagcaggaagcttacacttcatctccatgacctgtgaccatagcatacaatacttaacatcaagttctggtaggtatccaagagcactgggaaaagcctgtgttgtttggggcacctctgagatcccccttgtcagtcactcatagggaggtatcccctacccagcactgggacttttgtttgattattcatggtatctgagaggaatagcatctaaaagaagacctctatttaagctttttaaagattacatatatttcttagaactgtagaatagtttactaaaatggtaaatttgaactcaaatatgtatagtttttaaacaggttcaactattattaactaatttctcaaggcatgatatatgttattggcaagacaaacactaataataatgtttacaaatctctatattaaatcatcttgataattgcaatttgggacacacttcattactacataggatagcatatgttttcttgcattattggtgacagagacagatgatgagtaaatgagtctctgccagtgtatttctgtatgctgataagattgtattattgtggtgctggagagatggctcagcagttaataacactgactattcttccgaaggtcctgagttcaaatcccagcagccacatggtggcttacaaccatccgtaatgagaactgacaccctcttctggtgcatgtgaagatataataattaataaatcttaaaaaatagattgtattattgcaaatcctatccccaccatatagtcctatgtggaactccattctgagaaagctagttaagttaaaactaggtagtgccattttgaagccactcaacagagaatgcctcagccacccaaagtagagggaagatgactgtctaccctactccttattgaactctccactgtgaactactacttgctactcttcttgctgtctactgtctccccaccatgttccattcataagtctttaccttaagtagccctcaaccctggcctccattttcatgtctaatgtgtaatactatcctcctcctctctttctctactgtctctctctatttttcttacttttgtcaacatattattacacttgatattctaaaaatgaaaagctgagatcctcacatgaggaagatctggtagatttgtcctttggggcctggcttacctgactcagtgtaatatttatttctgttaaaaaaaataaaagaaaaacaaatccccaaaactcaaacaaaaccactcaaaacaacaacacaaaagattcaaccttatattttgcaagtggaaataaaatatcattcttattgtcaaagacaacaaagtttctatatgacagaaaatatctaaatgtaagcatttcaatatatttgtttttcagttgtatatttttaaagctgaaaaagtataacagtaacaaatatgaaacaaggttgacctctcaggttaagatacattcagtcacatcttactaatgtgttattgatgaatacattttatatttgtttgttgacatcacctaacttgccactttttcttttagactttaaagttgtcaagccgcgttcttgataaaataagtattggacaacttgttagtcttctttccaacaacctgaacaaatttgatgaagtatgtaccattgacttaatgttttatgcattttattagaaatcaaacaattctaaagaaagatttatcctgcatcagctaacagtgataagtagcaaagtcccaccaatagctagtttggctatttctggaaactgggaaagctagtcctgtagcagagcaccattctgaggtcaggtacgattgcccaactcaaacatacctcagcttgctcttaataatgtttttcaaaacttgatccttatcagacttagcttgcttccttttagtataatactttaaattgttatgtactttgactaaatatgatactctgagcagttcttgttctgtgctgtcttatgtcacaagtaaattcaaggaccttgaggacagataccatgttttatttatctttgcattttcaatatttaatagagcaagtgttacggctgaattgagtagcagagagagagagagagagagagagagagagaggaaaacctttttggagagtcccttgttctcatgtgttctgtgtgagaacactagctttattttaaaaaggtattaataaaacctaggcgcaatttcaaagatacacaatcttaattccactgaataaaaacataatgcataaattgtaatatgctaagaaccatgaatttattgattggataactcttcagtgttcattttcttccacatgtgtctctctgcttggttttgattgtggaatgtaatataccacttgattttctctgtgcttttatttttcagggacttgccttggcacattttatatggattgctcctttacaagtgactcttctgatggggcttctctgggacttgttacagttctcagccttctgtggccttggtttactgataatcctggttatttttcaagctatcctagggaagatgatggtgaagtacaggtagtggtctttttcaaagcttgaagaaatttgaattgggcttctctaagccctaacaataaaactatgccatgtcacttagaagggattattttaattctgtaaataattttttctataagaaaaaggcaattattttccctattggtctatagaatttctttattcatgttctaagtaaggttcagtacattttatattcataaagtttaggtaaaatggatattgtatttctttgaactggaaggaatgcctaaattttgtatggaacaaactggcctcttcctctccatatagtagggccattctaccaaagcatttattacttttattggtaatatgagttatatgatgtgcttattgcagagaatttgtagtttgcctgtttgaatgtgatagaaagttgaaaatctggggctatacagacaggtttctgttttagtttgtatatgctttcatttgcttcacaaaatggaggtgatctcctcttagagactttgtaaaggattggattagagatattgtccaaagttcatctaatggcgggtatctgacactttttaaaaattttttctcttcctgtttttctgtgacagagcgtctctctgtatccctggctgtcctggatctcactctgtagctgatctagaactcagaggtctacctgcctctgcctcctgagtgctggatttaaaagtgtgcactggctatgattttgtttgttcccagctgtttaataacaaaatgtttatctatgtaataaaaatatggaatttttcaaaattttgaatagttattagtagataatttgacttgtttttgttattgattgtttgatcaattgattggtttacagagatcagagagctgcaaagatcaatgaaagactcgtgatcacatcagaaattattgataatatctattctgttaaggcatattgttgggaatcagcgatggagaaaatgattgaaaacttgagagagtaagttgacataattacaatactggtccaattttatatttaacatttaaaactgaccactcaggtggattttcaactcaactcatctaaaactcaaatatatgtatgtcctgagttttacatggtttatatgtcagtgcctataatcattttggtgagcaaatgttttcttttgttttttgagactggttctcaatatacccttggctagcatagacctctgtatgtagatctagaccttaaaggcatgtgccaccacacctgtccctggcttatggttttacagttgattcagtttttttgtagtgcatagatagttatctcttactaatgattctgctatactagttcacagttgtttcatacccttaatttaattaaaacaatgatgaagatgctggggggctaattgaaaccataaatggaaatactgaaatatataattgtaagaggaaagggtgatcttgtatgacactgtacttcaagtattatgacacaaagagcgggtgacagccacatttggacaacttctgttattctgagcctgaggaataatgacaaaggaaattttccttagggctactcatataaattgcttacaagaggctaagtcagtccttgtaacaaaagccatctcctgagatggaatctttacttagcacctgtgtgtatcttatcttctttcacctcagataaccttttgcagatcagtaaagattacctctgaccaaaaaaaaaaaaaaaaaaaaaagcacagcaaggctgatacatcattactaagataattttgggtaaaataaccatgagcattgctgtggccatggaccgtttttatttagttgacttccgtgtcctaccaactacagtcaaggaaatgttttagacttctggggatgagcggaccacgaaagatactactaatttaaagacatgagatatatgagtatttcacagggaaaaggaaataaagagtgctctttgcaatggtgtgaatttgattatttcatattcagggtgctggagacctgtagacaatggtaactgagccacagctgtgtgattggaacaacaatggaaatgcttaaatgttaagtcctttgccatgtaaatagaaatagcaaaaagagtgtttattttccaaatactattgctcacctgtttttgttatgcctttcaaggtaaatctaggaaaggaattgcattttctttctagaaacatccttaaagatcttggggaattgttgagttgataagagttgtttctcacgttaacaggttgagtgctcccctgcactgcctgtaaacacagtcatggcagggctggttatcacagaatccagttttctcaggcttcataatcagcttgcagtaggccgttcctgtggctgacgggtttttgtttcctttttggggttggttttctttttttgacattggtattttacccctcttttcctcacataataaaatccatctttcctattctgaatttcaggctggttaattctaatagctagcatttgtctggttgtaacctgtttgatacatcatgaaattgttacctgaaaaagctggagagttctgacgtaaaaaggaaagcaggaattgctttaccccgcagagtaaatacaatgttctaggggagactgactggatgttcttaggattacctcagcctagaaagctgttgaactcggccaaaggctatgttaatgttcttgaaaaaaaaaatctgccttttattgctttttagccattaaggtactttcaattttttatacgaaactgatagaatttttttatgactcataaaatgttagggattttatgttagtgtatagatgattctgttgcgtgtttgggatcaattattctttttcctatgtgacttcttccttttctgagctgttctaaaatattggaacagttttgacactttactaccatttgtaaacattctttccttttataaataccaggcttatcaatgtatttttttatctctagaagaaagggatacacattgctcttttacatctgctatgctgtcatctaagcttaattacatctctacaagggaagtattacggtttttttagtgatagaatcacatttaattagatggaagagtgtcttcctttaaacataagtaagactagtccatcttcagtacaaatttattgaaacactacaactcactaggctgatcacaatataggctatacacatgacctctatccgtgagctcaatagtatattgttttctttgaggacttatttttttttttttttagttctaccacttgacaataacacttgcttctatggattagaggaacagtggaagcatagtgcctgtatatcatgtgccttcctgcaccaggctgtagatcagatactgttcctttccgacagagccttcattttgtgttcaccattggcctttgcccacacaagaactggttgtttttacaaatgatcacaattgggttgaggtttatggctcctggaacagtggcgaggttgactgcagtattgttctccatcttccttttgtcactaaagcatttaacctcttcctgtatatgttaaaaaagtaaatacctcccagttgaagtacagactagaacagactagaggactgcaactctagtgaggtgcgactgcagataattacatgacaatgagagggactaggagggaggagctactccctgctctttgaaggaccccctgcaactgagtgacttggcctctgactccagagtggctcctgggaagctcaggcagcagctcagcagatgtcagcagatgtgactgagagacaatgcccagtcacgtgtttctcactgctctttgatatacacacctcgccagtgctatttaaagccaagctagaatctcaaaactactaagaatatgatggataactacagaactgtcccttttgttcataaagcttgtaacattgttttcccttccacacatcacttcaagcgttaataaagaagttactaaagatataaaaataatataaaagtaaatctatttagataatacaatttaaataaattttaattataattataaatttaattatgatagcaattgaagttcttaattgttttatgttaacaagcattctgtgtaaataaatggtatattctttaagagtcatataagctaattaaggtcaagagaagttttgtaacttgcccaaactttggactgtatattcagattttgtattctaagacacctgattattgaaagaaaataacgtgtcacgtcttcttctgttttgcacagggtggagctgaaaatgacccggaaggcggcctatatgaggttcttcactagctctgccttcttcttttcagggttctttgtagtctttctatctgtgcttccctacacagtcatcaacggaatcgtcctacgaaaaatattcacaaccatttcattctgcattgtcctacgtatgtcagtcacacggcagttccccactgccgtacagatatggtatgattcttttggaatgataagaaaaatacaggtaacttccatgatggtatacttacatgattttggaaacattttagaatttttatagtggggaaaatctctaaaatgaatttcttgattttggatttattaatggattagatttccactcttcattttcatacataatttcatgagcgcttacagtgaaaatctaatgaaataaaatcctaggagattttgtaggtcaaatgaatttaaaataattatttctataatctagaaaatcccatccaagaaatctgtgaatagatcatttctaggcagcttgtaaatatccaaaaacattgaaaataaatttcagcaggaagttaaaaaaatgttctagctagccctggaatgctcaccttgtaggccactgtactttcccatgaagcattgctatgttccaagaacttcagcttccagcagaccagaaagttacctgatccctgggcaggtggggcttacagggttattttgagcattaggtaagaagtagtttattcagagcaagttgaataaacttctgagaaaaaaaatgtcttattatcccttaaaatgtatatttaaatattcagtgcagaaagtaaatcattgtgaagaataaatgtgggatcgagggtagactgctttttaagaggttctccaattgtttaccttggactgatgtcacaaatgacagaaaacatgtaattttggcttttaaatctgttttatttggtctttgaaacttttgaattaattaatagaaattagaagtagagagattatcatgtgtacctctgtccacaggcatccatgtgtattcacatacgtgtattgagtgtcttctggagatttgcgattatgtagtaatttgggttcccacagttacagcaactgccctcaaatgtgtatagcctgcccagctcatcaaatcttttacagccttttctattcagcgtttcacccccaaggttaaatcaacttgagttgtgtgactagagcagtcactcaaacttagaatcatagtggctctatgacaaatcttatttccctgctgacatcaccctagttgggtggagggatgagagaagaaagacagagagaaggggagagatgtaagaggagaaatgggagtatctatgaacagtaacacagaaacatctaaaaaaaaaaagagaaggaaatgagacaaaccaatagaggaagagaggggggtacaaggaagaaagatcagagcaaagattccaggtgcacagatttaagtcttatgctctccacctttcctaagaaccatgtggctggaattctctgatggaggcctttctcagagaactgagaaatagttctatgaagtccttctccttccctttatataaggagcaatgattatgatgttgctcgtaaagagagtgttaaaaaaaattgttgttcttttcacttgtactagccttgaactggtacatgaataattgtcagggtttcattagaaattcatattctatataacagtataagaaagaaacaattgcactgatatctaatgtataaaactaatttcatacactaatatatttaaagaatatattttgactatgatgagtcctactgcttggtactttaactttaagacaattgtaacgttaatttattaagaaacaatttctaatttaattgttaaaatccatacaagacactgtaatgttagagtggaagaagatataacaatacatttttgctattgtgattctacaattgaaagatttttgtcttcattgactaggatttcctgcagaaacaagagtataaagtactggagtataacttaatgaccacaggcataatcatggaaaatgtaacagcattttgggaggaggtgagatttctaaatatggtcgatttttaaaatatgtaaacaattgtgctttttccttttcttgcacctaaatttctactcaataacatataagattcaaaagatattatatctcatagggatgtaaggagggctatcctcttttataaggtgaaaagtgggtaaccaggaatattaaatgcagcataaagtgcctttatttctttaaagtcatataattgatttcatataatgggccaggaagatgattaccttcgatactagatctaaatcctgtctctgcaatacactttccatgtaatctaaatcatattatgttcaagttattaagcctcaagtgtcttcatgtgtaaaatagacattatttccctactgactaagatgatttacatggtctgttcattagtgcactttgcaaataatggtctttcagtgaagattaacttctctaatcatgactcctaagtcttccctgcctatcactcagaattgatgagccactgagttcccatgagcagcttccagcagtttactcactctgtatgtggtgtaggtgacctcatccagcctcaacatcagtgagctgatgacatgcaagtgcaaatctctaggcctaatttcaggcttgcatgctcctcatcaacttcacagtcatcactcctcaagctttactgccctcgtgctccagcatgttctccatctcctttcctggccacactgagaggcaagctaggataggatgcattacatgccaaactttcactagataaatatttctttttaccgtgttcaacttccattcttcctccttactcctaattgaatcctcaatgttgaacttagaactactgtttatgaaaggtgaagatagacccatacatttgaaatctagatgaaatacaacgttacttccttttttcccttactattttaacctttgcttttgtggttctctcttgtttcaagacatcatcattccttttaatactattgtttgggtctgagttttcatattctggagccttagtgatattggcataatattaaaaaagggagttgattctgtagaaagcaaggcaagaacaattgtgaggtgcaagtggatcataagaagtagcagacaatgaattctcaggcaggttacctttaggaaagaggatcgttggatggtgtggacctaaaaatagattcacttaaaactaggcacacaagtttcccaggcttcttcatgaccactatttgatgatatatattttgctttggagacagtacctccaagcttccattgggcaatagagaggcaagcaatttttaaaagaggatttctctccaccccatacatactcttgtacagaaaaattattttgaatccactagcaactttgtcacttgtatttgtagccaatgataaatgtttggagcaagtcttagaggattggaagtgaggattgccttgtaaatctaccttgtgagctacttgtttttgactttttgctgagccaaagtctacagttttaaaagaggaggattgaaaaattggtcttatatattatattgaagattaattaatgtttatttactaagtctgtaggaaaaagggtatatgtgtatacttccttatagtcttggtgtacacacacacactcatacacacacactcacacatacacacacacacacacacacatactttagccaataatatgagactgaggcaatgataagtaaaagtctgataaagagaaattttgttctcattacacataactatttctcaaacacattcaaccatactctccagaaaccatgtgctttatagttatatattataaattaattaatactatgtatgtattttaatggatcctgtaccatgtatttcttaaactgattgcatataaagttttctatggaaaatctgaaagcattattatcttcaatgtgtatgaatagggatttggggaattactggagaaagtacaacaaagcaatggtgacagaaaacattccagtgatgagaacaatgtcagtttcagtcatctctgccttgtgggaaatcctgtgctgaaaaacatcaatttgaatatagagaaaggagagatgttggctattactggatctactggatcaggaaaggtactgtctctttaaattgttaattttctgagaaatttgtacacaaatactgtaattatgtaatttctatccccctttccagtatcttactccttccatgtacccctcctcacttccattaaaattcaagacctttttgtttatgattattatatataatgttcttgatctattttgtgttttatatatacacgtgtttagaactgatcactcaagattggataacctatcagcgagctaatttttaaagaaaactgattctccctcataacaattttgcctgtaaattttcatctaggggatggagccttgtgagataacctcatatacattgtcatgtcaactggtaatgtcatcctgtaggacttgtttagttaacagtgttttgaatatttcataggtgtagcatctcattgtctaggagatactatctagcagtagacatgcctgttttctggctatgttttagccacatcttccacaattagccctgagccttaaatacagagtttgcattgtagatgtatcaacatggtcagttcttctttgactagctctagatctctgcaatgctttgcatccagtgcaaaaaaaaaagatgtgtctacaaaaagtggtgagaactatgcttacctgtggctatgaagagaagtatttagaacccagttagaaattatattagtttacaaaatggcagtagtaagagctatgacctctccagctatgggtagtagttaggtctacattacaagattactaggtatgaattgaatactcttaatgatttggtcttaggtctaatcaggcagctgttaggtatccctaggataccactgttgtaccattgatgttgtattttgccaagacatcaggtttttttttttgtttgcttgttttttaatctatttatttcatatcattaagaatttaatttactattcatttctcctttttgtgtactttgaagtatatgtaatatttcagagaaaatcacatatgtatggaatatctggtgtaatatatatatatatatatatgtaatatgtaggaatgtttgagtataatgtatataagttgcttcagtaatgatttccttcaggtttttcacataattttatacttttttgtatataatttagccttgtcatacatatagatggctttcaagaaaaccatccttttaaccgttctttacttcagatctattttcaaaactggtacaaaaaaaaccctgctttagatttcacctatttctctatatatttgacatctctctatatgtggatttttactgaatagacccaggcttgctttttatatattattaaaatatgtcaagtaagtgttaaaatgttaaaaattttaatttattcagtggctatgttactccccacccagtaccaagaacaatcaattatgatttggagagatatctgacaaaatctaattggctagaagtgaaaagcgctcagggattgtcacggtttcagatatgttctgtcatgtagataatgatagatacttggtttttggtagttacctagataaatacattaaggaccaaagaaatgaaatttacttgagccaatgctttgagcagcagagtacttgctgtggggatccataaaatagatccttgttgcaatcagattgttgttttagagtacctttcagtaatacaaatatatatttattaatctctaaaattctatttcaaaatataaagcaatgggagaggaagggtgggaagaaaaaagaggtgggagaaaaataaggacaaggcagtgttgttataaaataaaaatgaaaattaaggatcacaggagcctagcatagatgtctcctgagaagcttcatctagcagtggatggaaccagatgcaaagacccacagccaaacatcaggctgagctcaggaagccttgtggaagggttgggggtaggattgaacaagccagagggctcaaacacaccacaaaagacctacagagtcaactaagctgggccgatgggtgctcccagagatcaaagcaaacaaagagcaggcaggagttgttcctaggctcgctacacgtttatagaagatgtgcagcttggtcttcatgtgagtcccctagtaactggaccagggctctctgattctgttgcctgcagttggatcccctaccccctagcaggaatgctttgttggggcctcactgggagaggatgcaaaaatttaatcctactgagacttgatgtaccagaccaggctggtacccaaggtgggcttctctttctctgaggagaaggggaggtggtaatgggggtagggatttgtgagaattcgactgggagagggggctgaagccaggatgtaaagtgaattaataaaccaattaattaatgaaaacaaaaagcattctaaaaggtaatttgtttctattttatactagtatcttaaacagggattttattttaaagagttttatatgagattttggaaatagcacaaattttctaatcactgtacattttgcttatttttctctccaattgttttcttatctgtgacatagacatgttgttttgttttattttatttatttaaagactgaatgacctttattgctcatttttaattaattattttatttatctacatctatgctcccagaaatcttcaccctattcaccctcccctttgcctctgagagggtatctaaggctgggcatctctcttctctgggacatcaaatctctacaggattaggtgcatcttctcacactggggccagacagatggcataggcatcttaaataaagtagctataattttatattctcttcctacagaaatgcttgctcctcagagtgttatttctttcctcattttctgatatggaaatagagacagttttcacgattaaatgaaaatggtagcacaggaatctgcataactaatgctataaaagacacagatgaccagaaacacactgtctgctgaggagggggtattactagcattacacagaattttaaaaatgaattgttcatgtacttaagatcaatacatgaaagaggtataaaaatagctttggaagcacagttgttgaacttgtcagtagttaaccatcaggcaattctatgaaaccttaatgaataagtaattaaaatctgggactgttcttgcctctcacagaaaattgctgtgaaggcagagaaagatctgggttcccttctgacaacttactcagagagactgctgttttgtaagaataagaaggaaaaacgattatttgattgaaaaaatgtgaagctataatataagatttaaaatattaatatttaaagttaattttatacctctcaatttgatagtttattatttaagacttaaatataacctaataatcttatatgttatacccttatatatttacagagatttttgtataggtatctttggagtagtatggctatgttttgaagttctgtagtccttggttatagaaaattttacaagatatgtagttaagtgagaaaagcaaaacaaaatttttgtatagtaatgctacaatgtactcaaggatactaaactatattattattttccataaagtctatattttgttctactggatacatttataatatctatatatgcttcatatttcacttattcttaacagtttcttcattcataaggagcttggataaaaaaatcaatatttttccttctcctgctacctgtttttctttctaccaaatggtacattaggagccctttctgtgtaagcacggggacctaagcttgaattccaagctcacatgttaggtggatccataaccccacaatgagaggctcagacagttggatcaaaggagctcacaggcagccagtgaagctgagactgtgagcttcagtttattgagacacttggtttgcctcaagcaatggaaagagacatagaagatactagtatcctgctctggcctctacatgtacacagaagggtacaggtgtccacatgttcacattgtagctctctctctctctctctctctctctctctctctctctctctctctctctctctctctcccccactctgtgtgtatacacaaacttgacatccatcatttctttttttattgtagtttttttagaaaacatttattaggttttttattggatattttctttatttacatttcaactgttatcctctttccttgtttcccctgtgaaaactcccctatcccatctcccctctccctgctcactcacccacccactcctgcttctctgtcctggcattcccctacatggagcatcgatcctttacaggaccaagggcctctcctctcattgatgtcccacaaagccatcctctgctatatatgtggctagagccttgagtaccgccttgtatactcttggttggtggtttagaccctgggagatctgggggtactggttggttcattttgttgtttcccttcagtttcttgggtcctttctctagctcctccattgaggaccctgtgctcagtcccatatgtttttataatttcttaaagatgaaagcaaattttcatactagtaaaatgaaagtactttctaagactgaatctgtgttagtttattataatgaacacactcatgtagttagagcataggggcagcccatagcccaagagctttcagcaagtgctcactgtcaccagtctcttactacaaactgatcacagcaatttaagtaggggctcgctcttctttgtgaaccttagtcctatgttgcccagatctctttcatcccctttgtattttttatgcctagaaaagtccctgtatcatgaagtactaaaacatctttaatcaaatgagttacactctttaaacattgggagacttgtgattggaataattggacgcaagaaagggataagtaatttgatcaaacaatttagctgttgtttttatttgtagacatcactcctgatgttgattttgggagaactggaagcttcagagggaattattaagcacagtggaagagtttcattctgctctcaattttcttggattatgccgggtactatcaaagaaaatatcatctttggtgtttcctatgatgagtacagatataagagtgttgtcaaagcttgccaactacagcaggtaagcatatttatgaaaaatgctgattgtgttagctacttgtgtcagtgttgtgataaaattgcttgactactcaccttgaaaagggttttattttaaattcttttcagggatgataccgtccatcttggcaaaggaggggcaggaatgggaagatggcgagacatgttatatccatagtcaggaagcagacagccagcaggaagtggggcttcaaggcctaattctagtagcttactttctccagtaaagctccaagttgtaaacactgtcctaccccagtgtacccccaactggaaataatgttttcaaacacatgagcccattgtaggtatttcacgttcacaccactacatggattatgctcattcagtcttcagactaaccaaattacacagttagttctctattgagttaatgtaaacatgtcaaggaccccctaggattaagctggagtgggtgggtcagtgaataaaaccatgctcctactttaagtttacaaaattataaatagatgcagtttatttttaaagtgtgtttgggtgttgtaaaaataaaaattccttatgcatggggtgtggtacttcatgagtgcaatcctaatactcaagagactgaagcaaaaaggtcatgaagttgaagccagtcttagctgtctaatgagttctaggccagtctggatcacatggtaggatcatgctaaaaactaacaaaccaaaagtctgtatgaattcaataggagtattttgtgtacactttgagaccacagtgaaaagagaagctatcctagaaacttgtgctaaccttgaagaagatagccatactttcccaaaagtccttcttctacaacatgggggttgatgtgttctgggcttgttaccagatctgtttttagaagagtttttctgggcaagaattggagggagtaataagtcttacttggcttattttgggggtggtgggggtgagatagggtggtactttcttgctagatttagattttgctttgcttgagtatgtattttcccatataaatgatttcacagatgatattttgagtaatcaaagtcgatctacaaaatgtacataatccaaatatagcatttatacattactattaataaatttagagctgtggatcatccatgcaacaagtatttacaacattctggacacaggtagatcattggaatgcttagatgaagaaaattgtatttattgttaaagcttcatagtaggatggtatatattaataatagaggattatatggtttgtatagtatatatcaataaaatagtgagagaaggagaagcaaaatatattgttctttcatttggatgcaaggacatattacaattattttatagtgtatgatttattgtgttttagaatagttacagtggtacagtgatgaccacccttttagaacccctgaaaagaaactccatattcattaatagtcaaatcctatttttttaaaatattttttattattacatattttcannnnnnnnnnnnnnnnnnnntctcagctccaaactttgactctgtaactctatgcaaccactgatctatctccataaattctcctggtccttttctttttcacattttacataaaggaaatttattgagaatttcatacatatatctagtgtatgttttatctaatccatctctctctatctttcctttaacttctctcatactcccttcaaccacttcacccacccacatctgtgctctgccttaaccttcagagttcagtctgtgatcctagtatatggccttgtacccatgctatgctggcagctctaaggaaattttaatgtaaagcaattaatgtaaagcaattagttttcatcgacttagacttgctgtgctttatacagtgtcctgaagagtgatagaaacagaccaataatgaatttagttaaaaatgggggaaaaaagagaatattttaggagtaaaaagaagaaacagagagactccatcagggtctacccaaaaatagcagcctccacatgcagaaaagggtaataatattcctgatggtgtgattctttgtagaattctgaggttcacagggaaagcgagcggcccaagagttctttattaggaacattggaactatgaaaaaagagagccagactggacttaagaagtagggaaatggggtctggttgtttagagtaactgatagttgcccagtgaaacattcggtataagatccttccagtaaacactaagttatttttgcttcttttgaaatatagaataatatcactacagagaaaagcaggaaaatactttgagagccagttgttcttagaaagtgaattctgtagagacaaagttgttaaggacaagaagagcctccaaaccaaagaataatgaaaagacattgatatgatatcaatattgacaaaactggtcatagcgaagatgataacaatggcattttaaatttttggctacgtgacatagttaacaaaatttgggtatctatggaagaaatgaaaatgacagcagagcctggaggtttggaatgtggatgcactggctttctgcttagtgtcggtgagagctggaagtcactccactttagtgtatcttcagacccccaaaactatatgtgtcattcctttatgtccgactgttttggtttgatttccagtgctataattttgaccaaaaacatcttcagggagaaaagggataatgtggcttacacttcctggtcacagttgatcattggtgaactcagagtaaggaactaaaggtgggaacttgaagcagaaaccaaaaagaatgctatattctcatctgttctttgtcttgctagcaggcttacacttacctagctttctcttacaaagtagaatacctgccaggaagtggcaccacccaaaggttgtctgggccctcccacatcaattagccatcaagacaacttcccacagatatgaatagtccagttgcactggaaaaatttctatttccaggtgactctgtccaatttcaataaaaactgtctactttaggagagtcaaggtgaatagcaaatgaaagcttaaccatctctcatataaaggatttatatgataaatttgggggaaacaaacttaaggttctaatttctatatgctatgacagttgttgggttaaagtcagtggtgaaatttgagcctacttggataattcaggaagcccctctctaagagaagacttcttgaagagcaggtcaaaaagaaaggtaacattatgtataaaagaaaatgaataggtgtgaaaccacctattgcagggattataagcatcttgatagagccacggtgcaattaaagagaatgaatgagcaggaatggatttagggaaccagacctgggaggtttatcctagagaactgttagcaagagtgctgtgagagctttgaagtctgtccctgtcattctgggatgatggagagcacaattaaggtgggtaccacatgaagcttagcacagcataaatagcatagactttgaaatcgtacaaagctgagtcataaggttatttaacttgtgccaatactcggcttttctgctctgcaataggaagctaatatcgcctattctatagcttttgtaaagtgctctagtacatagaaagttcaccataagtaaagcaccagttattattattactgtcatcatcattggcaatagtgctctgttcacggttgtgactagaagaagggagactaataggaaactatttcagttacacagattatggtcatgatgtacaagagacaacagttatataaaagaattgtgggaatataggaagttatttatgtaatttttattcaatggaaaggacatcagtgaaaaaaatggttattcatggagaataaggtatttctgcaaataatgtctttaaaagtgtataaatgggttcaagattaagaaatctgagatctttaaaacaacagtcagaaaaatggacatgtataggtcatggcctcaagaaggacacagagagtgaacaaagtagagggtcgcagatgtggctgacaaggaacaatggaggggactaggaagggcttaataaatagttatgaaatagttatacactctagattttcgtttttaacgtatttcatacatagatcttcaattacttctagaccatttcctgttgttatgctttcaaagattatttcacttttactgctctccaaagcttcccattaactgtgtgacagtgtctgcctagcctcctctagtggagaatgaactcagggtcttgccgaacctctgtcatcatatgcctagttagtctccaaaccctcagggtttctgttttcatgcattccattgtgtgttatctaggctctgtcttttagttttagttttgagactgttctgtcactctcactcacaccctctatcttgctctcgttgaaattaaaggtctccttttcctcagctgttgctacttggactaccctcagctttccttagctgcctgtggttctttgcccagggctgagactcctgaacttttccccttctgcattaaaaagcccattggtgtcattgttgttgattgtccctttaatttgcaatacccttctttttcttagttaaataaaatgtgaagtaaaactatttttttaattttaaagaatccctaagtctttgttccttttgtgccactgctttttgccaccaagttagaaccttttagttaacatttgaaaggcttttttcttaaatccctttgctctttaaaatggcaaatgtagtattacaatgaactatgtatatgctgtggtattatcttttgaactacagagtaaagttctgaacacaacaactctaaaaatgttaatttaatttagtctatttagtgtactgatagaatagtccatttttactggatgactgttttggaatggtttgaggtaacatgatggttgggagaattttgctcagcaaaggttctgtgagtgttgtggtctcagaatctgagcagattggttcttgaatgagcacactttttggaagcttgggatgattgtgcttgtctgactacaaagaaaagcatcaggagtctcccctgtgtccagtgactgaaacttccatgtttgtttctgttatataaacacacatttggtcaggtacataaggaacttcaacacactaaaataccttgttttcttagataaataaaatgttaagtaaaacgtctttttttaaattttaaagaatccctaagtctttttccttttttatgccactttttaccatatatacatatacatacgcatacacacgtgcatatgcacatacatacatacatacatacacacgtatgtatgtataatgacaatttaagaatgcaggaattttgatcacaggaacacagtatacctacagagctcagtggctcaagagctggcaccaacacaagaacccctcagcatgatctgtggacggtcccatttgcgaaacccagacattcatgactctgtttgcattctgactgctgaagttgatctgtttctcagtgtgctgcatcaaggcttggaatcagagatggggatgggatatcctcttcctcatgcttgtgattttgttcaactccgagatcttcaaagtcccctgtgtgtcgtgatgctcagtgtcacaggagtatgtgagtgtggaagggcaaagcatgcacaacatatttcacatagttttctgatttcagtctgttgttggaaattattcactagatgaggcagctcaagggggaagggcatggtggttctgttgatagaatgatttttagcatgaagtctcaaataaatatgttatgggtttttttttgtttgtttttttttttacttttaagctctcctttgggaaaaatctccatgctttgctttttaaaaatgaattttagagtctagattttaagacaacaggcttttaggtgaattgagagtcacttgcaaacactgttctgcgtccttgtgtccattggctctcttcattttcctctgcgggccattagggtttccttgacacatttcttttcagggcccagcactagagactgttctagctttgagagaagaactagtgtgatgtagctctagtagaataacatgtcttatgaaattagagtcctatttcagtgttgagagagagcaagggcttacactgttctctcatccaccttctctgcctcacacagccccagtgacaagagaattctggacaggccagtgtttgagcaataaatgatttgatggtctttattctgtgactcattttcttataaaagtacctgggtttggagaagtaattaaagtttataatactttatggtggggcgtaaggatgggcaatgtgcaaaggaggtcaggggcttaggatatgtaatcagtttccacaaaattattgtgatgcttttgaaaccacaaaatgatcctcatcaagtaagtatctgtcatgacagccattacacacgcactgcagcaaaaattactatgtgagctgaagaaggaggaatcgtgcatgtctttctctttcatagctgcttagtggtttttgtatttaacttgctagagaaaatactgagaagaaaattgtcaagaattcagtaaaagattaaaaaaaaagaagaagaaccatcttgggagagaaattggcaagaagttattaaaaagttgggagggaaataagctgagaaatgagggtgttccaaaaaataaattccaccatagagattccacatgactaactgaatttgaatttgacctctggctctccatgttctgcatgactaacctatgagaaggtgagacttaacctttgaatagtcaacttaccaagttggataattcacagctttacagttagaagtaatgagaagataagtgccataggactcagcattgtactagctcagacataatgtatatctaaagaagatatttgaaacacattgaactatgtccctttcaaccagaataaatcacattgactataccgtaccatggactacctataatttactgattatatgtgattaggaaacactagatattatttactataacatgaagccaagaatacttatagaattactgaaccagaactaaatgggaatgccatgatattttatagtctgaactggtatttcactgcatttgagccttggaacttaaaaaatatgtactagctaatatttagggaaagagtatctatggcagcattgtgctaagcacgcgcatgaactggcccatggagttgtctcttctgatttatttagtgatagcttcaccaagagtttgcagtagagtgaaaatatgctgatttcaaaatgcaggctaggctttaggccctaagcgcatgaagttcccgtgctaattatcaggttaacacatcagagttcttaagtcacaaaaaccaaaatagcaccaggatagccactcctagtgagatttgaagtcaacagagcagtagcttatgaacataattataactgtctgaacagattacctcatgagtagactgtgaaactatgacatgtaagcctgaccttcatatttaaaacaaaagatttaacaatagggaaacttacaaagataaaaataattttatacaaatccttattatgtgtttccagtttctaccttttttaaggtataggaaatccagattcagagttctccatatttagatggtgaataatattatttaaaccaagaaaaaaataaaatataattttagatgcaggatggcgctccgaagaccctagctaaacttcacattcgtggaaaatttgacattttaccagacttgtaactctatagatgttcacaaaagcttacccagagaaggaatcctggtgtttgctaaattgaatgtgaagtcttctctagataggtgaaatgttctagcattgacagctattagaagtaactccatgatgataggataagtgcttttatttatattgcttattcttggtttagattgatgaattaaaaagaaattgatatcagctgggtatgatggcacatgccttaatcccagcatgtgggagatagaggcagacatgtctctgagtttgaggtcagcctggtttacagagcgagttccaggacagccagggctacaacacagatggagcctgtagaaagaaagaaagaaagaaagaaagaaagaaaagaaagaaagaaagaaagaaaggaaggaaggaaggaaggaaagaaaggaaggaaggaaagaaaggaagaaaggaaggaaagaaaggaagaaaggaagaaaggaaggaagaaaagaaaagaaaaggaaggaaagaaaggaaggaaagaaaggaaggaaagaaaggaaggaaagaaaggaaggaaagaaaggaaagaaagagagaaagagagaaagagagaaagagagagagaaaggaaggaagaaaaaaaggaaggaaggaaggaagaaggagggaaaaggaaaggaagggaaaggaaagagaaagtgtgcgtgtgtgtgagggagagagagagggagagagagagagaaagaaagaaaggaaggaagaaggaaggaaaaggaaaggaaaggaagggaaaggaaagagaaagtgtgcttgtgtgtggagggagagagagagagggagagagagagagaaaggaaggaagaaagaaagaaagaaagaaagaaacaaaggaaggaagaaggaaggaaaaggaagggaaaggaaagagaaagtgtgcgcgtgtgtgagggagagagagagggagagaaagaagagagagggagagagaagaaaaaggagagaagaagaagaggaggaggaggaggaggaggaggagaaggagaaggagaagaagaagaagaagaagaagaagaagaagaagaagaagaagaagaagaagaagaagaagaagaaagttgttaatctcagcaacttttcactgagctcccactataagcacaatggtgcaataagcacagtagatgttgcctgcaggtataactagtaacttgtctatagtgagatttttgttacaaaaatttatagcaggatggcatatattcattcagtaaatatttttgaatatatgcatcaagctaatgattataccaaactctgggaattacactggtaagaaaggcacaatgcttgctctaaaagaggtttttttttttttcctcatagaaaagaacaattaaagattagcataggttaatgtatcgtatgtttcttagggctcttttatacattaggaagttaacaatgttctcctaaaagatgatggaagtttccccgcaaggaagtgacatctaagtgagagctgaatgaagaagcagaagaacattttaggaagggaacagaatgtacaagggtgcagaaccaaaagaagatactgtacccggcaacgtggggagccttgtgcatatagtagagtaagcatgggcatctgtaaaggaaaggctgtgtgaagaggggcgaactggggaacggaaaggtagtcacattctcagaacccattctgctatactcaggaactcagactttaaagcttaggagactcaccaaaggctttaaagtaggaggtaatgccacacaattacctttttcaaagatgttttcagttataatgtatagttatcatgctctcaattaaatgactagcaaagctgctggcagatagataatttcggttatctatctgagagacagagacagaaggattctccaagtcagggcccaccttgtctgtgtagtgagttccaggcaagctggagctacacagtgagactgttaaaacaaacaaacaaacaaacaaacaaacacaaatttaaaaactattcactgagcataaaatataagatgtaatagtgactatagtcaccatgctacagggtagatctctagaacctattcatcttgtctgagacattctgtcttatgaatacttctctatgatggtgctatttgctgagcaagttgacacaataaaagcattgtgcttcattatggaaatctggaagggatgtagaattgtgatgtatacattctatcaaaatgtatagaaactaagaagggcaaaaagtaggtaaggtatataagtagaatatttgtttaaaatatctaaaacaactaaacatgtaatactcgagctaattgataattaagagaataagcacaactgagtggcaataggaggctccgcggaggggatctcccaaaggctcagtgcagaagagcagagatgacttacagcacaacaaggccaatccatagagcaggctgttagtctgagctcagtacatgaagggcaccttcatttggagaattaagagaatgaaaataagatattacatatgaaaatataaggtcagtgtagtgggaaattaaagaattccatattcgttggaaagtttttactacgtttccttgtggcatcattgctttagaacaaaggacacacttagacaaggatctttgttctcagcttacattttactcaaaggagatagacttttcacaggaaggcagctcttgagagacaagagattagttgggaacttcaaaggtagtggggtttgaagctcttctaagaatctgagttataagagacttcataataggaaccagaaaataatttggggaacatagtctagataacacaagatgttctattgaagtatggtattctttcccccaggcattagagttgtcctagcattagggataggtatagttagaggagaaaataaggaattgtaccacttaaatatccatactgccaatgccataggagttatttagagagtttccttgcatctgagctcgtgctatccagaagtctatgactaaatgagtctgaatgaggcataataggattacagacactgaatagcatttgaaaggatttttggctggctggctggctggttggttggttggtttcatttagtaaaagccagagaaatccagttcccatatcattctctagctgtaggggagttcaggaatcccagcacttttctatttctggacactctttccctgcacacataaaatcactgcactctacagttcctctcttaagaatgcttgagctatccattctgaatataaacccagatctataacacaaggaagtacacaatagcaatagctatatttatattcatacatacacacatgaaaactgattataaaacagtttagtttgtgttatgattttatacacacacacacacacacacacacacacacacacacacacatatatatatatatatatatatatatatatatatatatatatgctctcttctgtatgaggatgtgtgcatatcatggtaaatgtgtagaggtcagatggcaacattgggtactgagctttactgtctaccatgtttgaggcagagttgttccttttgttgctatatacactaggctagttggcttgtgagctactggatctcaggcagttctcctgctctacttttcatcttccagtacaggcataatgggattacagacactcagggcgtctagttttaatgtggatcctggggatccaaactcaaattgttgggcctgtgaggcaggtgctttatcccactgcaccatctttccaggccagagcctttagtgttgatggcaactactataacatcaatatttatatttttctttgttataataaagatgatgttaagtgttttttttttctgctataaacttggttactattcactggtgaaggtaaatctttttatctttaaatcgatgaaaaatcttacaccaccatcctttttagcagagcttagtcttttgaaaatgtttcttcatgcagctatttgtaataaagtttgacttatgtcaacaacctatcttatttattagacataagccaatttaaatgagctccttagtgtctgcattctgttatgaggcttacatctgtggatctctgtcagagtctactaggtatctgcttaccacactcaaatgtacaataagctatgtagaaatgatcactagatttttctctttttccagtgctttcttggctgcccattttcccatcctgacttcttcctacctgtttttcctacctttctcttccattggctatcttctgtatgcacaaaacaaagcagtgttttgtgctttttaagccttattaacaatggcattaactatccagtgattcaccgttagagatatgctttattgagcagcattcccctgaagttaatgttcccttaaccctggcttctcactgtgcccaccctcttcttcccacaagcgtctgtattgtcaaggttgttctaaaaatgataagccagccatataaaagtttatggtattttcctatcttcaaagctacaggaagctcaaataaactcagcaaatattgctcaattacacaagactattaaatgtaacaccccacccttctaaaaagcacctcctcttctatatctttcccttttctttcttagtataacagcctagatcattatggctctattgtgtgatcaggtcagagcaaatgaggttcatattaacaagtttccttaataacttctggcttgtttgatatagttgaaggataccaagatgataaattctaaatttctaagagaagtcagtggtaaatgtgaataaatggaacataccacaataagtatgttctctagtccttaatgataaagtaagttaatctttattgcacacttattatagtattactttgaccctctccagtgtgcttatctcagcgttttcaagtgttttacaacctcaaacacacacattgtgttgtgtgcacagtctgctttgaagttgacatttgcctttctgacgaggctgtaataaaggaagtcaaccacctgagagaacaagtgtcagatgaggatttcaggccctggcgagcaccgctgttcagggttaagtgcagaaacccaggttccttccagatgcctttgagtcaccacaggtgcagcaattttaaacaaataaagtttctgtgaattagctcaagagcctcaccttagtttggcagatatttgatgttatttgtagataaactacaccgaaaaaataaataaaatatcaaaaaattaaaataaattaaaattgggaatagagaataatttgaaagaaaagttaataatgttctccttctataagagtagtctttgattacataagtttatatttcaggataagacagttttcttttattaaacaaaattcttctggacacttaataagcatgtgcaagggcctctatttcatccatagcaccaatttaaaaaaaaaaaaaacctaaacgaaaatccaacagctaattttatagaatattttatagctaattttatcgtcaaatattatctaatacccttgtctaggacccttattccaatagatgcatttcttcaaggagttttatggataaatgcccctcaccccccaaaaaaaatttccagagaattttcagtattaacaaagaaaagtagcccctgtagctgtgtgccaggcttcctctaaaagccacgtgtgctcgtgcagcattctaaagagctcacaacacaccctaatggatggtcatgtacccatgctcatactgggcaacactagttgaactaaggggattattgataaaaataaaaagacaaggtttgagtaagaatggggtaaggtgtagaagggggcgttagagggaggaaactgtgggatttatatgatcaaagtgcattgtataaatgtgtggggttttcaaaaagaatatatgtatatacatatatttcaaaaagaatatctatgcattatctatgccattaacaaaaaccaggaaaaaatggaagggatggatgaggagggtttgcagggagggagggaatggataaatgtaattatgttatagtctcagacataaaaataaagattaaaaacaaatcctcatgataggcacgagtgatataacagtttttaaattgtgatttttacaggtggggaaaatctatgaagtctgaaaccaacacccttaagataaatatattaccagatttgagtatccttagtagtcagcaaaggtcaatgtttaacgatgcatgcaaaacagagtgctttgttttaaatcaaacagaatgttaagtactcataaatttgcagacggatgaggcataaactgagtaatcaaaccaagtgctcagattaaaggaggatattggcgtgctgatgtattaggctgtaatgagtgcaatctcagtagatccccgctgcctgtccctcatttcactctcagcagcatgaaatcttcactcacggagtgaaagttacccatatttctcttcacgagtggattcagtccataaacaacagttcaaaccttggctcagtaggcagatctactttcataccattgaaagtcaattcctagaaataatatgttatagaagagaacatgtatgtctcagtgttcttattttgttcaatgttaaaagcctggatagcatcaccaaaactgtgccacaaaactctaagattcagcaaatagaataatgaaatatgtatttttccaatccatttaatacaagttacacccatatatgcagttcagctttaaaattcacatacagtataatttgcacacattattctctaacttattcagttcccgttatctttttaagatataacaatacctatatacatgtttatacactaatttagggatgagtgagtgtgtacatgtggcagacggctcagatggaggtctgcagtgtcagtccttcatccttgacggccattaatgagtgtttgctgggaggagaggtccttggtcctgtgaaggctccatagatgcctcagtgtaggggaattcaaggtggggggaggtgggagtgggtgggtggggggagggatactatcatagaagggggggtggtatagggggtgtacgtggggggggaacgggaaaggggataacatttggaatgtaaataaagaaaaatatccaataaaaaaaccttcctatcagtgactttaatctttttggtcattctgactcctaaatcaaaatttctattattttgtctctattctatttagatgaatatgtaagagattataaatatactttcatgtttattaactatcttgatttcctaacatttaaacttgaacactttttgtaagatataatgatggataaaatatgtattatatagatcactgctataggaaacaattgaatgaagagtccagttttgttttgaagtccttaactgagtttgtcttgagactacctctacattcatgaatgtttccggcaggattactaaaatagatttctattttgaaaacataagaactattagctaatttttgacataaaaatcaccaagctgctttgccaaattctcccttggactaaattggtataatattctcccataccaaccatcaatcctactttaggatcagagttgcagtgggctcttcagactgcccatctatcctatgtgtttccttttccacagtatctcccccaattaaactcttggacatttgatatcatgttggaatctggttggagaattttgactgatagctgcatatattacattatcatcttctgtagtgatagtttttcttataattttatatagtcaattttatctaaatgccattttatgttttgacatttctgacttctcttaaagatgttcgttagagcaaaaaataaagacattctgtcctaatagttttacattttcatttatcaagaatatgggttattagaattatatggtgtgcagttttatgttgacattttacactcttaattaaaatataatggctgcttttcccgctccccttccttccctccattccttctcatgtcccttctctccaaacccttccatttcacctctctttcaaattggtgtcctctttattgttgttacatgcatatgcataaatatgtaaatactcatatcttagaattagccaagggtggtttaactagatggagggcatgctcaatagtgagattttctatttaggaaagtaatgtgatatatcttaatcatagaaacttttaatatcactcttcttcatcctgatcaaagtggtcagaatacagatttctagatttctttgaacaaatctactctactttgaagaaatttagtccactgtttagtttctgttgaaaaagaaattgactttgcatgttagctctatgatcaaattgtagacaaacatttaagataactagctcttccttacagaaaagtcatctaaagatataaatgggaaacaactattcagttcacaataatggcaaaccttaaagtatttagtgattgttatagctctcatgggacatttacagaatatgaagaaaatgataaatctattgaagtattgaattcaacatctgaatcaggattaaaaaacattttgatttagtgttgcaaactagaattctatgtaagtgcaaggtatttaaaagttgcaaataaattctaataaggttatcttaaactaaacttaatataaaatcttagaagtaatttattgacaaattattttggtggaatttttgcttcatcatatgtagacttgatatcatggtatttgtacttcttatatttgaaatgttagtgaggaagaattactgcattaaaattgttcaagtcagcacttgagactatgttagctcatcttttaatgatatattatttcaatagttgacatggctactatgtcaaaaactaagaaagccaactctttcatgaggtaggattatattttatcagatattaaatgatatataatttcatttaaaatcaaggacccaaaagtccagaaaatattaatatagaaataaaaaaatggatcagaaaaataagagaacccagaactaggaaccatgacagatgatagaggcatcagtaaaccattcatttgatgattattgttgccttgtaacaaatgaaagatagggtagacaaatagaaaactgtgccataagggttttgaacattttattttgaaaatagtattcaagataacacatatagctagctggtggggagtagatacatttatttcacaaaatctttttgcacatgataagtgatatgcacagtgaaaaaaagagaaacgaatggagttttttatatgcagcctataaagttgcaaaaactacatacaaatattagacacttcaaagaagaaaatgcaacacagcaaatatttaaaatctttgtgattaagaaaaatgtaaatgaaaagagaaaattagcaaaaattatcataatcatactagtacaacttagtaaattgtaatttaactctttagttgctttgtaaagcaatctggtggtaacttttgaaagtagaacatatgcatttgatatagtcatcctactcatgagaatatatcttccagctacagatcacaaaagcatatatgtattcagtgatattaatagtaggctttgtagggaggaagtggggagcaattgctagggaagaattgcatgcctcaccattttaatgtagtctggactacaaagagaaaccaatgacttcaaatgaaccacctggaagcagcttgcatggatcagctctcttgtagtattctgttctcacagtgttgtaagtactgaaacatttatttttctgagtgcctcaccttatagtgtgtcactcagccaagagtatggggattacaaacactgtttgttctagtggaaatctcacatctgtcattacgtcatcatcttcaaaacaggagggagtgttttagagacgtgatggtagtgaacctgaatccccttcctttttcctttctttttaaaaaagcaataaggtaacagaggaaataaatataaaattgtatttactcttgtgaaataaaatcaccaacaatctgtgctagctagtttttatgccacaggtagagttttatgacatgagctagaataatttgggaacagagaagttcaattgagaaaatgcctcaccagattggcctgtggacaagcctatgggaaattttcttggttgaggattgtgggaggtcccagttcatgatggttggtgccacctctaggccagtggtcctgggtgctataagaaagcaggctaaggagccacatggagcaaatcagtaagtagcactcctccatggcctgtgtttcactccctgcttccagattcctgcctgagttcctgcactggcttccctcagtgatggacataaaagttgcaaaatgaaataaaccctttcttccccaagttgcttttggtcctctgttatcacagtaacaaacaaacaactaacaaagaccccatgtctgcaatggtgtatgtgggaagtcactgatttatcccaagtctttggtcacgctgtcaggaatgcttgttagacggggttccttgttaaaagtgaatagcatggcaatctaaggaggtgatagaaaacatgagagggggctgggaggagagaatattaaaggaaattggtacctaacttgatcacattttaactactcaagtgaagctcttcatggaaggcctcgaacattctctctgtggtgtgtgctttattcctatcgtctaaataattaacatgccatgtatactgttgtataatacgttgtaaaattgttttttaagaagttagattgttacttaattctcgctccaggattagagcttatcttctaaattaggtttacactgtctggagtcctggactatttcttacaaacccaggtcgtcttttactgtgccttcatagttgttactacagaaaagatcattattgggcaaggaatggcatatgtgacaggagaggagtagtaagtggacaaggacagaaaaataatggaagtggtgaggatgtttgtgttgttgtttgggaagatgaatgaaagaatgcggaaataaactgacatgtcccgttgttagccactgaagaatgtggaaataaactgacatgtcctgttgttagccactgaaggttgcctgcatgttttctgtgggtgtggagagttttgttttagcttttcttattaacaggcttattcagtcttttgacactttttaaaagtgattttaagttgaaagtatatttgaatggcacttgagtttatatgatgggcttatgggtagtctttgaatataaacattccccaaataaatagttgcatctgaagaaaaatgttcttttcaattttggattgtgcatgctaaattttatttctggtgttatgctttggataataggacatcaccaagtttgcagaacaagacaacacagttcttggagaaggtggagtcacactgagtggaggtcagcgtgcaaggatttctttagcaaggtaaatatttaactgttggtcttgtgagcacttgctgtaaatactatgggtttttaattatacatacacatttctcttctgcttcctgttctgtctctggaattgatgctttttctttaagaactatagacattataatattcaaatttggtaaagatggtggtttttttttttcaaaatgtatacttttcaaaatgtatactcttatttatatttgtccaaacttgttgttatggtgcatggattgttatgaagagaaaagtatagaattctaaagaaaaaaagaaaaggaaattacaagtttctattaatcccccctttttccctgtccccagatgcctctgatttgaatttctgtttattcttctaagtttagatatacacattttcaatttttaatttttagaacataatctatgatagtataacaaaaataggaaggtaaatgatgtcactaaggtttctcatttgtttacagacaaaggacaaggtctccctatttagaaattaggatctttctgtgtttgtttctgtatactaggatgaaagtgtgtgccaccacacccggtaagctttatactgaatacatgctttcatttgtgatgctgattgtcctcatggtcatgtttaattattgtcagaacgaaagtattttatttaaattgtagcttccgtttaaagacaattggtggtatgggatttcaaatgctctctaattttattgaaacaaaattcttactacattaccaaagctgttaatgagaaattacattggctcagtggtatcttggtatcttggccatttatcttccatctcctggaaaagtaaacactaagtatcacaactgatccttgataccattccttctccccctccctttgtctgtgtgcctgcctgtctgtctgtctctgaatgtatgtttatgatctcaatccccatacaagactagaagcagaaattgttttctttattttatggaagaaatcacaagataattgaggtagtcagacattaacttgccaaaggccacaaggaaatgatacagtcactatttaatcaaggtcatcttgactccttacattaaactatgcttcggtctggaaaatacactgcgaaatcagatcaatagatagaatttccagacaatggcttcaaaatgattggaagctaattcccttatctgtgtggcaaaagtcatatcttaagcattccatttgagttttaagtaaaatatggtatgtgacttcagtatagtattaacatttactagtttaagatttagtcatatttgctatgtacaatatatggcactactcaaaacagttgtctactatttttatagttgcacatgttattctcatttacatatgcaataaatatgtcatccacttttatatgaagaatatacacattttaatcttgagaaactggccacacatgtgaatgagagtttttaccttggttttgcactaataatttaccaatatattcagagtaaattttacagaaaatcactttttattcccacttactgtttaaggtaaaggagtcatatccagtgatggcttcttgttggcagagtcttgagacagcacacacaaaaaaatcatatgtcaagaaaaaaaaggaatgtgtgtgtgttctctgttattcctttcctcatgaagccaccattatccaatcatgaaaccccaccttgataatcttacttaatcctcatcattttgcaaaatgaccaccaacagctttgctgttggactaagtttccatcttcttcctgcctctgatggatatgaaatctatattagtttcagaatggacaaatatatttgattatattacagagaaataaataaaatctaaatgttgataaagacaggagagttcatttttatggagtccattagctcttctgtttccttccagacaatttatagcataaagggcttgtttgtttgtttgtttatttttattctttaatccttttttacagttcagaattcatccccctcccagtctgcccccgactgctccccatcccatacctcctccctacccctaacctccatcgccaagaggatgtccccaccctgagcataaaagagcattatgacttaatctggaattttttttgctatttctattttattcattgtttttcttatttgtgatgattaagtacattttaaaaacaaaagtatcaataaatagtttctacagcatgtcctctgtaactgggatagaggtagcattattagtaatcacacttgaaaaaagtaagatgtataaagaaattatttcctttttgttagtttggaaaatatacctttatatttttcctattgtaagtcaactcaaattgtttttagtttcaatttcaagtgaaataagagctggggagagatagctcattggtgaggagcgctggctggtcttccaaaggctccaggcttgagtcacagtactaatctgcttcacaatcatctgtaattggtaacccagcacacctgacattttcttttggtctccataggcactgaacacacatggtacacatacatgtaggtaaaaaccgtcaaacacacagtacagaagttactaacagtactccctgtgctctgtgctgtgacacgtgtgctttcagtacatggttttgatgaccattgtataacacaagttctgtgtttaaaatatctattctcaatgacgtaaaagatcttgagggatcctaactttctttccattttgtttatagagcagtatataaagatgctgatttgtacctattagattccccttttggatatctagatgtttttactgaagaacaagtatttgaaaggtatgttctatgactgagttacttataatgctcatgttaaaagataataaatgtctgtttcaccaaaggctgcatattagcatattagctccagagtaatatccactatttctattgctcaaaacatcaggatctagcacagtgcttattcagtcctggcatccccttaatggtcaagggtgaagttgcttctgccacacccttttctgatgatcacatctgaagccaatttcttgattgctatcctgttctaacagttgatatttaagaatcgtttatattttgctatcttgaaaagtcttccagtattttaagtagtttacttttaaaattccacctaccattctgtattagtatttttattttatgttgttttagaaagaaaataatgtttattggtaaatgcccatactgtacctctgtcttagtcctctttagatgcccctctttggtcacagagaacatagatatttccttaaagtttttattagagcccaaatgggtgtaaaatctctaagaggtaacattagttataccatttgatttcaaatgttaaaataattttatgggcaacaaagtagcttattagaatagacattatagcactctagaaacaaatgagtttttgttttaaggatagaatgtagtgtgtgtgttaagatggtttgattatttattgatttatttcaaacttttactttaggacattgtgctaaagggttgaaatattctagagccctgcttattgtgtcttaaaatatgtggaataacatgtttcactaatggactttactgtacttacacatgaagccagcaggtctcagtcctgaagctacttttattcagaggtggaatactatggcatgtttgttttgacattttccgtttacgtttctgttgcatggtgtttattagcatggtttatccggccacaatcccaagaacatcgtgatctctgaatgaagggccaagtcccaacaatgccatctctagcccacagatcccagtcctcattgttgctcataagcttccgatcaaatctatagtgaagaagtccttatatgacaatgtattttcatagttcccttcatcttctcttgcttattctaatctaatgcaaacggctgtagaaggtcctagtacatttctgcctcccgcaaagctttttgcatctccttcactacagctgtgcattaacattgtcttctgagtctctaaagttgttttgtaattcccattgcatcaagttctctgtgtccattacagtctgaatgctgaccacttgaagcatataacactctgtaagacaaacattttcttcttttattctttcttttttctctttcttttttttttcttttttcttttttttagatgcaagctggctctcttttccctgatgattctcaatattatttattcttcaacttgaggttaataatcagagagagcctaaacattgtattttatttactaaagctacatcattaaggctttgataattgttaattcatttatttattcactttacaaaactcctctcctcccagtatcaccctcacaaatttgccccccccccccatgagtcttctcagagaagaggatgtccccttggccgttggatacctgccagccatgggacatcaagtcacagcacaagcctatcctttcccaatgaggcctgactaagcagctcagctggaggaaggtaattccagtggcaggcaatagattcagagacagccccgctgcagttgttaggggacccacatgaaggccaaacagcacaactgctacatatggtttagtctctgcaggctctctggttggtgcttcagtctttctgagctcccatgggcccaggttagtatactctgtaggtctttgtggtgtccttaacccctctacctccctcagtcctatcccctactcttacaaaagactcccccaaatctgcttaatgcttggctgtggatctctgcatctgtttccatcacctgctggatgaagcctctaaagagacacatttgctagggttctatgtgcaaacataatatcattaatagtgttgggagttggctctctcccatgggataggtatcaaattggaccagacactggtgaacttccttcaatctctatattttttagtatttttttttatattttattatctgtaatcatttttttaaagtgcagtcgttatccccctcctgttctgccctctgacagttcttcatctcattcctcctcccctatatccaagatgatgtctctacacccccacacatgcccacaccgcaccagacctccccattccctggggcctctcaagggttaggtgcatgcatcttctctcattgatgccagaataggccatcctcagatgtaaatatgtttcccaactagtgtatgctgcctggtgggtggctcagtgtctgagagatttggggaagttcaggtttgttgagacagctagtctttctattggatcaccctcttcgtcagattcttccagcctttccctagttcaaccacaggggtccccaacttctgatcattggatctgcttctgtctcagtcatctctttgttgggcctctcagagggcagccatgctaggctcctgtttataagtacatcatagcatcagtaatagcatcagaccttggagactcacgctgagatggctcccagtttggaccagtcagtggacctcctttccctcattcttttctccatttttgtccctgcagttcttttagacaggaataattctaggtctgagttttggattgtacaatggcaaccccatccctccatgccctgtctttctactggaggtggactctataagtgctctctcaacactgttgggtattttacctaaggtccctttgagtcctgaaagtctctcacttctcaggtctctggtatattctagaaggtccccccacatcccacctcctgagttgcctgttttcattcattctgcttgccctcagtgcttcactcctgtttcctaccctgctaatacctgaacatgttatgaaattcttaggcaaatggatgtcctcattcttaatagctgcctagtattcattgtgtaaatgtaccacattttctgtatctattcttctgttgtgggacatctgggttgtttacagcttctggatatcaaaaataaggctactataaacacagtggacttgtagcatggtgggacatctttttggtatatgcctaggaacagtatagctggctcttcatttacaattatttctaattttctgaggaacctccagatttatttccaaagttgttgtaccagctagcaatcccaccagcaatagaggagtgttcctcttattccacatttttgccaaaatgtgctgtgacctgaggttttgatcttaaccattctgattggtgtaaaggtggaatctcgaggtcattttatttgcatttccctgatcaaaaaggactttgaacatttctttaattgccattcaaaatttctctgccgtgaattctctgtttagttctataccccattttttttattggaagtttttttgtggaagttagcttctttagttctttatatattttggatattagtcaactatgagatgtgggattagtggagattttttccccaatctgtaggttgccaatttgtcctattgacaatgtccattgccttacagaagctttacagtttcatgaagtcccatttatcaattcttgatcttagagcctgagtcattggagttttgtataggaaatccccacccacaccccctaatccccaaatttctccccaacctccatggccatgagttcaaggctctttcccatttttcttttctgttagatttatcttatctggctttttttgttaaggttcttgatccacttggacttgagctttgtgcaaggtgacaaatataaatctattttaattcatttacaaactgactcccagttagatcagcaccatttattgacggttcttttttacctttgtatattttttgcttctttgtcaaagatcaagtatccataagtatgtgcttttactgttgggtcttcaattcaattccattaatcaactgatctgtctctgtaccaaaaccattcaggtttgttttttgttttttgttttgttttgttttgtttttatcactattgctgtatagtatagcttgaggtcagggtgatgatttcctcagaagttcttttattgttatgaattgtttttgctttcctgtttttttggtttctttccagatgaaattgagaattgttctttccatgtctttgaagaattgtgttggaattttaatgggtattgcattgaatctgtagactccttttgtaggatggccatttttactatgttaatcctaccaatccatgagcatggaagatctttccattttctgatgatttctttcttgagagacttgaagttcttgtcatgcagatctttcacttgtttggttagtttccccaagatattctctctctctctttcttccttccttccttccttccttccttccttccttccttccttctctttcttcctttctttccttctctatttctttctttgtttctttctctcattctctctttttttcttttttctttttttctttctttttcttttttttttcttttttttttttttttttggtgtttccctattttcattctcagccctgtttatccttagtataaaggaaggctactgatttgtttgagtaaattttacattcagtcactttgctgaagatgtttgtcagctgtagaagttctctggtaggattttggggtcacttatgtatactatcatatcatctccaaatagtgataccttgactttttctttgccagtttgtatccccttcatctccttttgttgtcttattgctctggctagaaccttgaaaactatattgaataggtatggggagagtgagcatccttgtcttgttccttattttagtgggattgcttcaagtgtctctccatttaatttgatattttctgttggtttgctgtatattgcttttattatgtttagatatgggccctgaattcatgatctctccaatacttttaacatgaaggcatgttatattttgtcaaatactttttcagcatctaatgggatgatcatgtgatttttttctttgagtttgttgatatagttgattatattaatgtattttcttatattgaaccaaccttgcagccctggaatgaagcctacttcattgtggtgaatgaccgttttaatgtgtgcttagattcagtttgctttatgagtactttctgaagttcttttgttgttgttgttgggtctgtgtatagtttagataacagagtaattatgtcatcatagagtgaattaggtagcattccttctgtttctattttatggaatagtttgaggagtgttggctcttctttgaaagtctgtgtgatgccttcttagcagaaaggttgccacaaaattttacatgagtctttctatgtggtccagagcacaaagtacctttgtctgaattacttgttcaaatcttccaggagccactgtactgtttttgtttgttcagttgttgttttcctttatatataataattttagcttcacttgtttggggggagctcctttgtatctgtagaacctgcatagtgccagaaatatgaactagcactgtagccatatgcatttcagaagtctgtttccagcaggactctagtttaagacaaagagaaaattccattaaatgaaattccccccttccccaatgctatttttatgatgctctgactatagttgccaatgtttactgtcataaacttacctaaaattatattatttatacttaagagaatttaatggttcttatttttttatattttaatggataaaaggaacagattttccctgtagtatccactgcaatacttaactttttttttccttttccattttttattaggtatttagctcatttacatttccaatgctataccaaaagtcccccatacccacccacccccactcccctacccacccactccccctttttggccctggtgttcccctgtactggggcatataaagtttgcaagtccaatgggcctctctttccactgatggccgcctaggccatcttttgatatatatgcagctagagtcaagagctccggggtactggttagttcataatgttgttccacctatagggttgcagatccctttagctccttggctactttctctagctcctccattgggagccctatgatccatccattagctgactgtgagcatccacttctgtgtttgctaggccccggcatagtctcacaagagacagctacatctgggtcctttcgataaaatcttgctagtgtatgcaatggtgtcagcgtttggatgctgattatggggtggatccctggatatggcagtctctacatggtccatcctttcatctcagctccaaactttgtctctgtaactccttccatggatgttttgttcccaaatctaaggaggggcatagtgtccacacttcagtcttcattcttcatgagtttcatgtgtttagcaaattatatcttatatcttaggtatcctaggttttgggctaatatccatttatcagtgagtacatattgtgtgagttcctttgtgaatgtgttacctcactcaggatgatgctctccaggtccatccatttggctaggaatttcataaattcattctttttatatctgagtagtactccattgtgtagatgtaccacattttctgtatccattcctctgttgaggggcatctaggttctttccagcttctggctattataaataaggctgctatgaacatagtggagcatgtgtccttcttaccagttggggcatcttctggatatatgcccaggagaggaattgctggatcctctggtagtactatgtccaattttctgaggaaccgccagactgatttccagagttgtgtacaagcttgcaatcccaccaaaaatggaggagtgttcctctttctccacatcctcgccagcatttgctgtcacctgaattggtctattcttattttcttaaatgttattggctcaataagtagctgcaactagaagtcaagttgtatcctggactttgggcacaaaaaaagttatcactttccaactaannnnnnnnnnnnnnnnnnnnnnnnnnnnnnnnnnnnnnnnnnnnnnnnnnnnnnnnnnnnnnnnnnnnnnnnnnnnnnnnnnnnnnnnnnnnnnnnnnnnnnnnnnnnnnnnnnnnnnnnnnnnnnnnnnnnnnnnnnnnnnnnnnnnnnnnnnnnnnnnnnnnnnnnnnnnnnnnnnnnnnnnnnnnnnnnnnnnnnnnnnnnnnnnnnnnnnnnnnnnnnnnnnnnnnnnnnnnnnnnnnnnnnnnnnnnnnnnnnnnnnnnnnnnnnnnnnnnnnnnnnnnnnnnnnnnnnnnnnnnnnnnnnnnnnnnnnnnnnnnnnnnnnnnnnnnnnnnnnnnnnnnnnnnnnnnnnnnnnnnnnnnnnnnnnnnnnnnnnnnnnnnnnnnnnnnnnnnnnnnnnnnnnnnnnnnnnnnnnnnnnnnnnnnnnnnnnnnnnnnnnnnnnnnnnnnnnnnnnnnnnnnnnnnnnnnnnnnnnnnnnnnnnnnnnnnnnnnnnnnnnnnnnnnnnnnnnnnnnnnnnnnnnnnnnnnnnnnnnnnnnnnnnnnnnnnnnnnnnnnnnnnnnnnnnnnnnnnnnnnnnnnnnnnnnnnnnnnnnnnnnnnnnnnnnnnnnnnnnnnnnnnnnnnnattcttctacatgataacaaccagttgtgccagcaccaattgttgaaaatgctgtctttcttccactggatggttttagctcccttgtcgaagatcaagtgaccataggtgtgtgggttcatttctgggtcttcaattctattccattggtctacttgtctgtctctataccagtaccatgcagtttttatcacaattgctctgtagtaaagctttaggtcaggcatggtgattccaccagaggttcttttatccttgacaagactttttgctatcctaggttttttgttattccagatgaatttgcaaattgctccttctaattcgttgaagaattgagttggaattttgatggggattgcattgaatctgtagattgcttttggcaagatagccatttttacaatgttgatcctgccaatccatgagcatgggagatctttccatcttctgagatctgtaggaaaatgttattggaggacagtcaactttattaggtatttctcagttgtaatgttttatcttaaagaaaacagattagtcaacataaaatataagagaaaattcattaaaaactaaaaatagaaaatctctaacatcttagaagttatatggacatataaactttaggaacatataataattcttttattttctagaaaaataaatcaagaccaaagagaaaatgatttggttaaaatcagatacttgattatttaaaattgtatttgattttatgtctgctagtatttactttacagtaagatatgctatttcatactgcaattcatgaggcacctaagagttatgatggagtggttatttgtataagtgtattaaataaagcaataaaatgctatgatagattttatgcaatgaaactttatgctgaagttaaatatacatcactatttatgaagtaatatcttatatcttttttatatttccaaagctgtgtttgtaaattgatggccaacaaaactaggattttggttacatctaaaatggaacacttaaggaaagctgacaaaatactaattttgcatcagggcagtagctatttttatgggacattttctgagctacaaagtctacgtccagacttcagttcgaaactcatggggtatgatacttttgaccagtttactgaggaaagaagaagttcaattctaactgagaccttacgcaggttctcagtagacgattcctctgccccgtggagcaaacccaaacagtcgtttagacagactggagaggtgggagaaaaaaggaagaactctattctaaattcattcagctctgtaaggaaaatttccattgtgcaaaagactccattatgtatcgatggagagtctgatgatctccaagaaaagagactgtccctagttccggattctgaacagggggaggctgctctgccgcgcagcaacatgatcgccaccggccccacatttccaggcagaagaagacagtctgttttggatctgatgacgttcacacccaactcaggctccagcaatcttcagaggaccagaacttctattcgaaaaatctccttagtccctcagataagcttaaatgaagtggatgtatattcaaggagattatcgcaagatagcacactgaacatcactgaagaaattaacgaagaagatttaaaggtatatacccgtcaagtcttaagatacatctcatcctaaccccataattggagtaaattttgtcacatactatgtatttcatggcatcccattgtggtctatgggctaaggatacaaagtccattacctgtgtaagcaacttgaaacataaaactatttctggttatcattgaaatatcatccccaccccacaaatgtgtggtaagccaaaacagggcctcagtgttgagtttttctactagactcatgaaatgatattcacttttataacttaataattgtctcctttagtgtttttctaggaaaaggcggaatagagtattatataaacaaatacttgcatttatgtagacaccaaaaagtgtttttaaggcatggccttgataaggattacacacacctggcttcttgacaagataaattcacattcctgcctgcatttagttagcatatattttctaacctttcagatttgtgttgtgttttttaaagggtttctctaaggaagatatgtgcagctcggcatatattagtgacagtagtcagattaaagttcttaactctatgtgttaaggagcaaaacgacctctcttaaaatagaaagcagtggaaaacaagagggcgattgtttaccagtggatgtaccttagatgaagttaaagcagagtcctagtggatgatatatttaatggtgactgtctttaatataaagttaacttttgggcagttgcaattcatttagtatctctgggcctgagttcactctgttgtgaaataaaggaataagtaattctcaaaaatatatgctcgatatttctataatctaaaactgatttgctaaaagataattcatctatatgatttaatatccatctaaataaaattaccaaattgaagtatatacattttggtttgtgtgcattttaaagaatgctttctttacctgattttgttactaagttatcaattatttcaccttccaggcaacacactttttgtctccttcactgtgacatcattgtccctattaacaaagaaataaaataaagttctgagaaattcagtatcttcatacattcaaacatcctacgatgttaccatttggtcttgattttaaataaagggcagtttagttcaacaatctaatttttaatcagtaaaccttattccaggttaataggcttccttctttgtgagtctaatggcacttaatgaacttcatggattttatgagggcatcgtttccctttagaatatatagactctctttttctcacatttttataatgtagcttccaaaagacaaaggcttttagaggctgtatttggaattggattttgtaacttaagttgtagctagaaaagcaaccatgtaatgcctaaggactatacaaatataagccagcttctaaaatagaagactcaagtagctagcaaattctacattgcccttgtctctggctcactgaatcaagctcaatcatgaagagtttgggagcttcactcatttgacaaaaggtgtgggctgtaaagcatttacatgctaaggtttgggaagtctcactgtgtttggtactttataaactatattgcttgagcagacatcctattctctgtggccatcatcacccgtggcatttttagtggcttttattttttaaagatccttggctgtaaatggtactgttcccttatttccctgaattcataataaaagctcagtggcagcatggagtaggattgtctcagaatcacacttcttttctcaggagtgttttcttgatgatgtgatcaagatacccccggtgacaacatggaacacatacctacgatattttactctccataaaggcttactgctagtgctgatttggtgcgtactggtttttctggttgaggtaagtatgtttgtttggaaattgtcactgtgagtttaaatttaggataaaaaagctgtatgtattcatatgagcatgtacacatgtgtatgtgcatgtgtacaacggtagtttcctgtaaagttcatcgcttctgaaaaccaagaggagctgacgaggcagctatgtggttaagggcactggttgctttcccagacaacctagccaaattcccagaccccacatggtggtttacagcatctgtaactgaagtctcaggaacctggtactcttttctggcctctgtgagtacaacatgtgtgtagtacacagatgtgtgcaggcaaaacattcatacacagaaaaataagttaaaactttttaaaatccacagttagaattactattgatattttagtacttcagacataaggaaatatgcataaatacaaatgctatatatgatgaattgtcataaaataaaatttattgggaatattttttataatcagcatattttgattcataagtattgtaaagagattactataacaaaatcaataacataactatgtcatctcaagtaacattttttgttgtttttgtgacaaggggtcctaaaatccacacatctaacaagtaaaataatagtttgttatttataatcctcacatcatttattacacctccatacatttagtttttaacagattcagaagcccaacctacaaagagtgaatatgagttgaagttaagtactgaaaagaattctagatgtccatctagatgatctaatgaggcaggcagtgactcatgtggtaatgatccttacttgcctgctgtacctttgtctcaggcagtgttcatcgagggaagctttcacaatgatgtaattacttcattgtgtgctgacctgctgcacaagaatgcagtattagtcactctattatttttcctgttgccatgataaagcacctaaaagttaaggaaaggagatatatatgtgctttctgtttgagggaacatattccacagaggctgggaaggcatgatagcagaagtagcaggttggtaggtcatattgcaagcacactttggaagcaaatagtgaaaaagtggggccaggctgtaaacctgaaggcctgctcaagaaccgaaggattccatagccttcctaaacagcacagtagcttgagaccaagtattcaaacacaggagtctttagcacattttacatccaaatcatcaacagtcacctgaggggaaaaaaaagacattttgggaaaggaagtcaggggacaggggcagggttcatagtggacaaaattcaatgatgcacttgtcagaaaacaatctaatggtgtgcttttctttcttttcgtcttccttccttccttccttccttccctccttccttccttccttccttccttccttcttttcatttttgtcagtatcttataggcattgtccagttaaatagctctcaaatgctagattaaaagaaagcaatgatatgcacaattttacaactaaacaacatatttgctaatgtttatgttgttttccttcaatcaaaatttacatagactttgtttaagtctaaactttttttctttgtgtcagtgccaatgtgtagatttcttttggctactggaatgtttcttggtacattccatcatggaacaggtgccaatccacagtggcagtttagtttttaaagcactgtttaagtcctaagtgacaagaaattcccaaatgcatatcctcctccattaaagtgatttagataattttaagtcttaataaggactgtatttccatttagatttatgactttatagcatctcttctgtgtgtgatcccttttgtaataggaaataaactttgtggcccacgctgtcttttcttattccttcacagctacttaaattagtggtgggggaaataatatttctcagtcatgtgttattttgaaaaagtgtatattttgtattttccctcaaaagcaatgttgtctctaagttcttaacactgaacaaatagactaatatttctattgtgctgctctttctagtgccccttcttggcagtgtattatggacaagagagggaaaatgtaaacactggattaatggatgtttacaataacctgatggtgtgtagagtgcagcatctcaagatcctgtttgctccttggtcttgtggtctttaagactgtgtcaaaggcctgctgtgtctgtttgttaataaggagttgttttacatcagtaataaaatggagattatagtgaacttctataaaactacctttgctagtcagtgttagagtccctttagcacatcatctttattgtgaatgtggattttagggttatatttgtcccacaaaatatgtgaaaatctgcaaattatggtgtattacattccatgtgatatggcaccgtgtgttacctccccaccttaggaataaaaatgattattacttattttgttgctgcttcagcgtaatcctccaagagtacccttctttgaaaaattacatgaactttatatagtcttgaatcattttgaagtgaaataatagtgtgtattccattatctctttaattcccaaatatttttcctaaaggcttcctaccaagtatttgaaaaaatttttatctactgtagtcagtaaatatagcttggattggtcaatctatgtgatagacaagaaactactttgttaggatctaggcctccattggtaactacgtatttctcttattgcttctattcagagtgtgttggcagtgctggtgctgctgatttttctcttcttggatcaaaggagatgtaatggagaagtggctcagaacatgtgccccatctagggtctagagtcatttgattagtctgaagattgaggaagacttttctataagaataaagacattttaaaagcttagattattaccaggtttctagttttgcattaacttgagtcttaagacatcagaagtttttctttcttactgagacagtacacagagactatgtgtacattgagaaaacatgacaattaaaataataccattagatcttcatcatagaagttaataagataaactaaaataaaatatattatttaaacagacaacccttacctttcctgtatgattcaataaatagtgtttgtggaaaaatgaatgtgcaaaatgagagagtggaattccataagcttaatgtgctcttaaccaatagcaattgctgaagtgacttcagaggtgtaaagccaagacactaagagtgtgtgcacttcgatgttggtcatattgaatttagaaatgggtgtggaaggcttagataaagacgctagaaaaaaatcaactgtggattgttccattgcaggtggctgcttctttatttgtgttatggttgcttaaaaagtgagtatgccacactttatgtggattgtgttttgtttatatttagaggttataaactattttaatatatactatgttcattacacccttccatattcctgctgattatgaggggagaaaccatgtttcaataattcttcaatttctgaggagactgggtcccagaacaaagataccaaattctgcactcgtgctccatgtgtaaaactgttttttacacatacaatacaatagtattttgcatatagcctaggcatatcaccacatatactttaaaacatttctagatttatatgatgcccagtataatgtaattttcatgtaagtagttatatcctttagagaaatgatgataagaaaaataagtatgtgcgtgttcactaaagatgcaattttaagaataattttctcagtaaactgatggctgaatccatagatacacaggagatacataaggtttgctatatttgttcaagttgaaagctgttcagtgcctttatctcttcatttctaaaatatatgttgttttcagttttcatgaaatgcaataaaatatatgaagcaacagttcatatttaatagtttctactaattattttgttcaaataagaatcaattacatctatttcaattatgagaaaccttaacaccttttggcaatacaaaatttataaaactaagggtatagtctcttttaaagtcagcatttcatgtttccttatacttatttttattagtgattcacttggcaagtttggttgtcaaataatccttttcttttgttttacagcaaccctgttaacagtggaaacaatggtactaaaatttccaatagctcctatgttgtgatcatcaccagtaccagtttctattatattttttacatttacgtgggagtggctgacactttgcttgccctgagcctcttcagaggtttgccgctggtgcatacgttaatcacagcatcaaaaattttgcacaggaaaatgttacactccattcttcacgcccctatgtcgaccatcagcaagctgaaagcaggtacttgtgactaggtataaagtggagctgcccgcttgccatctgtgtggctcatcggcctgcctgccttcagtagcagcatgagcgggaacacaggcatctgcccctcatccaactaccttgtttggcatttctaagatactgcaggcaagcatacccatgctccccagcatttctgtatcagcctagtagagtaaattatcttgttacaatgtgatttgcgttcagtggactcacttgaagcaacctcttttggataacttgaccttctcacatacttatcttgatgggaaaaaaaataactgtttcttgtgcctcttcaagagtggtcatatgaatgcattagatgactttggggggagggggatagtttttaattattatgagacaattatagtacatgatccttgtataatgcatttgacaccgatttaattacagtcacagaaagtaagataatttgaaaaatagaaccaaacatttcaaaacctatggtaagaagggtctttgaaaatgtggtgcattgattcgcctctgagttagcttactttaaagaccatgaagataataagcctcctaagttctccttcactggagagcctgctgtgtgacactaagccagggaagtcctggcgcatacaaataattaaagtatcattcatgtcaggcatagaaattcaactaaatgtagagaaagctacagtattgagacctttttactgtaatctgtctaaaaatctcaaatgtgcatcagatttttttaggtgacaaaattaagtgttgatgtatgaaaaagattatatttatcctggagcccttatgcctcggcaaagggttgcctcatttgcatatgatcctggtcatcctcttttagtctaagaatcttaaaactaaggaaatgggcaattcactctttaagagaggcgttctctcacatttctggcagaattgaacatggacacgtggaaaggacacagacatttgaggcttaggcttagtttggccacacaccattggtagtaatggctgtcagcagcctacgtgaaatgaatattagcatatttctgccattcttttctgtgaggttgttgctctcaaaggaagtgaaccatcctctttctcccaaaatccactcacagcgccctctccgccctctctgttttccctctcagtgatcaccatacattcttcttttctcatttgtcttcccaaaatgtcatctgtgtctcaggttagttcctaaccactttatgctgtgttcctccttattcaacctcctggacctaagcagcaagatgacctcaagagatttccaatcagcctgcactcattatttggtagctgtggtacatatagtttgcttttaattaaaaaaagttattagattcatggtttatgattctcatctgatactgaattattctgctatactttgcaacaacttggaatttcccttggatgagctcttcagaattgtgcattgaccatgcttttccttgacagtaattttctcaggctttttttttcctgttactttctcccactttgtcatactcaaattgcgatcatacagacacataataaaggtcctcagcaaaatgcggttataatacacagatgctcctggttgaaataaaatttgaaatataaatatcactatgagtatactattttgcccaagcatactttcagttttaaatagttattacaaatgtcatggaatatacattatttctctgacttatttatggaaggatatccataatgggtatccatataatatattcataaaatatcctaaattaatatgttttctaatgtatcacatgtctgcataagactttttacttttgtctgtgggtcatataaaatagacatggaattatctatcctattgacttcaaaaatctcctatctgggaaaagagataagttatatgtacacacacaagcagctgtgatatacagcacgtatgtagtctctgcaactcaggcatacagacaaggacaggaagagatttttttccagatgcagtaaataccctactctcttgcagacaggctatttgaattgaaccaggaaagaggtacagatttgacaagaggagacagggcttttagatagaaaggaacaacacataggcaaagtaggaaaaggtagactaaagaagacatacttaccagaagcagtgggtttgaatagcaggatctaggttagttaaggacaaattatgggaaactattaaatattaaagaattttggactttaatccagtaggtaatagtgaacgagtgataaggttcactattacattgttgccatagtgttgtgttacactttatctgttggcttagctccttttttagaagatgaattcctgcactacaaggagaatgacttaatcacctccctgtagccagcattaccaaagcatgtagtagacatggaatttttagttcattgacacaacaatcaagactcaaatggggtgaatctggaatttagaatacaggttgaagcttatattcccagtgaagaagatagacaaaataaaaaaggaagtctggtgtgtactgagagagacagctgtgggttttggatcagcatatctaaatggcagaaaactccacagggagggtgtatgtgccctgtttggtggagttgaacataaaaaattgatgaaagcaccgccattaagacaccttgaaaccgagagcagcagaagtgaggcccaaggggtacgatgaccagacattcctacccttaattatagtaagaacttgattaaagacactgcttggagctgagtcgtaggggactatgtgttttataaaagttcaaaagtaggaggcaataacttaaataaatacatagaattctcaacaaagctaatatttgtaagttcttgaatttctgactagatgataattcttattttaaatgattttgctgtgctgtgaatttaggataaaatatattggtgtccttctaaaagtgattaatatttgagaatatttatttgtatcacaggtgggattcttaacagattctccaaagatatagcaattttggatgactttctgcctcttaccatttttgacttcattcaggtttgtaaagaataactattatcaagtttttctatttgccataaagttttgtgaataatttcaaaaggaagcaagtgaatttgttgctaattttccacatactagttgaagtcctggctagtgaataagttttatgaagaacagcaatgtttaatagtcataaatttagtgaattcagtaactagctatgtctatctatttcaggcatgccctggatatgatactatcctcttgaattggtttgaaaggtacaaaagacagttttccgcccaatcattgaccataaaatttgactcatagaacatttcttaagtccaacactgaaatgaaaatgaagttcctggagaggctacactctaatccagccatacccatgaacacttaaacacaaatttagctaagcagtttccccacaaaagtataacttaatggaaggatgaaaaatggattgttgaaaaaatgtgaaggaaaagaaatatttagagcctctgaggctctcccttagtgactgctgtgacagacctccagggtagccatgctatggagatgactgaaagtcacttaataacaaaagaaggccattgagtggagaccaaagtgaccatgaaagcatcacattaggactccaatgtcaaaggacttacaggagttgtaagctgatactcttgcctgttgaatcaggcagttttctgagctccctgttggcttcctgaagcttcagagagcaaatgcacttggagaagtagttgtaacacaacatggtccttgttggaatgacacagtctcatagcttgtcccttcccttctctttaaaatagtactgcatctctgaaaacttggaaaaaatgtggaactattgcccctgtatgtatacacacaagccacatcagcagatgcagagaaagcagctgttggttcacctcctctgaaatgattgacataattaaatacacttactgtactaagtgaactgtgttttggatttccttcattgctgtgtttaaagatataactttacggtagcagcacctactggaatttttttaacccaagttttgatttatgtactcaaaagtgttagtttatgtgtgtttctttagcatgagacatttgtttcccagtctcagaaaataaaccaaaggtccgtaataaaagtatactaaatactatatactaatataatataatgcaatataatatagtatggtcaaaaactggaatgtggatatctatctgaatctgcctacaaaagtcttaaaaatggtgcttgagtgatatatatatttatggtctcctaagtatctcttgttatttagtttatctcagaaatctgggagagctaattttcaaatatttatcttacaaattaaaggttatttgacatttgtgatggctttcaagtccttttatgtatcttaaacacttttatttcaggttctagagctgctaaagcttcatgaggtagcaaatctctcagagctttcttttgagctgagatctaccctgcccatttcccttcaggacaccagccagaaagcccatggaaactagtggagaattagcgtatgaaagttacactaagttggttttaaagttagcacatgtttgatgtcatgtggaccatttatttggtaaactgtagtgaggttgcaaacagtattctaattttctggggtgtaatacagtaagatgtctgcattgcatggcagaattcattttgatagtgtggctagaaaaatacttaatttcaaattaaatccatctactataaaccttttgagttactggagtatctccagttattacagtaggcataggtgaggtgagatataaataacacttattaaataatactcctttcaatattacatatgaaaaattagagtcagaaaagtgaacttgtcaacatgactaaacctaggtttaaaacagatatttgtaatttaaaatgttctgttaagaatgtttcattttaaacgactccaacaaaatcacaaaagataatatttatactaaaattattttgaaattttaatttttcaatggacaggatgaagaaaatcataatcatttcacatttacttcttataaaatttagagtgtgtgataaataaaaatatcccaagaacagaaagcaccgtgtaaagcttcagcagctgaactatcacatcagcaaactaaacaatttgaacattgtttctctgcagccggcagactgccttcgagctggcaccttattcatggatgcatgtttcctcactgagaatagtgcagtctaagaacgtgtgtagacacagctcagcaatgcccctgtccacttaacaaagtgaaaatgtctctcactaccatgttctctttgaccccgcagttggtgttcattgtgattggagctataatagtcgtctcggcattacaaccctacatcttcctagcaacggtgccagggctagtagtctttattttactgagggcctacttccttcatacagcacagcagctcaaacaactggaatctgaaggtacagcatggaatgcattgcaggggttcctggaagtgggtgagggggaccacatttactaaccactatactgctttaaatctctaattatataacagtggtgtgtgtgtgtctgtgtgtgtgtctgtgtgtgtgtctgtgtctgtgtctgagtagtagtagtagtagtatgtgtgtgggcatacttgctcgtgcaggcatgtgtgggaaccaaaggctacctttgtcaattgcttctcttcttttttcccttatcatcttctttctacttcctccttctctgttccctccctccctcccttccctctccctctctcccccctccccccaccatccctcttttcttccttcctccctttcttccttcccttctctctctctcatgagtttctcacagaacctggcatttgctggttcagctggactggctggccagggaggccccgggacccatgtgtcttcatctctagcattacagacattcagtacaggcccaaagtttttcatgtgtgcttggaatctgacctcaggttcttatgtttgtgtagcagacatattaccgactgaactctcccggcccaacaatgaaacttataaagtacgtgaggattgactttgttaactactatggctttgttttggctttcaaacaagtgtatacccttaccattgtgtatgcatagacatgcatacgttcttatactgctcaaagtcaaaaccagcaatgctatttttcctcagagtttctcccagatttcaagtgagactggatggaattcttccatttggcttatcgtcttcaggcctttccttattggcctggcttggttaatctttgctccatctccttaggaagcatctctttcagaaggaaccttggtgtgaggcaattatttttttaatattttttattaggtattttcctcatttacacttccaatgctatcccaaaaccccccatacccccccactcccctacccacccactcccacttcttggccctggcgttcccctgtactggggcatataaagtttgcaagtccaatgggcctctctttgcagtgatggcagactaggccatcttttgatacatatgcatctagagtcaacagctccggggtactggttagttcataatgttgtttcacctatagggttgcagatccctttagctccttgggtactttctctagctcctccattgggggccctgtggtccatccaatagctgactgtgagcatccacttctgtgtttgttaggccccggcatagtctcactagagacagctatatcagggtcctatcagcacaatcttgctagtgtgtgcaatggtgtcagcatttggaagctgattatgggatggatacctggatatggcagtctctagatggtcgatcctttcatcacagctccaaactttgtctctgtaactccttccatgggtgttttgttctcaattctaagaaggggcaaagtgtccacactttggtcttcgttcttcttgagtttcatgcgtttagcaaattgtatcttatatcttggatatcctaagtttctaagccaatatccacttatcagtgagtacatattgtgtgagttcctttttatttttaagagagtaaacttaatgtgtgtttctgctttgaaacttaggagctaaatcaattcacagaaattctacactgagagacttagagattgagtctcaaaagacaaaacccattttctcagcagttactaatttaggattagccaagaatattgactactcttagacaaggaaatgtgagttaacaaggaaagtggttctgtccactacctacctatctaccatggtcagcaggtaaaagggcagggccatgcactttaaaagtaaattccggtttcagtgagaagcccacaccatagatgcttatcgtgaagttactctggagttcatctttgtcagaaacatggtagtatgaaattctgttctgtattgcaagctgtacattatctcctatgggatgatttacaggcaggagtccaattttcacccaccttgtgacaagcttaaaaggactctggacacttcgagccttccgacgccagacttactttgaaactctgttccacaaagctctgaatttgcacactgccaactggtttatgtatctggcaaccttgcgctggttccaaatgagaatagacatgatatttgtcctcttcttcattgttgttaccttcatctccattttaacaacaggtaatctgaacttatttttttgtcagtgattaaaatgccatatgtttatattaaaatatttagatgattttaagtagacttgtagagcttacaagtaatttctttgcatttctgttgttttgtttctaaataatttatttaaaggtttatatggtattgttactagtttcactatttaagaataatgagacactgagtcagatagcaaatatgtgactaacaagaaaaatgtctttttcatgccaatgttggaaatctatatggggaaagaaaaacatatttgtatacacatgcacacatgtacacacacttatcatttcacacttcctgtaaaatttcttcacttaacaactacttattggtaaaattcttgtctaatatgaatttgaataaataaaaattagcatagaagtaaaataactgacataaaagtgcattatttttcaaatataaatgttctgaaatttaggatcttcaaggaaaaaataagtcacaataagaaaaattaaaatctatacagataaatgagtattttaaggtgctggatttctgagtcaaaatgctatgttacttatatatacaccattttattatatataaaatattgtatattatttatagcaaaatttcagagtgaatgacacatcaatgccagatttgcaacattatttgattataagaacagaattgctcaactccaatgaagcagcctttgacaagttatcaaattgtgtcatgcagcctcagggtgggtatcacacttgattacctgaaggaaccagcacaggcactggagagtcaggcataagtatgactcatgtagatactggtttctgttctcttcattccgtggatgatgcatttctttctcactctgtctctctgtatctctctgtctttctctgtctctctatgtcatatctatatctatatacacacatatataatattatataatatatttgtatataataaatgtatattatgtatatatttcatgtataatacatatataatatatacacatataacatatatatatatatatatatatatatatatatatatatatatgagagagagagatctgtgtatgtgtctccctctctcttcctccctgccctctctcagaataatagttatcttcatttaacaggaccataacacatgagcttcatgtgccatcttcattcttcttcttgaattaatggtatggatcctgtgtccaattattaaatcctagagaaggcaaaaaacatattccttctggctttgggcccactgcagattgacaactgctatgaggatggttaacttacccatatattgctttcttcatgcatggctatgaaatgaatctatatgtaggtatatttgtggatacacatatagtcattttgacaccttaaaataatttttggaaggtataatattgattatttgtatataaggtaattcagaggggatcaaagatgactaaattacatggattaagacttcacaattaactcaagccaatgtatcacatgctgtatcagactgtatattatgactaagtcctgggttactaaggccagtactcaaaatcttcactagtcaacacagtagaacctccaactgtgatgagcagcacagcccaggaacccagccataaccaaccaactctattggtcttaattttattgatgatattaacttacattaatttacagccattaattaacttccctaattccctaatcgtgtgggcagatgcacactaataacactttcataatattgtgtgatattttgtgtaatacagtgtagtcttgtttgtaataaatggccagtgattattaaataatactacttggtattaaaatattaccttacttttttttaaccctcagaataagaaatgtataagggacctatataaaatgaactattaacaattttcaatatattatttgatattaacacagcataacatgtgttatctatggtgtacctaagaaggagaaaatgtcaacatgaaatttttcagctattaataggatgacttgttcatcttgatgtttaactttatagtaatttaatggtagattaagcattatcatttgggatatgatatcctaactttaaaataatttatgaacacttatcttaaaaatatttgtagtcataatcctcattttttaaaattttaattagttgccctttctaatcctaaatgaaatttactctaaaataacatattaacactgttcttttcaagcagattgggcatttttcttcttgcttttaatgtaatgtgcaaacttctcccttaaatggctggcattagttttctgactgcctggtgacaagtgaagactcctttcttagaaacagcttttgatgagcagagaccatgacccttacagaggtgctcagcacatgtgctagtgctactcggatggatgtggccctcctttgagttctgtacaggatctcatttcctatttatttttatctatctatctacctatctatctatctatctatctatctatctatctatctatctatctatctatctattcactcatttatggtgtggtattcaatcagtatttgtttatattgttacatacagagtaagagtagacaattactcactaccaacattaccttcaagacctaagcatcatttaaaagtgcagcagttcccaatattcagtcactatttgattttaaattctggatgaaagcttactcaatgaaggcattattgttcaaaggagtcactaaaactgcattaaattgaaacataaatttattggcaagcgatgagagagagatgaatacaataattcacagaagagagaaataacatatactttgttcaaaacccttttccatgtctaggtgaaggagaaggaacagctggtattattctaactttagctatgaatatcatgagtactttgcagtgggctgtgaactcaagcattgatacagatagcttggtaagttactatttttaattttatgaaaagttgagagaacaaaacaaaaagagtaggcactaacatatgaaatatatatatatatatatattactcagtttaagaaataaaatattcaggttactttaaggacattctgtattccacattaagctgtggcatgatttatctttcgtcctcatggattatcattattatgtgtctttgccctggagttttccaaagcaaatcttagaagtggaagacattgctgaggttagaatctccccaaacttggcttcactaacgccaaattactccagtctgttgtgccactatatacttccagcaagagagcatgtgaatgtttccagcagtatttcttattcaggcttttacaattttgccagcttgatgaatgtgaagtaactactaaaatttctggataacttagtaagtctctattgttgaccacttggatttttattgttgtttatttctgttaaatgcttgtttctgttatttgcaacctgatgaggtttgatgtgcttgtttgtttttccttatgttataggtgttcttaagtcctggatcagtcatcagttctatacatttcaatggcccttgagccagtggctttactcacagtataccttaatgaatggaaacattgaatttgatagagagtagtttattttcctttacctttatggcttgtgcatttggtgtcttgtttatgaaatccttctgtatattaggtttccacattcaacagcctgacatttttcataatcctcttgtcttattttgaaaatgtctggtcatagtgtttgtcattgctctgttcctttgtgcttaacggatgctgtcttgcatttgaggactttgtgtgttcaaagaccatatttggtgtattcttccatagagtgagagcctgaagtgatatttgtgtgctaaaatgatacaaaggactactaattcacaagggccagggcaagaaatgaaaagaggttccataaacttccctatttatattttaataaaagccatattatcagttagactttagaattggcctgagaatgtcataactgatttctttttacatatttgattacagttatttgtgtcagtaaggaatgtccataccacagcatgagtgtggagggttcaaagggaaactggtggggctcacctccctcttttcaccatgtgggtcctaggggctgaactcaagtcatcgggcttagcagcagttgccatcacatgctgatctgtcattgcggacctgtcactgaagcttaaggctttggacatacattcatccattccttatgtcatttctaagaggtctagaatccatacaactccctttacttccattttcagacacccattcatgtgattgcaaaatttctatagttataatatataaatacatacagtatatttttttcataaatatgtcacaagggaaaaacctaaaatcttttaaagcctcttcttgtttgttcattttcatcattccatgaggcagcttagtaattccttgaaatacagttttcttaggttttatttagttagaccagtccctagtctcttctccacacttcttggttttgtgttggaattagctgaagaagattatataaatgctgtttctatttacttaaatttttaaaactatgacttcataattcaaaacccttgtgcacattatatatttctttacataaaaattctcttcttgtacatgtacaattccctttgcaaccttaattttctggcttaatcacatagccaaacttttgacattgcaacacaatgttgtcacctacagagttcacactcaagatatgtacagttaagctcctaaacttagtcacacacattcaacctaagattttcagtaagtagtaagtttttgatttgtgttgggcttctttcatagctctgtttgtgcagctggatgtggcctgtgaactgtggattggacagtcctgttagaatagcctttgcacaggctgacaaaaccgttgctaaatacatttctacttcatgtatctagtgtccatgaaagacacttaaagtatttctccaggttttcccatggctatgctagactttgttgtctgacattgtatctttcatggtgtgtgaaaggaccctttacagacctattgtgtttgtgacatggtctatgaaatgtatcaatatttgcagttgattacgttttcaaaagtaatgctcttttgtttaatatcaaagagcgtatgttagtttgcatctctttgccaagcaatgctggcgggccttcctgggtgttggtggtcccttcctgctattacctcccatcgtgctggtctcacctgcactgctgcgaaaactacccggtagtgctcttctttccacctcttgcttgggaatctgaagggagaatgtctgatcagtggccagtagtgctcttctttccacctcttccttgggaatctgaagggagaatgtctggtcagtgctttcagatttcacacccacctgatgtaaccccaaggttttacaacactaagcaaaaactcagtgtgatgtaattttatcttactgtgctttaaactgcatcaagagtgatctgagtttaaaatggaacaaatacaatgttttctttactatattataaagctaagtacaaggctattcaggaaaaacttcagagttggaataattacttcatttcccatctgtcccaatttaaaaattaatacagtcaatttgactatgaagttatgaatatagcagtataactttgtttttattttctacctgttacatacccacatatctctagctttctttatctctcagctattaaatccaatatcacaacaacacaagttatgttgtgtttattatcacatatctggaatgctgatactcagaactatccagcaaccttttcattatgttttcataataaaatttactcccaagctctttcctttatttctacatccttttagacattataataattctattctttaaactcttagccaaagacctttctatatatctcacagaaatacatacatataaccagaaataattcccttacatctctctactatctctttctcttttgtctttttaaaatttttttaattaattttttacactccatattccattccccacccccccatccactctcccactgctccacatcacacacttcctccccactcccccatcccccactcctccacccccacctgatctctaaactccctggggcctccagtctcttaagggttaggtgcatcatctctgaatgaacacagatctggaagtcctctgctgtatgtgtgttgggtgcctcatatcagctggtgtatgctgcctgtttggtggtccagtgtttgagagatctcaaggttaattgagactgctgctcctcctacaggatcacccttctcagcttctttcagccttccctaattcaacaacaggggtcagctgcttccattggttgaatgcaaatatctgcatctctttcagctgcttgttgggtctttcagagggcagtcatgatagatccctttttgtgagcactccatggcctcagtaatagtgtcaggaatgccttttgagctggatcccactttgggcctgttgctggaccttcttttcctcaggtttcctctccattccaatccctgcaattctttcagacaggaacaattatgggtcagagatgtgactgtgggatgacaaccccatccctcacttgatgtcctgtcttactgctggagctgagggccagcaggaagagtggaaacagggcaacctcaggaaataggaggttggggggggggggacgacgaccctccagaatgcaccagaggcctgggaggtaagagactctcaggaatcaaagggagggaccttagatgaaatgcccaacagtagggagagggaacttatagagctctttcttaatgtagcatactactagaaaatcttgcagtagacatgacatcttagagtatgagtacaggtttattgaatctctagtcatatgtactctctttacccatgtccttgcttctatctagaggcaagtcctgtgtagttgcctgccctttatgagacttttcaccagtgaatactttcatttggtctccagtttctgccctaattatttgacctgtttacagcaaaacttctaaagagattgcctttctctgttatatcttctgttctttacacagtttcttccatattcatcacccatgtgagtcacaataaacatcatgtacaaagcaatgtccttgtcttctgaagttgttgagcactatttcacatggatgaatccttatactatttcatttttctgctacctcctgggccttcatctcatgtatcctttaaatcatcatttgtattacttcttctttccacatgcattctctatagctattggtatctaaccccatggttcaaaagttgtctcttgatgaattatagattcatatatttagtgtacatctctctattcctctctatacatgtccagctaccatcttgatacctccatgaatctataaaatattctgctagattgttttctagtagatttgacatgcaagcatatgagttcctgtacatcacctcagagtgcacatatgatcttaagtggccatcgaaatgatacaaagtttatactccctgaaaggccaaataaataaatgagagccaacaaaggtataaaaggtgatattttaaacttggcagtattaaaccatctggtgtctaagaggttgctcacacataatttcttcatttgataactcatatccttccagaactttctaccacagaaggaacagaaagtgagcagtcttaatatgtgaatgccattgccttcgtttttcaagaagaccagcaaataagcatccctgtttccactagattattgaactgaactgtatgtccctagtaaaaagaaggaagttgcaaagttaagaacaatgagcttataagacttccatttagatcactattagtgaagttccagaaagttcttgcatggttggtgcaatctgagaagagttttctgtcagcacaaagtcactctgtgtctcctttgtgctctcatcacctgtgtttattttgggttccactgaggatcaggtgactaattgtagaatgagcaacatgaaatgtgggaggacaaaaaagaatttctccttccttcatgactgccgtcaccaaatgtccttgtattgaaagcagttcctgttgtaccaatctgacggatgagttaattcatcctctttgtcttttgcctccttttaatggtagcttgattgtggtttgttgttgttcttacaagtctttgtggtgtatttttcaagacattatgcattcaaccgcaaagagccttgcatttctttctggctcagacactaaaaagttgagtgcctttagacaagtcatttttcctcatttccaaggccttattttcctcctctgtaaaattaaatggtttggttaggaatttttcagattgctggcatgtttgacattctctctctgctgaacccttccatataaaaatataaactcttaacctacatgtagatattatttcagttcttaggaaatccacacaccaaccctatcctgaatgctgacattcattgaatactagcctgtagttactacagctgactcagtatgttactacagccaacaaagaaaaagtaactaatagaatgatatttttgaaccttgaattaagacaagaaatttaacagccccctcaggaattgctggagtgtacaaaattgtgtgataaacttggaaaattgactagggctttggtcctgccactttatcttcctggtttaggttttgtcctatgtacaatgaaaggatggattagatcatgggctctctcagtctggctacagatgaataaagctgctttttcaggttcacagaggccagggaaattagttcttctgctggggcaagtatcagggcctgttttctgtattttgaaatgtgcccaggtgattctaatgtgtatggaggcctttaaatcactggattaagtggtcctgcagattcctttttgctttgaatgtctgtgagtcacgttacaaggattagcaaattttttctattaaggttgaaatgaaaatagtttcagctttgtaagcttatgggctcatgacagcaactcaactcaacctttgtatgacaaagcagccatagacgttcatgagtggtgtgtgtgtttcatttcactttggcaattattattttcagtttatttgaattttgagtggtttgggtttgagagatagggagaaaatatgaaattgagaggatagagagatagtaagtagaatctggaagaaactgggggaagaggaaagaatatagtcaaaatacgtaaaaaaaatataaatgaacctaaaataacaaatcaaaatatcctatcaagaattcagtattttcctctaagcatctatattttgaaatattctaacttctccaaagcattctgtcagtcagcttcattttctgtatgtaacatgaatacttaggtaagcatcattgacagcacaaaacatggtttgctagtggtccttccatttactagtaactataccctgtaggctaagcatgagtagaaatatggccactatgtcatattcctccactccatctgcttatatattgtattcaccaactaatgctatgcaagaggcctggtttggtctgtggtacatacaccagtgacactccattgaaaggattgatttttctctttcccagcaaatatcaattgcaaatagtttattagttaagggtgagacatgtccaattcccctttcccttctcagccctgagagttttgtctgctttgaacatgtggcaaccttgtgaatgctatcactgtctctgtgagttcacttgtgtacaatcctgttgtatctggatgacactatttccttgaaatcatctaccaccacttgctatctccccttcctataaatctctcagttttgagaggagtggttctctcattctctgcacattgtccagtcatggattgttttgttcattagtttctgctgtaaggaaaggcttctctgatggtggctgagtgaggcactaatctatgggtacaacattaggtcattaagagacatgttcctgttatattctttaggctgaataatagaagtaggctttcccctacagcccatgacctacctaataaggtttttgcccactttagatgtgtcaagtatcctatctcatggaataggtcttaactccaattatctaattgttggttagtctataatacttgtgcctctattgcacttctattatagtttctggatttgtagctagatgatattaatgatttgtaattactttatgtgtgtggggggtttgcctgcatctgatcaccatatgtatatctgatgtccatggaggacaggagacagtgttagatcctctggaactggagttatagacagttgttagctactttatgaatgttgagaaccaaaaccaagtcccctagaagaatagcctgtgctcttaaccactgaactatctctcaatcctcccccataatgacatttttgtctgggattgatgaacattttgggcatgggaaacaatgtcactattgccatgactttggagtgcttggtcattcattgaagcataattttgttattctgccttctaaagaactaagtaaaattagcaaatatttttatgagacatttctggattcctgaaaatgctgtaatgacttctgtgattagctagaaaagatgaacaggaaaatttagagtcgttttcatgataaccgagttgcctcctttataaattaacattgaaaggaagctattgaactacattttgttcttgccatcatcattgtcatcttggtgcttagattagtacatttaggcattactgtaaggataataacagttttaaggattacctcttcctcaatatatttaggggaaggctttggctcttaatacaattaatgtaccagaaattacaagcacacgaatcgcaagcaaacatttcactttatcttggctacattccaatttgaaagaataagaacctatgctatgttaagttttcttgtccataaataaaaaacagattcagtgttttagcacctggctcacctggctctccttttgtcctttgcctttaaagtatgagaacatggtgttaattccttacctgacttcattgtaatttaactctagccacacagagatttttcctatccatggggctgactaaccttcctgggtagggctgcccatactccttccttcctaaatcttctaagcacagcagacagcagcttgagactggggagtatgtcagtctacagctataatgataattaccaatgctgagtgactgtctagcgctaagacaccaaggtttttacataccatgtggaaatatatagtagacaatcctttaagaaaggattaagtgagttttgcaagttttatgaaaacagataggggtaatctctgcaggggtaatctctgctgtagtatgtggaagaataacctgtcatatgtgctttcctgatggagagatgcttccaaggtgccgcccaccctttgagggtctccagggttgtgatgggcagctcctatgatgaacacactatgctcaaggctgacccggtggtgtttcttaacactctcacctgctttaaggatcaattaaagtggcagagaaagttcattgaggaaatttgagaactctgtgccatttgcagcaagaaaaacaatttgaagcaagaagtttaaggtccacagctcagagcaacccaactccaggtctctgagccccacccccacccccagcgctagcaggaagtggaatttgatgtgcagccagcctatgatgtccttatgaaatgagaaactacaagaactttgactccaatagctacaacaaaatctatacccaactcatccatgagtgcatcacgctaaagaagaaggatgaattcttgatctgcttcacagacatccatcaaaacttcctgaggtatcgtgcacccaggctatggactctcctctgtctggtcaagcactggtatcaactgtgtaaggagaagctgagggagccactgtccccacagtatcccctggagctgctcacagtctatgcctgggaatgcaggctccaagacagctctggactacatacagcccagtgcttctgaactgtcttagaactgatcactaactatccatgtctttgaatctactggacatggtgttatgattttaaacatgagatctctgactacttgcgcagagagatccaaaacgacaggcctctgatcctggatccagcagactcaacaaggaatgtggctgggtcagacttacaggcctggcaccttctggcaagaaaggctctgatctggatgcgttcgagactttctttatgaactgtgatgtgtcctttgtgaatggctgggaagtgccaccagagagaaaagaatgtgtcttccagtgagtactgcagtacttgcccaggaggctccagagtcagggcatgcactcactcctctgctgcaagaccttgatctagagaggacaggaaggtgctcaaggcttcagtgaggggcatccagcctgtgatcagactccaggcttctgattcctgcctgcccatggacagccttcctcacagcctgattcatctgccttgtcctccaacagtgttctctgggagtaagactctgaaggaaagagaagaactcaagcttgacttccatctatctacccattgggaggttctacctcccccaaaatttctgatcatcagcaataaacnnnnnnnnnnnnnnnnnnnnnnnnnnnnnnnnnnnnnnnnnnnnnnnnnnnnnnnnnnnnnnnnnnnnnnnnnnnnnnnnnnnnnnnnnnnnnnnnnnnnnnnnnnnnnnnnnnnnnnnnnnnnnnnnnnnngggaaggatgggctccttattttctgacttgatattacctctatagttaatttggtatgtacaatttgaattctatttttgtaagaaggacctaccaaattgcttgagctttccacaaagctgagatccgtttttatagaggatatgaaattttgacagggaaatcaagcgtacaatgaataggacttcaactttcctgtagttagttttttattattgttgcttttgctgtacggagggaagaactctggctaattgagaccctcttagttttgtagtggagctgagctctttcgcaggctcctttgtgagttctctttccatgactcaccgaagttcctgtcttgtctacaagaatcatctgggagacttggtcttgttctgtcttctctttttgcagaaccttcttggtttcttccatgcttcttaggatacaggacaggacaccttcttgcaccttgcccatattcatgcttcatatcgtgagtcgaggagggtgactgttctcggacatcctaagttaatcaatgacaaaatttttttctaaaactcctaagtcttcagtgttccagacagtggattttcatttttataagcaacagtcttgctttcttgcccaagctgacatctgagcctgaactcaaatgaccacttcttagaagacatgaatacctacagttgtatgtctctttgggacttggcctttgaagcataaaagtcattgttcatatgactacaaaatgctgaactgttactatgtcttgacttttaaaagactgtttgtgagacttgaaagaatgctgtggttcgggggtgactcctccttctagaggcaatcaacatgctgacagccccctggttcaagaaattggttagtgactagtctattccataatggcatttcagtagttgctactttatctgactgtcagaaaacgtcctcagatattgaattgaactacactttgctcatattgttataacgagtgttggttagggatattttcaccagggtgagaatagttagacttgaggttcattttaagcattgatattgtaagaaacaacttataaacttttatttttaacactcaataagtatgtgctgtctagcacatagaatgttaaatgttctggatttgtctttaatggtgactatcactgatcaagttaggctacagtgcttcagtcaaagaaatgtgtattacttttcaaatgaccaaaatcccccatctctctctctctctctctacatatacatatatatgtatatatatatatatatatatatatactccatcatatattcatttactaattgttcaaatagataatatctgttgtcatcatattttaaaattatcacaacaaagttaatcagattattaaaatcagagtattaaaataaaattaaagcagcattcttttgttgttgaaaatttgccaagttcctgtatttctgtgtgcactaaatatgtactttattaaatgtcatattggaatatttataaaccagattgttgcattaactttttccaaggaaaggtgaacaaatgtattttcactcccaaccagacactgaagaagggcaaaagtaagaatttcatccaagtctaacttggtgaacaatgagtttattgagagtacaataagcatggatgacggatcacttacagactgtgagcgaacataaaacactttcacactacaatgttcaactctagcatggatgatgaccttgtggaagctgctccaacgtgccctacttcctctcttagggtctcccaagatcacttcagctgaaagggaagagaaacagaaggggactgatggttggagtcccagaggagggtcccgaactctactctcctcccttctagtatggagcatcactatagacctagctgtcagtgaatattatcctgtctattttgccacatggctaccaggcccaagcatatctccactctaagatgaggaaagaacaagccactcttccacaattccatggaattgagaatataacctttatataaagtcaccttttgctaatgatgcaaattgatttcaaagtaatatttattagaagtgtaaactttttcactttctatctgtgcaataacttaaacattgtggattcactaaaaattgatatatgccttcagttccagtactcagaaggtagagacagacagatctctatacattcaagggcagcctggtctacagaatgagttccagaaaagctagagctacacacacacaaaagaaaaaccctgttttgaaaaaacacccccccccccaacgaaaaagaaggagaaaaaaagaaattgactaagcatcaggtgtctacaaataacttagttgacatacaggattatagatgttaaagaaagtggagaggcagtactgtctgcagtgctacaatcttacaacataatatgtagtactgtcatagtggggaaaagagttctctttgacatcatctatgcccttgagaatactttggttatttgtgtgtggactgcgtaactgagatttaagcaatcacaaaaataaacaggtctctacagaacccaattatatgtgtcttagttgtttcgctggctaaacatttaattatatctaattatttcctgttacttcactgaaaaccctgtcaaataacctagtgacagttttcttgcatcataatttaaaggttatctttttaggcaacgtcaaactaattatggccactgtctagagttttcaaacaaacaaacatactgttattttcatttcagatgcgatctgtgagcagagtgtttaagtttattgatatacaaacagaagaaagtatgtacacacagataattaaagaactacctagagaaggatcatctgacgttttagtcattaagaatgagcatgtgaagaaaagtgatatctggccctctggaggcgaaatggttgtcaaagaccttactgtgaaatacatggatgatggaaatgccgtattagagaacatttctttttcaataagtcctggacagagggtgagatttcagcattacttgctttgttagtgggtcccaactaccagagcaatatgttcgtaaaaaccatttgtaacataattatataatcagtatcccttatacatagttgaaggtgtgactgtgcaaagtttttatgtttcatatgaaatttgaattacagactctacacaacaggttattgtaaatgtgattgtatttgaatgtgactatacttgcaaatatgtaagattttccaactgcagatgcctttaaatacacacagacaccaaaaatacaaccatcactatgaacagtagcaccaaattggttgattggcacagtataaattaatccatcccttaattaacttagatgaaactttaaacttgagtgattttcttgcaggcaatgggtagttatatcttagttctttgggccactctgtcagtccatgtttctcaagtggtgcatttagaccatgagcatctagagtggtaggcacacattcaggcattataacttgttctgctttttgttccttgcttttgctctttatccctatttttaccttgaatccttttctttctgttgctgttccttagtatttatgattccaagactttctcatttcctaacatagcgattctacttttgtggtttttatgagtttctctagaggtcacaatatatattcacaatgaatccaggtccattttaaaagaataatgttatcacataagaggcatcagcaccctgtagtcccaattgctctctcatgtgtgtcatattcttcctatgggtcattttgtgtattcacagataatatgtgcaaatagatgttattaaaatgactttaagtaagcttccctgttagatccagtaagagtaagaaaagcattttagtttctaaaatgcttcctttattcatttagcttcaagtttgcaactccttgtagatctgagttgtgtcttttctctgagtaagttctcttaacatatctttcaagataagcccattgacagcacatagcttctgtgttggtttgataatttcttactttgccataagttttaaaagataactgcacaaggttcacgatcctagtttggcagagttttgcttttcctcttcttttctactcgtttcctgactttgtggtgtccataaagttataagtcattcttatctcaaattgttttgttttgtttttttgagacagggtttctctgtgtagccctggctatcctggaactcactctgtagatcgggctggcctcaaactcagaaatccgcctgcctgtgcctcccaaatgctgggattaaaggtgtgtgccactttaggggaaattttcctgaacataatgccataacttatgctctgagatcaggaatcaacaaattggaccttataaaattgcaaagattctgtaaagcaagggacactgtcaataggacaaaatggcaaccaacatatttggaaaagatctttatcaatcctacatgatagaaggctaatagtcaatatatataaagaactcaggaaattagactttagataatcaaatagctgatttaaaatggtgtaaagagcttaaaaaaaaaagaaagaaagaaaggtgtgtgccacgactgcctggccctcaatatttaataaataatatattttttactgggctttcttcaagaggatttctttaaaaaattttttgtacttttaagatgatatgctgtggtatgggtttttagctttaagcaacattctggttatttttctctgtgtatggattgagtatatgacactaatttttgagggaaccctcttagtaactattatttgaaatatccccctctatctttctcagcatccttttcttctctttttctttcttcttcatttctgtcttctttctctttctggtatctacattatatacaagttacacctttcctaattgtgccatgattcttggatatgctgggggagggggttgtttgttgtgcagaggcatgttggtgttggctgcttttagtaacatatcctcaagctcagggttctttcctcacacatgtctaaactattgttgaactcctcaaggcatcctccatctttgttgtacatggtttttgtttgtttgcttacctgcttgatttttttttttttgctatacttgtagaagtcttttgattttgctttagaatgacgcctttctgtttactaaggatccatctgttactatatgccaattttttcatgatgaaatccttatcacattagtcatagttgttttgcattcccaacgtatgaattagagtgtcattgtcacatctggctttgttctatcctagtattgcttattatttcctcttttccctttcaacatgtctcattgttttttcttgagagggaacatagatgacgtgcttgggaaagggaccgtgataataggctgttagtaatagactggctatgctgtgttggactgtagagttctgtagctgcatagttatgttagagaaattacattttcggctgtgagcttttaaatggcaccagcttagttactttaggtagtacagactggttagagtgagttagcactaaatattactgtttcctaaagtcagttagtctgggcttttggaaaaaaaatctctaagttacaaatgataaaatagtctcactcaagatgggccttaaatgggagaccgtgctctggcctaacagaatgatcactgtcttgtggggtccttgaaagctagggaaacttcctctagtcttcctgtgaggtcactggaggctgacaggaattgtttccctctccatggtccacaatgagcccaggtcatcttctcagtgtagtgcttgtacttgctccctccagctgtctgcttgctggtttctgctggtctctgtgactgtatctgcttgcctttctctctggctctaggggcagagtcattcgttctatggttttacctttctgacagaaaatgtgttgcttacctttttacttaagatggagtgacttttcagttagtggtagcacatacctttaatcccagcacttgagattcctgtgaattcaaggccagcctggttcacagagtaagttccagaacaaccaaggctacacaaaagaccctgtctttaaaaaacaaaaacaaacaacaacacaacccaaaaagaatagcaatgttctctacaaatgaagacatctaaataggtgctggatttgttaaaagtgcaccccattctgcctttatagaatctggcgtgaggctgctgactcatttaacaatctgagtggcccatgtgtcttattaacaataaacagatgtgtcgacatatgagaggctcagttataatcacccatgaatctgatgtttcatttgattgtctgtcttggtttctggggaccacaaggaaacaagataattatagtgcacttccctctgccattaaagtgcagagaaggtgctttaaagggactgtgccccaactgcgctactcttgacacaatggaattcctgctcctacctagtttggcactgaatagctctccagattgtagtctgatttatgttgatctaaattttgcagagctgaggtgcattgaggttaataaaaacgttgactcatacttaggacacatctttaaagcttgtttgcaggaagtactcttagaaataagaagataattagtatgtgacaattactcaaccagacaaccttgttagggtacaaatcaattaagttccttgctgttgaaaaactggtcagacttaatacatgccagcactttgatgtgaggaaactagagcaatagacaaagggtttcaagctaaagaaagtatttattcattgcctctcaggccagtattatgccagcataagaactgagttttctgaaaatgtatttccttctggaggaaatgcagtgaactcatttacccctactaggtccattcaaggtcctttctgccaactatcctgtaatgaacttagcactcttccatcggtccactgtcactttcttttttcctcctgtacatcacctgcactgaccgattctgatttcttatttaacttatttaacattgcagtattggaaaaatcctaacatggtgaatgtgtatttgtatggcatggtctagcacagagatgggagcatgcagtgtgaaattcctccagattttaaaattaatgctttatctagtcattgaacaaaattattgtattatttatttataaggtacaataatatgtatgctcattcatttgctctcctatctgactgtctttcagtccacctcaatatttcttgagtacctttttaaagccaagtacacatgggtccttttattcctccattcttccagccatctcactttcccatcctttcaccctccaatctgactatcagctaatccaagtatttattatttaagtacaccattattccagatggagaaactgaaaaaacaatcaaaacggataaactatgcaacctttgttgaatttatattctttatgtaaatacaaagctacaagaaggagaaaataaatcattacaaaattcttcttcataacatttgtttattttcccaacaacaatgatttatataaattaccttgtagagctcttttgagggttaggaaggcaattattcttgtcactgtcctttaccagcttatcacaaaggcctacattattgccaagtaatttactcagtaaattattattatttccattggttgtggcccatgccaccattggagtttataagttattactagtctacaatgaaataagtatagagtctgtaaatatttagaaattcattttttaatttatttaaagtactgatttgcagttcattaaaaacagatggtttttcaccaaccacatatatgtaaagaacacttttcaaaaagaccattttctccttaaagaggtcaaacaataggaaataaaggggcagtgtgaacagcatgaaacaaatttaagtgttgcatatatactgcagcttattctgtgatcagttagtcattgcaaggaactgagcttatatcataacaaagaatgtgagctttgagggctacctggacaactgatctctgtaatgggaagtagccttaatctgatgctgtgctcttgcagctgtggtctttgcataatgagaacagtttaatatcctttttgcttcttagagtttccttcttgccagaagagtcatatgttagttagcatttgattcaaacattgctgagaagctgagtgatcttggctctcgactcaacctgaattctgtgagaatgtatactttactgaacatgcctgtatcttatcatcaggcctgaacttgacactgctcattccttaagggcagaatccatctgcctcttcaatgccggggcccaatccctggaccttgtacatgctagacaactgtacatgctccaccaatgaggaaataagtttagtccagggacagtaagtagtgttaggcctattttgagtaaacttcaagtttgtatccatattcaaaagtacatcgggcagcaggtccctgcttctggtttgagctgacgtgcatcaagatagactgtttttactcttccttgactttaaatggacactttctccctttttctcattagtaaaagtcagtggtcaatgaagcccacatcaggaatacagttctgtatggccagtttctgatttcagttgcagattatgatgagttccagatcagttccagatagtgatgagaattcggagtgtgtaaacaggcttacgtggctccatgagaagagaacccattccactgctttctgtccaaggagcagtgctgattggataataggtgctatccttggtgcaagagtaatgccatcactttctccttctaggtggggctcttaggaagaactggatcaggaaaaagtactttgctttcagcatttttacgaatgttgaacattaaaggtgatatagagattgatggtgtctcatggaattcagtgaccttacaagaatggaggaaagctttcggagtgataacacaggtgagcacaaaaatgtaaaaagcaatacgaattaacatttttatcattatttgacatacttaagaaattcatatcactctgcaaaatatatttggtgggtcctaccatctcgtctactgtgcaagagaactgtagcatatggaatgagagtacctcccaatgtctggaattctgcgtggtgtatatttcttaaagtgttttgatagtgttctcccaaagcacaatctgtaacagcagcctgggtagttccttgtgcaggcttcctagtcttgcttaagtacttgatctccgagggagtgatagcagcctgtagataaatgctttgcaagatgtggaagatgcttctgagatcataagctctcggaagcaggacatagtggaattgaaagttgaagtgcagtgatgttttccctttggagtctgagtaggaagaagtatgtcaggtcaatctagattcttataaagggcagtgtttgattcaggcagtacagcatctcgaacatcgccatttagtgctattctgtctgtgttactgcacatgctgatttcttgtgtagaggagaaacggcaatggttgcgggcaacatgacccaaatgtgaaccaagagatgctgaagccagaagaattgcagtatttctgctgctgttggcccttttctctgagacttttcctccttttgtgctactagacactaaatccaacccactaagatggctctttgaagcacttctgtatttttaacacaaaattaacattccgggactatcaccaggtagaccaactacaaagctagaccaagaaaatgcttgtacttcttgataaatgatcttcacagaacatttgctcctttcaagtggtgagacaatagatactgtaaccaccaaactgatgctttcaatttgtttctatggtgtgccatttttttcaaatgcttcatcttggctgaagttgtggaaacactgtgtgttcaaaaacacaaaagggattgtcagatggcctaaagaaaaagaaacgctaggagtacaaggttcctgaggtgagagcactagtcgagtaaaaatgctaaggccagtggaagggtgtggttgtctgagaagcactgctgttggacttgcccaggtcctgtgctgccagttgaactaaagcagggtaggctttgccttggttgctcttgttcgaacacattggcctacaagaagcgtcaacctctaaaacttctatcctcttgctcatcatcgtagctgctacacaatagaagggctccgtcttcctcactagctctgcttaggagcttacttatgccaggcacagagtacactgcagtgggccagagctggaaaatctcccctgcctttctgcctaaatgactcttcagacttgactcaattcatgtctgctcttttatggattcaaggcttacatttaaaaaaaaaaaaaagaaaaaaggaaaaaaaaaagtgtgttcagggcatccttcagaaatactgaagggtctctggaacatcagccagcatggttaacatgtctcagtgacaatttttgaatgtcatgtgaaacctaaggaaggaaggagagagagagagagagagagagagagagagagagagagagagagagagagagagagagcaaaccaagtccttatatgcttgatgtctaaactacgggttactttgcttttcctatcttttcttggaacgtgaggattgcagcatgcttctcctttccttagaaagataaaagaaggagaaaagtgaatatccacagaaaactaactagtttggtctgctttttcatcttttcttttctcctctgtctcctttaacaaggatgtacttcagaaggtcccacactgagctagtgtaatgttaaaggttcactggccactggttctcagatacatgaaacaggtattttgaaaagtaccctcttatacagagatccaaaagcatttgctgggcagtcacaaaaggtcctgttggtttggacggttcttaacaattttttccctccttttatagtttagtaactacatagcaatctcagaatacgtgcagcccagaattcagactatcatgtgcattccaaaacagagcctctttcatttgttctgagtcaagcagagcaggcagtgaagccgatagatggcatctgatttactttggcaattagagcaccaagaagaaagcacccactaatgctgcgcctggctaggcagataattaataaaaagcaactattttaaagcttcagttacaattttggaaggctgtaagttcttctgagtaaaggactagaagtttttccttttgttgattactattgtatgtggtatgtgtctgagaggaggggagaatgggtggggtattcatcacgtcatggctcacttggagaggtcagcacacaactttcaggaacaagttctccccttccagcatggcatttagacactggattcaggtcatcagggctgtgtggcaagcgtgagttatccactgagccatctcactggctccttttcttaatgaattgaaaatactcaccatccacccatcattctcaccacagacagaggtgaggcatcttttgttttgaaagagatcagacagcatgtatagatataaacagtgaaattggtggtgacagcttaaaattcactatataaaataattacatcttgtgcttacaattataatatcacagtcattttatttatatcaaatgtagagatactacttgccattaatatgccagagaagttccagtccaacctgtaaacttctaatgagaaactcaaaacgatgttcatagtcgtgtgacagaaattaaaaacagaaacagtaaagccaaagtgagtggctgagagttagtaatgaaaccatagctgcctgtaagctgtgggctaacaagggagtatataggcagagagaactgtccagattaagctagctgtcactcctgccagtacatctgtgtctttcctgtcctgctgttttgtctcccttcttttcttgttttctctctgattgcagaaaacatgtaactgtttactggttagacattatgaattgaggggttttctttctttgtttgttttgggggtatttttttaacacaaatactttgcttgactgcccaaacccagatgggatctcaaaccttgcttatgtatttctgcgtgtagttctaatatgtctcattttcaaattatccacatatctcccttaattatgcaagatttaaacagagtgaccagaaaatggaagcagagttataaaaagaaggatagaaatacatagtaaaatacttttcttctgagttttctccgttgtaagacatctaacataacaccttggatgagaagaattcaaaagacagtgttctatgctgaatcattaaatgttgctgtctctcacatgtgtggttctttcagcatttggaccctaatctgtataatcttaggacagctatataatttctctgtcatagtttccttgtttgtaaaatgagtatagtaataataacaattatttgtactttgggggaaattgaacgagaaatacttaaacttttacttcccacatggcttgataattatcctctgttatggtagttattatttttaattcagtgggggtggggagtcatgtctcctctgtctttctactggactgggggtatgttctatgaataagtatgaataagtatgaataaatgagcttgcacaatttcacaaagaaagttgtaatgaatacatgccatagagtgtcataaagtttataggtttagaatgattgggtacatggagttctaggcaggaagactgtgaacaatcaaaaggataggtcagtgtgaagggaaagggagaagggtcagagggaaccacagcttagagggtattagacgtcatggcatggtccagtaggaaggggctaattctcctgggctgaggaagggaatggagaacgtttggtggcacattgctatatacatgatgaactagcaaatgattatactgtgatgtggttaattagaacttactgaggtagacagttggacagagtgtagaattcaagggagggcagaaaaataactgtcatgtccaattttcaaattagtataacacaatttagctatttcagagactaaactttgaaacctttgattatatgctttggttagaaaacatttttatgtatctttggaaatgtttatactaaaactttgtagtataaaaactgttaggaagctgggcagtggcagcgcatgcctcggcagaggcagtcagatctctgaattcgaggccagcctggtttacagagtgagttctaggacagccagggctgcacatagaaaccttgtctcaaaaaaaaaaaaaaacaacaaagaaaaaacaacctgtaatgaagcactctggatttctagaaaactaaactttaactatcctgtatgcagtcttttatatttaaatcaatagcatatacactggtagtatagcaatctatatttgttacaaactgttaatagttcttagtagaaatatgtcattcataattttatagttgggccacatttcaagggaactattcatgatgtacacatacatacataagcaggggtagtcatttctcctattaatctattttatattaagtgcaatcaccacataagctggattacttttttttcatttgacatctagtactataaagcatattagctgttgcaacgatatatggtcagctgtgggaagtccatgtaggcttagccacttccacagagttgaggagtggaggcagcagctgcagggaggagatgggacatgtggggaacaatgatgatctctttgttctgcttagagtctcaagaactgctcattatagcatacatgacattaaataaatatcaaatatttgcttgccctaactgacttattagtgagtagtttcttttaagggcgacaggggatccctgggatgtgacagcttcaggtgcattttttaattggtgcacagcagatctgagagtgccatgctggccaaatcattccacttctcagggccttcattttgaatatgtaaaccagagagagagggtttaggttgacctccaaagacctttaggttagacagaggagtttgaggatgattaaacagcttaggaaacaagtaagacctctgctggcaccgtgaaggcaagggactgccagattctctttgaattaaaggaatggaatgtctgattgatggtatacaattgaattctagctgaaccggtttctttagttgatttttctttaaaattggatatgttgtccattaccttttaccagacatgaaattatgaaggaaagcctgcaagatttctgagttgtgataaatctaccacacctacagcttctagattcctgacagcttctttccttcataattttgaatgtgtatctgcttaaaataaattagttaaaacatcataaatttagtaaactagtatacattatagattttatgactaaaagttaaataatttctgaagcacccgtaggaatcttcacaggtgtattgggttgttagtgttacacttaaagaactgtgatagctgtgagcatttgggtcacatttagagatctctctctgtctctgtctctctctgtctctctgtctctcacacacacacacacacacacacacggagagggggagggaggagagaaaaagaggaggaggggagggaaggatgagagagagaactttattagccagaaaaatagccttatagaagttaactttcaaatctgaggaaaaacagcatttactctgattgttattattttctacttttacttcttcacgtctgctcactcatttgggacttttgctgagcttattcaaaatttgcatctaaaaaagaaagtaaagacatggccttcgacactcatagatatccacggacttagtaattttctttgatacacactaccgagattgggctccatcttcatatgtaacaaagaataactctgaaactctaatcctcttttttctatttcctgtgtgttggaattaagggcacatactacagtgccaagtttatatgcttctgggataagacccaaggcctcttgcaaattaagtaagcattttttgccaactgagccacatccccaccaactaaacttggtgttatttaaggaatgaaagtataagaaataattggggagcttgtttggtctgaggataaggaacagtgcccctaggaaatgaagcttgatttgaaacctgaaggatatagattgttgtgtgaagatcagggaggataagatttccagctgagaagaaaacttaggtgactaagctaagaaagtgtgtgcttagaatagaatggagtggaaaggagccctgagatcttgggaccatcgtaaggatattgtacccttagtgaaggggaaagtcattgacatttttcatgaattacttgggtatattgtaagagaagcaaaagtataaagaagaagatcaatttaggaagctcctgcagtgacacaaaaaggactagtgatagtttggcatgttcagtgggaacagaaattgagaaagaaattgatttgacatatagtttgaggataatataaatgaccaatgactcatttttaagataagctgaggaataagatgaattatgagtgactctcagttcctgatgtgcactgagatggagatgcagaaaggacaaaagtagggtggcatttctctgctttacaaagcatggggatgaaagagactgggttcctatgagcaactgtctgttttaaagataaaacatcttgtccattcctttcattcttccgggataatgaaattattctgtttgtcccaagtaaatatttctattgtatatttcaactaaatatataactctttcaaagttacagagatgcaaccaaaacaataagaggaaagaaaattattttagacattgacatcaaaaattttttgccagtcttgtatatataaagagtactaaatattatttttaaaatattattacctgagatctcttaagacagtggttttctcttaagcacatggtccacctaagtggaagtgttactgcaagtggagcatcttgacaatggtcatacagtgctatttgcacaccagagcatctgcctcttccctagcacacatgcccctgaacaaacggttgatctatgatcacatgggtttctgagttgtcctttcagcttctctttgttcatagaagtaagaagatgtgtaaagggatgttagtagaagaagagtctcaattcttcccagagcacagtggcctcaatttccttatctcaagggcattgaaataaaaaaaaaatccaaaaagagttttaaatgttgccctatttttctttaaaatgatgtaaagcaaatgtagaaaagtatgactagctaatgggtaccatagatgataggcagttttacacatctaccagtgtgtgtatgtgtgaatacagaaatgcatgtatactcaccttgtagcacagtgctctagtggatgctcatttgttccttttcttacttgaaattggtttgaataaagagaaaaacattaaaagatgtataggttatttatactttctaattatctttaccattgcagaaagtatttatcttttctggaacattcagacaaaacctggatcccaatggaaaatggaaagatgaagaaatatggaaagttgcagatgaggtaaggatgacaaataaagtagttttaaagaagtagatcatacacacaagtgtggttgccatagatgataggcagttttacacatctactggtgtgtgcatgtgtgaacacagaaatgcatgtatactcaccttgtagcacagtgctctcatttactggcacatccttgtcagaacctttgactcatccccctttcaggagtgtcgctcctttccatatactctattcgtggtgctttactaaagttctatagacccttgctcctagacgacgtatgtttctctcactattttgaagactgagaagtccaaggttaaggagccagcagacagtatttactatctgctaaggccctacttgctgtcactcccgaggtgtttttctgcacctcactcagtataagtggtcagtgagcgctgtggagcctcttttcattatagtgttaattccatctatggggtactcagagcccatgacctaatcacttcctaaacattttattttatgtctcagtagcactgccttggacagtcaggtgttaacatgagtttctgaagacatgcggacctagaactccctcctttcctcccctccaagttatgtcttgttcttatgaaaatagattactccacttaaacaaatgccaaagtcttaacacattttggtgtcagtgtacaactggaaatcacaaagtctcaattcagccaccatgagacttgggactttaggtttttcatgttggcattccaccattccctgcactttgcccattgttgttcccttgatgttcgctcttcggcctcccccagaacagatcttgccaggagctttgaagcctctgagtgctaaatgctaaccccttgagtaaccaaccttaaccttctcctaataaaatgaactgagattaaccgtttttcattatcagggtttccttattacccagcaaacacaaggtttttaaagaaaacattaactaaattgctagtgatatactgtaagatccttgatgtacttttacagagtgacctgtcagaatacagtgtgctgggagagagcttgggaaagaaggaattagcctttgtaaagcttaccaggtattgccaagtctccataaaatttgcaggaaactgagatcataaaatcatctaaaatgttaggagataggtttagaagactttagattccagaataatacaggtagttatgtgattagattttgtctaccagtccatctttagatgtacgttttcattggattctctttttaaatttatgttcataaagatgctgctcctgagctaaccgtaatgtcccatggtttgagtaagagtgacaaattttttgctgaagagtccacaaagaaacataaacaccaacccctagcttacagcagcaggcaggagatttaggttaaaggcaggaatcctaggctttaatcctgtatggttgatgatccaatatagtcaaataggaacacgttgaggtgtgtcagcctactaaggcactaggacaaaagtctaaccttcctgccctggttcatggcagcttgctgccctattcagctctggggatctttctttttttttttaatttttttatttaaaacaattttttaaatattttttattacatattttcctcaattacatttccaaagctatcccaaaagtcccccataccctccccccccacttccctacccacccattcccatttttttggccctggcgttcccctgtactggggcatatacagtttgcgtgtccaatgggcctctctttccagtgatggccaactaggccatcttttgatacctatgcagctagagtcaagagcttcggggtactggttagttcataatgttgttccacctatagggttgcagatccctttagctccttgggtactttctctagctcctccattgggagccctgtggtccatccaatagctgactgtgagcatccacttctgtgtttgctaggccccggcatagtctcacaagagacagctacatctgggtcctttcgataaaatcttgctagtgtatgcaatggctttctaaaggctgcatctttagcctacttctcacccctccctgtgctgctgctggacagggttcctgttgtacactgactgcttaaaggacctttatgatttggtctttgctgctctactttcagccccagcccccatgtgtcctgtgagtccactactgtgaattttaattttctttagagcacagtgtgctgctctctgttctatggtacgggttggggcagttgtttctgctttttaccttctggtttctggacctgggaaacccttgcagagcactactcctgctccttctcaccattcaagccttccttcacacatcactttgttctgaactccatcctgaccctcctgctttgggaaaagagactttcctaggtatagctatgcctcggctcctcaaaatttcctacactgaatcaaaattcacctcttggctactccatatctcctatgattatggaatcatgccctgctctctgttgttcctgcagtagttggatccctgggtggtttttgataagtactgactgaatgatctgagcaagtaaagaattcttttaactcatgtaaaatatgttgtgaaaatatcctcatgcttaatgcccaatagacattactaccttcatctcagtaaaggtcttgcaagatggctggcggattctgaaaagaactgcagccctgacttggggccctctgctgttttagccctactaagctatgtgatcttggccccttgactctggctcttagatgtggggactttgtttgtttgtttgtgtttccttattagaataatttttaaatttatcatctttacatcctaatagtcaagggaactgttgtagagacaatttaaatagcagaaacagggaccctgtaagtgggacatttccctgagaagtttgcagaatggaaacacaaggagctgagggtatccatttttacattgcccactagtgcttacaggcaaagcataatccaccttttttactgaaaaaaaaaaactgtcatagaaaacaaaaatcctacaaatacttctgagtagtttggtatagagtactgatttatctaaacatatttgaatacttttaactttgttatttgatggatggtcatagagttaaagatttacagagtacagtatataatttctgagctaaaactagcactaattcattcattcttaagttctaatgcttaaagactcatagtacatattaaatgaatgactgaaaggaagatgaatgaatgaatgaatggattaataaatatatgaatgaatgaatgaatgaatgaatgatgaattgttgaggctgagagtgttcctaactgaaaaacacatatttgctttcaagaaatgtatggtctaacagggaaaaaatacacaattctaatacaggatgcctggctgtcctgtgggtaggcaaggatatttaagagagtaatcagactgagcagaaggacaaaccctgagaatgttaagctgtataaagaattaaaagttgatgctgctggacacagtagtaggtgtgtgtgtgggggcggaggaggtcaggatgtcctgtgggccacatgagaacaattatattttatttttccagtaaaagaacttctgtaggatttaaaacagagaaatgatccaagttcaaacctgcattttagggagagctcttaaatatttctgtgacatgttgacaatttgactcattgatacttgcagtatgatgtttaagaaatgacagaaggccagacgaggatcagtgtgccagaactgacaaaaagaacggtttcagaaaccctgggggaacttctaggctggagagaggcattgaaagccattagcttaaacatacacattgatgccatgtacataaccaaaatctggacacaggaggggaggggacattggtgttgaaacctgatatggatgggacaaagctgtatagtatagtatcccctgtgatacaccaggcagtcttccttgtcttctgtgcctacattccctactatctcaggaaccttttaaacattaacgagtttacacaaagggtagttttaacaagccacatgtttgaacttccataatgagcacataagagtctggcattaacaatgatatgagccacttctgaactcatctccaaaatcatgaatctttcttaaggccttatctaactctgcacatgttagagtgatatgggtatatatcttacctgtacatacaaaattccagattcatgaagcacaagaaacaatcctgtctgtatttatttaactcttatacacctagtggttcttagcaaagaagacacaatgtacatgtattgaataaggaaaaaccaccaagacatctataattatgccttaattttgacagactactttttgatctttttattaaaccccctttaaaattgcagtttaaaaatataagccattaattctaaaataatcttcatattctaccctaacaataagagcctttaaattttagtcgtgttccatttttaactaagtaacttcttactttatgagaaagttatcagtttctcagattttataagtgaaggagataagtattatgatggcatgatttttttaaagcctcctcagctaattttcatgatatttctcatcctgtattacagatagaagatgaacatgtcatgctatgttttctaccctttctgctcttgaatcctttgccatcagttataatggagtgaataactgtgttctctatctgttatctttaaagcccatattgaattgtattgcaattgcatctatccatctatctatatctgtatctgtacctatccatctatataatgtgacaggaataggtataattgtttatcactgctagggaacatgacacttacaaggtgaacactgaatgattttgtaatcaagtgtggggctgaaagaaatcctccagtctgtttagagctaccgatattattgccagattttggttactcaaactaagtaggagttgggagttgagggtgatgtgaaatttattctgtgcaaactcatgtctgcttttagaatgcaagcctcttaagtgattttagttatgccccttctaagcacagtgtttttctttattttctacaggttggactcaagtctgtaatagagcagtttcctggacagctcaactttacccttgtggatgggggttatgtgctaagccatggccataagcaattaatgtgcttggcccgatcagttctcagtaaggccaagatcatactgcttgatgagcccagtgcccatctagaccccatgtaagttccaaaaatctttagataatcatgcaatagaagtagagtccttgaagttacctcatattggtacaaattcccattcagctaccacacctacaagtagggggtacaaaataattttccaggggaaaaatcactatttaacatgagcacaagtacttttttttttttcaacaagagctttgtttttcctcctgactggagtctggaatttataaacccttcaacctcattaacacataataaatacttagttaggtatgcacacacttatggcttccctctgtatcctatttatatcataaatacattaacagcacaaaataaataactgatgctgaatctacataaaatgtagtctcatttttatgaaattttcttctaagcatttgctttattagtgtatgaaattatattaaatacttagaatggcttaaaagctgattgtagctcattctgtatcatcattatcctaaaagtatttttaagtaaagaattaagtccatagaatactatacgtattgtcaaagataaaggcagaaaattcacactctataatgtcttatgtggtattttcttgctttgctagaacataccaagtcattcgacgagttctaaaacaagccttcgctggttgcacagtcatcctctgtgaacacaggatagaagcgatgttggattgccagcgatttttggtaagtcatttacacttgattgatatctcattctccatttatttaaataatcctgcacagctggatttgcacaccctttcttcacacttatgtcacacatttaccacctaccctcagtctctttccctggacttgagctatgaagtggtgaggaaatttagcacacttctctggtatcatatcactaaacgacactgtagataaggtaactatgctttcagatcttttgtggcgaacaagtcacaaaatgtacaattgaaaaaaaaaatgtctgtttcttacagtaactcagcttcccatggggaagataagggtgggccttaccattagtggttcaatgtagtaggagagaagcctgttccatcatccccattactactggaactcagggtagtgtccctgtcagacaccttctcattctccccccgcccccaaaaaaaagtcactgttcctgtttagacatgggaagttccaaggatcatgtaaaatttttactttcccaaggcttttgaatattctggaggtaaatgcttttttactgaagcacttttgatcctattgttattgcccagttacaagtgcctagagagtagatgcatctcttgttctgtggtggtcaagtacagggactaggtaaggggctctactctctgacctcaagcttgcaaacagtttaacatgcactgaaggcgttattctctgtcattcctggccaatttgaaacctttcggcctcaaccccaggtatgaggaagctcaaagttaatggttatatatagctcggtttaagagtgcgtgggtcattgattattttgctttgcaaagctccttcagttcctcaactgttctctgaaggatggcaacagctagtattacattaatttttcaaatccctatcgctactttcccggatgtgaaagctaagagaaaagtacaagctctgaatcctgtgctttctttggacttttgttcttctttgggcctggctcagtttatgtgtcagcactggcctgctcttcactcagaggtctcactaatgccctctcccttaggtcatagaagagagcaatgtctggcagtacgactcccttcaggcacttctgagtgagaagagtatcttccagcaggccattagctcctcggaaaagatgaggttcttccagggccgccactccagcaagcacaagcctcggacgcaaattactgctctgaaagaggagacagaagaagaagttcaagaaacccgtctctagtgctgggatgctgaggaagcaactcagtgcactgagtccattcccagaacccatgcagaatgaaaaaagccaggcatttcccatgcttctaaccccagtgctggggacacagagacaggtggatccctggggctctgtggcaagtgatcctagcccacaaagagagttccaggctgggcacctgagggacaatacctgtggatatactcttgcttccacatgcaagtacatatacacatgcatgcacattagtggacatacacacagaaaagcaaagaagaaggaaagagggaagaaaatagtgcaaataattgcaaaacgatcatgtatggagtctgctcatggacttagaggaggtgaactctactacctgtgcctttgaaagaagggtgaagcctgcgacttgctctttaagagactgttttggaagagagttcaaaaacgttcatatgggtatgggtaactgactttccagcagtagtcaaattgtttgaacttcagatagttgataatgaccacttgtgtattgcaaggcagatttttctgaaaacatttgccccctaatagtagctgaaaaagcagctataaatgccaaccaggttagtcattcggcttattgttcagtacagctggttaatttgcattattgaagaactgaaattatagtgcttagatataggacaaagtaaagagaactaaaaacagtgtcttatataactcaaagcccaacttactttcctctaagatatgtattgccttctatacattgtctgccccattccaagcaaatgttagaatattatacaaaatactgggtggtattgattgaaagatgcccgacatctggtgatctagtaacccatcaggattaaggatatccaggtcttggaaattaaggttaagaccatctagccttactaccgtacagctaaacattcttattaccagaataagacctaggaaaagaactgtttcagtcccataaagtggcctggataatttccttgatatggaaatcgacacacttatgttcccagaaagcaacagatctttaagacttctgaagtgaaggaaggttgtgttagtgcaaactagtgcagcccagtgccaggtccaggagttaacatgtagacaggccatggactgtgtgggtagatgctcatggaaatgtgcagtagtatgttcatgtgctctcagctagctgtgtgtacttcaaactgtctccacagagttgttggggagacactctgaaaaagaattaattgtgaattagttttatatactttgttttataatttgtgatgcaaatgaaaatttctctgggaaatatttattttagtaataatgtttcaaactcatatataacaatgctgtattttaagaatgattacataatgacttatatttgtataaaataatttttatatttgaaatgttaactttttatagcactagctattttaaaacaggggagtgaggaggacagggatgataaggatcattcaacttcatgttgtgaagacgagctgatgtaaatcttgtacccatctgtgtggttctcagacaacacatgctctcttttaatgcagctttgaagaagatggtaccaaaggttaagacggccccctgatgggcacatcaacttctgaactgcaaactaagctttagaggaatgtattatatttattactgtaatagaatatcatgtgtcaataaaatccttttatttgtgtgaaactcatctgttttcagatatattcattgggattcctagctctggaattcctagctctactctctatgattcttagaacacaaacattccttttagatataatctctttgagaatcccagttgaattagagcacaagacattaagttgggtctctaaacccaactagattatttttgtcaatttgatgcaagatagaattatctaggaaggggaacctcagttaacaaaatacctccaacaggttcactgtaggtgaatctggagttcattttcttgattgaaattcatgtgggaggatctagatcactgtgagctacaacacccagattggtagtcctggatggtgcaagaaattgggctgagcaagccatggggaacaagccaacagcatctcctccacagtctctattttagttcctgctttgagtccctcaaggatgaactataaaatgtaagccgaaataaaccctttccttcccaatttgctctttgtcaatgtttatcataagaatagaaacttacccagcacagtgtacaacagagctcattcttgatggggtgctgtactggctgcttttctgtgtcaacttaacacaagctggagttatcacagaaaaaggagcctctcttgaggaaatgcctccatgagatccagctgtaaagcatacactagcattttctcaattagtgttcaaagggggaagggcctagcccctggtgggtggtgccatccctgggattagtagttttggattctataagaaagcaagctgagcaagccaggggaagcaagccagcacacaacattcctccctggcttctgcatccaagtttctaccctgtgtgaattcctgtcctgacttcctttgatgataaacagcaatttggaagtgtcagctggataacccctttcctcccaacttgcttcttggtcatgacgtttttttgcaggtatagaaaccctgactaagggtcaccttgggcgcaaactcagctggatgatcccgcagcccctagaggactctctatgcaatcttaggatcactggtgaatggaacacatcatcggttccaatccaatcatgccggacctgagccagcaagcagggaagcagaaaacccacctgaccagggccttagtcccttcccattggcaccagctccaggtcgccttggtcgggaactctttgggggaaggtcccacagtccccagagggcgctccatgagatcttaggatcactggtgagtggaacacaacatctgttccacaccaattgtgacaggtctgtgacagcaggagcaaagacacgggagccttgcctgaccagaggcttgggttccttctgatcagtactggtacaccttggtttcaaacacaccagacagccccacagtcctcagaggagacacctcttccaggcgctgtaacacacccagaatcttaggattccaggatcccaggataacagcagcttgatcacaccaggatctcaggttctcagaagaagcttaactgccaagaactctgacacagccagaatctcaggttcccaggagcccagaatcacaggatcacagaaaaagctagactctgaggagtcctgaatcaaccaggattataggaagaacaagctccaatcagatatattaagggcagcaaccacttgagataatcagatggcgggaggcaagcataagaacagaagcaacaaaaaccaaggtttcttggcatcatcagaaccaaactctcccaccatagcaagtcctggatacaccatcataccagaaaagcaagacatggctctaaagtcacttctcatggtgatgatggaggactttaagaaagaaatacagaaaaacacaggtaaatagctagaagctctcaaagagttacaggaaaacactaccaaataggtaaaagaattgaacaaaaccttccatgagctaaaaatggaagtagaaacaatgaagaaaacacaaagggagacaactctgaagatagaaacgctaggaaagaaagcaggaaccatagatgtgtgcatcagccacagaatacaagagatggaagagagaatctaaggggcagaagattccatagaaaacatggacacaacaatcaaagacaatgcgaaatgcaaaaagatcctaactcaaaacatccaggaaatccaggacacaatgagaaggccaagcctaaggataggaggtatagatgagaatgaagattttaaacttaagggccagtaaatatcttatacttacaaacaaaattatagacgaaaacttccctaacctgaagaaagagatgctcatgaacatacaagaagcctacagaactccaaatagactggtccagaaaataaattcctcctgacacataataatcagaacaacaaatgcactaaataaggatagaatattaaaagcagtaagagaaaaaggtcaagtaacatataaaggcatatctatcagaattacaccagacttctcaccagagactatgaaagccaaatgatcatggacagatgttatacagacccttcgagaaaacaaatgccagcccagcaaaactctcaattatcatagatggagaagccaaagtattccatgacaaaaccatattcacacaatatctttccatgaatccagcccttcaaaggataaagagaaaactccaacaaaaggagggaaaaagcacaaaagtaatcattcaaccaacctaaaagaagacagctgcaagaacagaatcccaactctaacaacaacaacaaaaacaggaagcaacaattacttttccttaatatctcttactatcaatggactcaattctccaataaaaagacatagactaacagactggctacataaacaggacccaatgttttgctgcatacaggaaatacacctcagggacaagacagacactacttcagagtaaaagctggaaaacaattttccaagcaaatggtgtgaagaaacaaactggagtagccattctaatatgaaataaaatcaactgccaacccaaagttatccaaaacaaggaagggcacttaatactcatcaaaggtaaactcttccaagatgaactctcaattctgagtatgctccaaatgcaaaggcatccactttcattaaagaaacttgggtaaagatcaaaccacacattgtaccacacacaataatagtgggagacttcaacacaccactctcatcaatttacagatcctggaagcagaaactaaacaaagacacagtcaaactaataagttatgaaacaaatggatttaacaaatatctacagaacattttatcctaaaacaaaaggatataccttattcctggtaccttctccaaaactgatcaataatcagtcacaaaacaggcctcagcagatacaaaaatattgaaatgatcccatctatcctatcagatcaccacggactaaggctgatattcaataacaacataaataatagaaagccaacattcatgtggaagctgaacaacaatctactcaatgatacccttgtcaaggaagaaattaagaaagaaattagacattttagagtttaatgaaaatgaagccacagcatacccaaacttatgggacacaatgaaagcagtactaagaggaaaactcatagccctgagtgctgccaaaaaaactagagagagcacacactaacagcttgacaggacacctaaaagctctagaacaaaaagaaacaaattcacccaaaaggagtataaggtaggaaataatcaaactcagggctgaaatcaaccaagtggaaacataaagaactattcaaaaaaatcaaccaaactatgagctggttctttgagaaaatcaacaagatatataaactcttagactaactagagggcacagggacagtatcctaattaacaaaatcagaaatgaaaagggagacacagcaaaagaacctgaggaaatccaaaacatcatcagatcctactaagggccatactcaacaaaactggaaaatgtggatgaaatggacaaattcctagacagataccaggtaccaaaattaaatcaagatcagattaatcagattaattatctaaacagtcccatagcccctaaagaaatagaagcagttattaatagtgtcccaaacaaaaaaagcccagggccagatgggtttagtgcagaattttatcagaccttcaaagaagatctaattccagttcttctcaaactattccacaaaacagaaacagaaggtactctccccaattcattctatgaagccacaattactctgatacctaaaccacacaaagacccaacacagaaggagaacttcagaccaatttctcttatgaatattgatgcaaagatactcaataaaattctcgctaacagaatccaagaacacatcaaaaaagatcatgaattatgatcaagtaggcttcatcccagggatgctttaatatatacaaatccatcaatgtaatccactacataaacaagctcaaagacaaaaaccacgtgatcatctcattagatgctgagaaagcgtttcacaaaatcatgataaaaggcttggaaagatcaggaattcaaggcccatacctaaacataacaaaagcaacatacagcaaaccagtagctaacatcaaagtaaatggagagaagctggaagcaatcccactaaaatcagggactagacaaggctgcccactttctccctaccttttcaacatagtacttgaagtattagccagagcaattcgacaacaaaaggagatcaaggggatacaaattggaaaagaggaagtcaaaatatcactttttgcagatgatatgatagtatatataagtgactctaaaaattccaccagagaactcctaaacctgataaagagcttcggtgaagtagctggttataaaattaagtcaaacaagtcaatggcctttctctacacaaagaataaacaggctgagaaagaaattagggaaacaacacccttttcaatagtcacaaataatataaaatatctcggcgtgactctaactaagaaagtgaaagatctatatgataaaaacttcaagtctctgaagaaagaaattaaagaagatctcagaagatggaaagatctcccatgctcatggattggcaggatcaacattgtaaaaatggctatcttgccaaaagcaatcaacagattgaatgcaatccccatcaaaattccaacacaattcttcaacgaattagaaggagcaatttgcaaattcatctggaataacaaaaaacctaggatagcaaaaactcttctcaaggataaaagaacctctggtggaatcaccatacctgacctaaagctttactacagagcaattgtgataaaaactgcatggtactggtatagagacagacaagtagaccaatggaatagaagtgaagacccagaaatgaacccacacacctatgatcacttgatcttcgacaagggagctaaaaccatccagtggaagaaagacagcattttcaacaattggtgctggcacaactggttgttatcgtgtagaagaatgcgaattgatccatacttatctccttgtactaaggtcaaatctaagtggatcaaggaacttcacataaaaccagagacactgaaacttatagaggagaaagtggggaaaagccttgaagatatgggcacaggggaaaaattcctgaacagaacagcaatggcttgtgctgtaagatcaagaattgacaaatgggacctaatgaaactccaaagtttctgcaaggcaaaagacaccgtcaataagacaaaaagaccaccaacagattgggaaaggatctttacctatcctaaatcagataggggactaatatccaacatatataaagaactcaagaaggtggacttcagaaaatcaaataaccccattaaaaaatggggctcagaactgaacaaagaattctcacctgaggaataccgaatggcagagaagcacctgaaaaaatgttcaacatccttaatcatcagggaaatgcaaatcaaaacaaccctgagattccacctcacaccagtcagaatggctaagatcaaaaactcaggtgacagcagatgctggcgaggatgtggagaaagaggaacactcctccattgttggtgggattgcaggcttgtacaaccactctggaaatcagtctggcggtttctcagaaaactggatatagtactaccggaggatccagcaatacctctcctgggcatatatccagaagatgccccaacttgtaagaaggacacatgctccactatgttcatagcagccttatttataatagccagaagctggaaggaacccagatgcccctcaacagaggaatggatacagaaaatgtggtacatctacacaatggagtactactcagctattaaaaagaatgaatttatgaaattcctagccaaatggatggacctggagggcatcatcctgagtgaggtaacacattcacaaaggaactcacacaatatgtactcactgataagtggatattagcccaaaacctaggatattcaagatataagatacaatttcctaaacacatgaaactcaagaaaaatgaagactgaagtgtggacactatgcccctccttagaagtgggaacaaaacacccttggaaggaggtacagagacaaagtttggagctgagataaaaagatggaccatgtagagactggaccggggatccatcccataatcagcttccaaatgctgacaccattgcatacactagcaagattatgctgaaaggaccctgatatagctgtctcttgtcagagtatgcctgggcctagcaaacatagaagtggatgctcacagtcggctattggatggatcacatggcccccaatgaaggagctagagaaagtacccaagaagctaaagggatctgcaaccctagaggtggaacaacattatgaactaaccagtaccccggagctcttgactctagctgcatatgtatcaaaagatggcctaggcggccatcactggaaagagaggcccattggacacgcaaactttatatgccccagtacaggggaacgccagggccaaaaaaggggagtgggtgggtaggggagtgggggtgggtggctatgggggacttttggtatagcattggaaatgtaaatgagctaaatacctaataaaaaatggaaaaaaaaaagaacttcaagtctctgaagaaagaaatttaagtagatctcagaagatggaaagatctcccccatgctcatgttttggcaggatcaatatagtaaaaatggctgtcttgccaaaagcaatctacagattcaattcaatccccatcaaaattccaacttaattcttcaccagttagatagtgcaatttgcaaattcatctggaataacaaaagaccaaggatggcaaaaactactttcaacaataaaagaacctctggtggaatcaccatgcctgacctcaagctgtactacagagcaattgtgataaaaactgtatggtactggtaacagtgaccaacaggtagatcaatggaatagaattgaagacccagaaatgaaagcatatacctctggtcatttgatctctgacaagggagctaaaactatccagtggaaaaaaagacagcatttttcaacaaatggtgctggctcaactggtgcttatcatgtagaagaatatgaattgatccattcttttttttctttttctacgtggatcaaggaactccatataaaaccagagactctgacaccccctaaaggagaaagtggggaagtgcctcgaagatatgggcacaggggaaaaattcttgaatagaacaacaatggcttgtgctgtaagattgagaattggcaaatgggacctaataaaactgcaaagcttttttataaggcaaaatacactgtcaataagacaaaaaggtcaccaacagtttgggaaaggatctttaccaattctaaatctgataggggactaatatccattatatacaaagagctcaagaagctggactccagaaaatcaaataaccctattaaaaatggggtacagagctaaacaaagaatcctcaactgaggaataccgaatggctgaggagcacctgaaaaaatgttcaacatccttaatcattaaggaaatgcaaatcaaaacaaccctgagattccacctcacaccagtcagaatgtttaggatcaaaaattcaggtgacagcagatgctggtgaggatgtggagaaagaggaacactcctccattgctggtgggattgcaagctggtacaaccactctggaagtcagtctggcggttcctcagaaaattggacatagtagtgccggaagatccagctataccactcctgggcatatacccagaagatgttccaactgttaataaggacacatggtccactatgttcatagtagccttatatataatagccagaatctggacagaacccagatgtccctcaacagaaaaatatggatacagaaaatgtggttcatttacacaatagagtaatactcagttattaaaaacaatgaatttatgaaattcttaggcaaatggatggatctggaggatatcatcctgagtgaggtaacccaatcataaaaggacacacatgatatgcactcagagataagtggatattagcccagaaacagaatacccaagatacaatttgcaaaacacatgaaactcaagaagaaggaagaccaaagtatggatacttcgccccttcttagaatggggaataaaatagccattaatggagttacagagacaacgtttggagcagagtctgaatgaatgaccatccagagactgacccacttggggacccccccccccgataaacagcaaccaaacccagacactagacagatgccaacaagagcctgctgacagaaccctgatatagctgtctcctgtgaggctctgccatgcctggcaaatacagaagtcatccattggagagagcagaaggtccccaatgaaggagccagagaaatactcagggagctgaaggagactgaagccccatagaaggtacatcaatatgaactaaccagtaccctcagagctccttggaactataccaccaatcaaagaaaacacatggtggaatatgtggctctagctatatttgtagcagagaatggcctagtccgtcatccatgggaggataggcccttggtcctgtgaaggctctatgccccagtgcatggaaatgccaggaccaggaatgggagtgggtgggttggggagcagggggagaggggatggagtaggggattttcgaaggggaaactaggaaaagggataacatttgaaatgtaaataaagaaaatatctaataaaaaaagaaaagaaaaaagaaaccctgactaagacaggtactgttacaagttttggccaatgtgtaaagagatgtgcagccatcatactggctattttctatgccctgagagttctctgtgtcctcagtgtgcttcatcactcccacccaacacctggtaacttctggtgtcttcctgctttagaccttgctctgcgaggtatgatgatgatagcattgagctgcatgcagtcctttaaggccagcttctttcccatagcaataagcactgtttctctatgtggttttactgcatgatggctcattgatttttgttgttgaataacatgcccctgtctggatatattgacgtttattcacctactgaaggacctcatgtttttccttggttcattcttattcattgtgacaatcttgaataaagctgctaaaagtatagggagggagagatggagagaaagcgtgggaggggaggagagaaggctaggaggagggaaaagaagaagatcataaggaaggaaaggtactagaaaagaggaaagatgagaggcatgaggagacatgagacttgagaggaaggagagcagagag

SEQ ID NO: 2 - DNA, 6303 bp, Mus musculus
gaattggaagcaaatgacatcacctcaggtctgagtaaaagggacgagccaaaagcattgacctggtcctggatatccagatgtcgagtccaacctgaacttagccggacacagacctcattgcctcacggagacatcatgcagaagtcgcctttggagaaagccagctttatctccaaactcttcttcagctggaccacaccaattttgaggaaagggtacagacaccacttggagttgtcagacatataccaagccccttctgctgattcagctgaccacttgtctgaaaaactagaaagagaatgggacagagaacaagcttcaaaaaagaatccccagcttatccacgcccttcggcgatgctttttctggagattcctcttctatggaattttgctatacctaggggaagtcaccaaggctgtccagcctgtcttgctaggaagaatcatagcatcctatgatccagaaaacaaggtggaacgttccattgccatttaccttggcataggcttatgccttctcttcattgtcaggacactgcttcttcacccagctatttttggccttcatcgcattggaatgcagatgagaacagctatgtttagcttgatttataagaagactttaaagttgtcaagccgcgttcttgataaaataagtattggacaacttgttagtcttctttccaacaacctgaacaaatttgatgaaggacttgccttggcacattttatatggattgctcctttacaagtgactcttctgatggggcttctctgggacttgttacagttctcagccttctgtggccttggtttactgataatcctggttatttttcaagctatcctagggaagatgatggtgaagtacagagatcagagagctgcaaagatcaatgaaagactcgtgatcacatcagaaattattgataatatctattctgttaaggcatattgttgggaatcagcgatggagaaaatgattgaaaacttgagagaggtggagctgaaaatgacccggaaggcggcctatatgaggttcttcactagctctgccttcttcttttcagggttctttgtagtctttctatctgtgcttccctacacagtcatcaacggaatcgtcctacgaaaaatattcacaaccatttcattctgcattgtcctacgtatgtcagtcacacggcagttccccactgccgtacagatatggtatgattcttttggaatgataagaaaaatacaggatttcctgcagaaacaagagtataaagtactggagtataacttaatgaccacaggcataatcatggaaaatgtaacagcattttgggaggagggatttggggaattactggagaaagtacaacaaagcaatggtgacagaaaacattccagtgatgagaacaatgtcagtttcagtcatctctgccttgtgggaaatcctgtgctgaaaaacatcaatttgaatatagagaaaggagagatgttggctattactggatctactggatcaggaaagacatcactcctgatgttgattttgggagaactggaagcttcagagggaattattaagcacagtggaagagtttcattctgctctcaattttcttggattatgccgggtactatcaaagaaaatatcatctttggtgtttcctatgatgagtacagatataagagtgttgtcaaagcttgccaactacagcaggacatcaccaagtttgcagaacaagacaacacagttcttggagaaggtggagtcacactgagtggaggtcagcgtgcaaggatttctttagcaagagcagtatataaagatgctgatttgtacctattagattccccttttggatatctagatgtttttactgaagaacaagtatttgaaagctgtgtttgtaaattgatggccaacaaaactaggattttggttacatctaaaatggaacacttaaggaaagctgacaaaatactaattttgcatcagggcagtagctatttttatgggacattttctgagctacaaagtctacgtccagacttcagttcgaaactcatggggtatgatacttttgaccagtttactgaggaaagaagaagttcaattctaactgagaccttacgcaggttctcagtagacgattcctctgccccgtggagcaaacccaaacagtcgtttagacagactggagaggtgggagaaaaaaggaagaactctattctaaattcattcagctctgtaaggaaaatttccattgtgcaaaagactccattatgtatcgatggagagtctgatgatctccaagaaaagagactgtccctagttccggattctgaacagggggaggctgctctgccgcgcagcaacatgatcgccaccggccccacatttccaggcagaagaagacagtctgttttggatctgatgacgttcacacccaactcaggctccagcaatcttcagaggaccagaacttctattcgaaaaatctccttagtccctcagataagcttaaatgaagtggatgtatattcaaggagattatcgcaagatagcacactgaacatcactgaagaaattaacgaagaagatttaaaggagtgttttcttgatgatgtgatcaagatacccccggtgacaacatggaacacatacctacgatattttactctccataaaggcttactgctagtgctgatttggtgcgtactggtttttctggttgaggtggctgcttctttatttgtgttatggttgcttaaaaacaaccctgttaacagtggaaacaatggtactaaaatttccaatagctcctatgttgtgatcatcaccagtaccagtttctattatattttttacatttacgtgggagtggctgacactttgcttgccctgagcctcttcagaggtttgccgctggtgcatacgttaatcacagcatcaaaaattttgcacaggaaaatgttacactccattcttcacgcccctatgtcgaccatcagcaagctgaaagcaggtgggattcttaacagattctccaaagatatagcaattttggatgactttctgcctcttaccatttttgacttcattcagttggtgttcattgtgattggagctataatagtcgtctcggcattacaaccctacatcttcctagcaacggtgccagggctagtagtctttattttactgagggcctacttccttcatacagcacagcagctcaaacaactggaatctgaaggcaggagtccaattttcacccaccttgtgacaagcttaaaaggactctggacacttcgagccttccgacgccagacttactttgaaactctgttccacaaagctctgaatttgcacactgccaactggtttatgtatctggcaaccttgcgctggttccaaatgagaatagacatgatatttgtcctcttcttcattgttgttaccttcatctccattttaacaacaggtgaaggagaaggaacagctggtattattctaactttagctatgaatatcatgagtactttgcagtgggctgtgaactcaagcattgatacagatagcttgatgcgatctgtgagcagagtgtttaagtttattgatatacaaacagaagaaagtatgtacacacagataattaaagaactacctagagaaggatcatctgacgttttagtcattaagaatgagcatgtgaagaaaagtgatatctggccctctggaggcgaaatggttgtcaaagaccttactgtgaaatacatggatgatggaaatgccgtattagagaacatttctttttcaataagtcctggacagagggtggggctcttaggaagaactggatcaggaaaaagtactttgctttcagcatttttacgaatgttgaacattaaaggtgatatagagattgatggtgtctcatggaattcagtgaccttacaagaatggaggaaagctttcggagtgataacacagaaagtatttatcttttctggaacattcagacaaaacctggatcccaatggaaaatggaaagatgaagaaatatggaaagttgcagatgaggttggactcaagtctgtaatagagcagtttcctggacagctcaactttacccttgtggatgggggttatgtgctaagccatggccataagcaattaatgtgcttggcccgatcagttctcagtaaggccaagatcatactgcttgatgagcccagtgcccatctagaccccataacataccaagtcattcgacgagttctaaaacaagccttcgctggttgcacagtcatcctctgtgaacacaggatagaagcgatgttggattgccagcgatttttggtcatagaagagagcaatgtctggcagtacgactcccttcaggcacttctgagtgagaagagtatcttccagcaggccattagctcctcggaaaagatgaggttcttccagggccgccactccagcaagcacaagcctcggacgcaaattactgctctgaaagaggagacagaagaagaagttcaagaaacccgtctctagtgctgggatgctgaggaagcaactcagtgcactgagtccattcccagaacccatgcagaatgaaaaaagccaggcatttcccatgcttctaaccccagtgctggggacacagagacaggtggatccctggggctctgtggcaagtgatcctagcccacaaagagagttccaggctgggcacctgagggacaatacctgtggatatactcttgcttccacatgcaagtacatatacacatgcatgcacattagtggacatacacacagaaaagcaaagaagaaggaaagagggaagaaaatagtgcaaataattgcaaaacgatcatgtatggagtctgctcatggacttagaggaggtgaactctactacctgtgcctttgaaagaagggtgaagcctgcgacttgctctttaagagactgttttggaagagagttcaaaaacgttcatatgggtatgggtaactgactttccagcagtagtcaaattgtttgaacttcagatagttgataatgaccacttgtgtattgcaaggcagatttttctgaaaacatttgccccctaatagtagctgaaaaagcagctataaatgccaaccaggttagtcattcggcttattgttcagtacagctggttaatttgcattattgaagaactgaaattatagtgcttagatataggacaaagtaaagagaactaaaaacagtgtcttatataactcaaagcccaacttactttcctctaagatatgtattgccttctatacattgtctgccccattccaagcaaatgttagaatattatacaaaatactgggtggtattgattgaaagatgcccgacatctggtgatctagtaacccatcaggattaaggatatccaggtcttggaaattaaggttaagaccatctagccttactaccgtacagctaaacattcttattaccagaataagacctaggaaaagaactgtttcagtcccataaagtggcctggataatttccttgatatggaaatcgacacacttatgttcccagaaagcaacagatctttaagacttctgaagtgaaggaaggttgtgttagtgcaaactagtgcagcccagtgccaggtccaggagttaacatgtagacaggccatggactgtgtgggtagatgctcatggaaatgtgcagtagtatgttcatgtgctctcagctagctgtgtgtacttcaaactgtctccacagagttgttggggagacactctgaaaaagaattaattgtgaattagttttatatactttgttttataatttgtgatgcaaatgaaaatttctctgggaaatatttattttagtaataatgtttcaaactcatatataacaatgctgtattttaagaatgattacataatgacttatatttgtataaaataatttttatatttgaaatgttaactttttatagcactagctattttaaaacaggggagtgaggaggacagggatgataaggatcattcaacttcatgttgtgaagacgagctgatgtaaatcttgtacccatctgtgtggttctcagacaacacatgctctcttttaatgcagctttgaagaagatggtaccaaaggttaagacggccccctgatgggcacatcaacttctgaactgcaaactaagctttagaggaatgtattatatttattactgtaatagaatatcatgtgtcaataaaatccttttatttgtgtg

SEQ ID NO: 3 - protein, 1474 aa, Mus musculus
MQKSPLEKASFISKLFFSWTTPILRKGYRHHLELSDIYQAPSADSADHLSEKLEREWDREQASKKNPQLIHALRRCFFWRFLFYGILLYLGEVTKAVQPVLLGRIIASYDPENKVERSIAIYLGIGLCLLFIVRTLLLHPAIFGLHRIGMQMRTAMFSLIYKKTLKLSSRVLDKISIGQLVSLLSNNLNKFDEGLAHFIWIAPLQVTLLMGLLWDLLQFSAFCGLGLLIILVIFQAILGKMMVKYRDQRAAKINERLVITSEIIDNIYSVKAYCWESAMEKMIENLREVELKMTRKAAYMRFFTSSAFFFSGFFVVFLSVLPYTVINGIVLRKIFTTISFCIVLRMSVTRQFPTAVQIWYDSFGMIRKIQDFLQKQEYKVLEYNLMTTGIIMENVTAFWEEGFGELLEKVQQSNGDRKHSSDENNVSFSHLCLVGNPVLKNINLNIEKGEMLAITGSTGSGKTSLLMLILGELEASEGIIKHSGRVSFCSQFSWIMPGTIKENIIFGVSYDEYRYKSVVKACQLQQDITKFAEQDNTVLGEGGVTLSGGQRARISLARAVYKDADLYLLDSPFGYLDVFTEEQVFESCVCKLMANKTRILVTSKMEHLRKADKILILHQGSSYFYGTFSELQSLRPDFSSKLMGYDTFDQFTEERRSSILTETLRRFSVDDSSAPWSKPKQSFRQTGEVGEKRKNSILNSFSSVRKISIVQKTPLCIDGESDDLQEKRLSLVPDSEQGEAALPRSNMIATGPTFPGRRRQSVLDLMTFTPNSGSSNLQRTRTSIRKISLVPQISLNEVDVYSRRLSQDSTLNITEEINEEDLKECFLDDVIKIPPVTTWNTYLRYFTLHKGLLLVLIWCVLVFLVEVAASLFVLWLLKNNPVNSGNNGTKISNSSYVVIITSTSFYYIFYIYVGVADTLLALSLFRGLPLVHTLITASKILHRKMLHSILHAPMSTISKLKAGGILNRFSKDIAILDDFLPLTIFDFIQLVFIVIGAIIVVSALQPYIFLATVPGLVVFILLRAYFLHTAQQLKQLESEGRSPIFTHLVTSLKGLWTLRAFRRQTYFETLFHKALNLHTANWFMYLATLRWFQMRIDMIFVLFFIVVTFISILTTGEGEGTAGIILTLAMNIMSTLQWAVNSSIDTDSLMRSVSRVFKFIDIQTEESMYTQIIKELPREGSSDVLVIKNEHVKKSDIWPSGGEMVVKDLTVKYMDDGNAVLENISFSISPGQRVGLLGRTGSGKSTLLSAFLRMLNIKGDIEIDGVSWNSVTLQEWRKAFGVITQKVFIFSGTFRQNLDPNGKWKDEEIWKVADEVGLKSVIEQFPGQLNFTLVDGGYVLSHGHKQLMCLARSVLSKAKIILLDEPSAHLDPITYQVIRRVLKQAFAGCTVILCEHRIEAMLDCQRFLVIEESNVWQYDSLQALLSEKSIFQQAISSSEKMRFFQGRHSSKHKPRTQITALKEETEEEVQETRL

SEQ ID NO: 4 - DNA, 208700 bp, Homo sapiens
gagccactatgcccggctgattgttttcttattgttgagttttatattcctttattttggaatggagtaaataagcacaataaaactggttgagaagataatcattttaaaaaatcataatgaattatatgatacacattctattatttcatgagaaaaatcatggaagagtcagttcaatattcagtgaatcattaatgtgaggatgtaaaatttgatacacacacaatttattgagcacttatcctatgtcaatcagtgcgctaaatttttttcttttatattaactcatttaattcccactacagccctgtgtaatggaagctgttcttcccaccattttataaatgatgaaaccttagatcacactcagtggaagagttctaaagccctatgtggtgctgtctgatagaaaatatattttaaaatgagatgatctaaggtatgtttacctacagagctaaaggaaagtatgtcttaaatttaataatgagtgattatagaaacagattacaggaaatagtccatctttcttgaattatccaaagtgttacaagcctcaaattcattgttgtttgtatgagaacacatttaggtgatcggatacaagtatatagtttttcccagatgtttatttcacatcaacttttttttcatctttactttcttcaaggcaagtaggatagaatgtaataatcaaataggtttttcccccaccccattttagagcagtaaataattccaagaggcatttgctttgttattggataagtaattaacaaaaagaattcctaaagacaattagaatcatgaccatactgggtcttgaaaacatagcagtgcaatcacagccaatggctggcttggtggctggcgatgagcctgcagcatgggactgggtgttccaccacggcttggctgttgtccagggagctttcagtcgctggggttcccacagtgccaagcacgaggcaggtgcagaaaggataaaggtttctgttccccattagtgttgagggcatgcaggtcgtctgacatgaggggcatgagaagtgaagttcctgctttgctttgggtaaggaatctgcattgacaggggcttaagaacctgctcttatacctcacatgtcttagcctggcctttgagatgagtagggagtttgagtgggagtttgagtttcctcttagagaaacagaactgagtgaggcactttcattttttagtttcctagtaccttttgttaaggaaaaaaaagccaaaatgagtgttaaaaatttaaaatttttagattttaaatttgcatttaaaaaattaatgcttttttttttagatggagttttgctcctgttgcccaggctggagtgcaatggcgtgatcttggctcactgcaacctctgcctcccaggttcaagcgattctcctgcctcagcctcctgagtagctgggattacaggcgcccgccaccacacccagctaatttttgtatttttagtagagacgaggtttcaccatgttggccaggctggtttcgaactcctgacctcaggtgatccacctgcctcggcctcccaaagtgctgggattacaggcgtgagccactgcgcccagccaaaattaatgctcttaacatgtaaaaagtaaagtgcagtggaactttggcacttatgcaagataatacaacttaaaagatttataagaatattaactgctaatgaacagtagagggatctaattaacattgaaagttacatgaagaaagtgtttgtcttctattcccaacagggcatctttgtaactataatgactcttgagaagattttgttttcagtcttaaaacaggaatgggggaaaaatgtaggcctgggtaagtacaaaaaagggaaatcgaaggagactagggagttactgtagattttgcaggactgaggaaagtcagaataaatacaagagacaatgatgctggtaattttctttgggctcagagaagtaatgctttgctttgtcagagttgtagtaaaatttagatctaagaagctcgttggaagttgtagcagaatcctgtcttgtttactatgtccactgcctggcacagagatggaacactataagctttccaaaaacatttgtggaatggaatcagaaagtcactttactttccaagatgcaattctttattttgaaacataaatatttaaaaagtttataaatttttgacataattatgacatacatccttccaggcttttttcaatgcttatgcaaacatgtatatgtgacctgtaggtctccttttacccagtttttggagtacaaataaggtcacatctcttcttaactttaaatgtttaaaacattgaagttagcaagaagcccagaaactttttctaaagaactttttctacccctaattgtccaagaactccaagttttcttggttcaaagaggtaatttctgtttctaaacactagaaaaaggagaatatgaaggatctgactagtccattgtcacatgccccaccccattttctgctgcaagagcctctgtcaccacagcattgtgtcactgatgaaaataggtcctcccacagagtcagatgcatcccagtctattgctactattatcaccctgttggaacagatccctgcacaggtcacagcagttcctggaagatgaaactcattctcccagccttaatatcagccaggaatactttattcttggacttccaaagttgctatagtagtttccaaagcccacctagcacctaaggatgggtgagtaaagacaagcttccagtttcagctgcagaaacaagaacccatctcccaccacatagtaggtgttggcattaaacttctctcttatgatgtaatgtgttctccttgggatctttggtatttctgtttgcatacttcatttggggtcatctcaacacaccaaacagattctaactacactgaatctcaaaagaaatagaagtagtctttgtcaagccacagaaaagagcttgttcttctttcttctcctcctagacacctgcatacttttcattcctctaatgaagagggtccattcaataaattcagaagaaatgaagaaaaaaatacaagtctagtttgtgataagtccttgttttcacctaaacagagaagcaagaacataaattatataaggcaccttctcttaattaaataaacaaaagagttctatgtggtctagttacacagagatcacagtgattaactactcagctctggagccagacaactgggtttgttcagattctggcactctttcttgaatttgggcatggcatttgaccttctgtacctcagtttcttcatttgtaaattgggatgttaataataaaatgtactaactttatagggtctttcctgaggcacataatgtaatttaaacaacaaacaagtatacataacagacatttttttcttacaaagacggtaccatactaaacttaatttgctttttttgaaaaattatatttttaggtaaaactttgtaagttaatttttttgggtgaaaaacatgatacaaatttatcaatttgattttgcttcattagcatgatatactttgttctagaaagtacttaggcaattttcatacatgtctttaaatataatttttgcacatgtaaataagagttccaaagtattttgccatcacttcatcagtgttgcctctcaacagcctttgaagcgaggagatgccagtcactgtctcagacacaaggatgcaggctgtggaggccagtgagccatagtcactgaactgggaattggctgtccttttgaccatacagattaatcactgtagtttcaccaatcacattgaacttgaagatcaataaatgaccctaaaacaatgagatttcatagactctttctatatagtggaagttaaagcaaatcagaaaggagtccctaaacctgtgaattcttgaattttagttttccaggtcaacaagccttctttaagtgacttcatgtcccgtccttggtttttgatcatagactggtataagaaatgaccataaaataaatgtttttgagaaaattatagctgaaaatactgtccatgataccactcagtgatataagtctctaaacagcaaactcttccatgaatggggtggagggaagatggtttttctttccaggtgaacttacatattgccttttctcagatatcagattatgagaataatacaatggactgggctttgacagccaagactttcagaattgctgttagtgcccatgtgcaataaaatttttctatcatgtctctcttattatttcaaatgccctgttttactgttttgattactaattatctatttagagggaaacagttataaataaataattcactgttctacttactgtgcacccctgcctttctaaatataactcttctatgtagcatgtaaattaccacagaactcatctcagaaaaaagatcactacttttctttttagaattcaaatttataatatctaattctataggtggcatctggcctttagcatgatatcaccaatgaaaatttaatctgtgttatgaattcccttgtttctagaaaagcttcagcaggaaaatgagaagagaacccataaaaaccataaaacatttcatgaatggtagctttagaaaatcttacaggatttggtagcttttacatttatgacaaagtgatatttttgatgttgttcataattatttcagttcattagcagcattaataagctcccgttttgtacagcttgaagatctttaagacttccttaatgagaaactacctttaagctacggaagacccatcagggtgccaaattccatctggacacagttacaaatacaccactgttgatgagctgaaaattagagcaaccaaacaacagagctttaaaatgttatttcaatgcaaagggacattttcaccatagaaaaatagaagtttgcctctaaataaaaatgattttacaattgcaagagtacttgatttacccctttacatttagttcaaataccaaaaatttcttaaggaatgagaaattccaatgttcctgagaattctgatagcttttagagagttcagttttctgtagcattccattttgcaatcctatacaaatttctaatttataaccagtggtatgtaatgataatttctaatatttattaagtgtttattgggttctaagtgctttacgtctgatatatgtatcacatttaatttatttcatccagtggttcttaactggggacaactttgtacctctctccccaacatatttggcaatctctggagatagtcctggatctccagatctatctgtcacaacctaggatgtatgtggtcctacgagcatccagtgaatagaagctagagatactgctgaacattccacagtacaagggcaacccccacatcaaagaattatccacacccaaatgtcagtagtactgaggtagagagaccctaacttaatctgttcaacaatcctatgaggtgattttttttttttttttgagataaggtcttactctgtcacctaaactggagtgcagtggcatgatcacagctcactgcagcctcgatctcccaggctcaagccatccacctgcctcagcctcccaagtagctgagatcagaagcatgcaccaccacacctggctattttttttatttttttgtagagacaaggtcttactgtgttgcccaggctgatctcaaactcctgagctcaagcaatcctcctgcctcagcttctcaaagttctgggattacaggcatgagccatggcacctgaccaaggtgagtgtatttaacctcattttcaggcaaggaaacaaaagacagaaaagttaagtagcttacttaaggtcacagagctaagtgtggtgccaggattgaaaacctagttctttattgctttagcacaagctatttccactatactctgtcatgttcagagaatgttgatgtccatcagtggattctaaattttgaaggatggagatactgccttattctgtacatctgctttagcacccaagctcttgcttggtgaaaaattaatagtaaacattcatcttttgagcatcttcaaatatcccctttagaatgacattcaattattaggtcagtaaccccaagagaaaacggttgtttgagtgtatatactgtattacaaaataaggggtgaattcaaaggaaaacataagatgcaattcgtgcctccaaggaggttgtagggaagaggggttatgaatgtatgtaaatagaagttggtgtgcgtgtgtgtttataaacagaattgtcagaccaaacattattttggaagcagtaaaagtaaactagaatctggcctagtcatgtcccaggacacctctttcaagtcctgaaacatctttgtaagactgtaatgtgtgtttacatcctaggtaatcactgtggcccactgttgaagagctgtggctgttcttacccttctagcttagataaacttataagcacaaccagactacatatatgaagctgaagagaccttgtctttttttaacgagcttttcttcccgataggagtgactatttcttttcttcttccacattttcaggttttagtgtacttgtgattgctacccacttatcactattaaagtctactcaggagagaatctgagaaacactctcaaattaagttgaacatgatggataagtaaagtattgtgaaagttcactctcatgatttctaatggtgaaacctggcagggtgactaatctttgacgagaaggttatcacttataatctttcatatattgagatcatttgtaagaagcacccagcacattgctgaacacaaagtaggtattaaataaatgttggcttccttttctcctactcatcctcgctcttctttttaatatacctttaaaatgatgccacagaaatggccacccaatcttctatatttaaggtcagttcttgcattaggaaattctataggggaagtatgtgaagtatgtgtagtcagtcattaaatgcttgggctctggccacagattgtttaggtttaaatcccagtttcctcttttattattaattgtgcaacttgcttgggaaaacatgaaacttgtttttcctcaggttcattatctgtaatatatagtgaatgaagaagtttcctgtcccatgaaggtgttgtaaagattaaaaaaggcaaattaggctgtgtatttgtcataataattggcatatatggtaagtgaccaacaaccataaggtattataaaattgttataaaatgatatgagctatcattgagcagcatgaaagaagagcttcactgtttcacctactatcaccctggcccattaatctctttcctgttcctgacatttcagagatacgtttaggatttcaatcatgaccttaagccacatttgaacaattttctggtggataagtcctcattcccacattatgtatgtacctagatgcaaatcctgaatatcatgtcgcaattagtgcatctggacatgcttgctaactgtgttaaagctctgaataatggtaaagttttatttctaccaaaacaaatttgggctgtaatgttttatgataaaaatctgtggtcttcctatgtacatgtgtgtgtacatgcttaaaatgcaatgttatagttaaatgtaattcattaaaagtatgtaactccagtggctacttagtttggctacttggtttgtagatttctgctttcctgtttcattgttaaacaggtctagaagttattatttcatgaaactaatgtgaggaaaaagactatgttgatatataagtgacattatataaatacatgagggatgatttgattagaagcagtattacacagtgataggagtaatggtttagaactagactcaggtttgaatcttagctctatcattataggcatttacttaacttttcttgtttgcttaactgaaaactgaagataataacacctatttacatggttgttataagggttatatgaataatgtctggcaaatagtaagaactcaagtaactgtttcactctttccagaaggagattggctgaaaaatatttggagtctcctccagccatattccttggtcagcttctatgatcctctttggagcttaattcttaatccctttattttcacttgcttgttgataacaaagaagaactaattattaatttatttcaaaatgcatgtattatatttgatgggccacactaacagttataaaccaaacaacagattgggaatggggaagtggatgtggtgagttcaatcacatgtctgggaaaagtcaatagtgaagacagagtctcacaattttttgtcataatggagagatgaaaacacaggtagaggatttcaaacaacagagtggatggtgagttaaaaatgctgaaattctttcctggtgtctaacttaatgcaatgtggtttatctctttgctcttttctctactattcaaatttaggataataaagattaaatgtttctaaatcttactttacaatatcaagaaaaaaaggtatgcttttgcccacggaagggcaaagcagagctatgaaaacctgctgaacacattctttattttcaacacaggttcttgtctttccatcatgaaatgcacattttatttgtactgtatttgggtgaccacaagtcaacaacaagataattcacaagacccttgccttagatgtgtcggcaataaagtaatcaggccaaaatttttactttcctttgaatttttcaattcaaacacaatgtatgcttgcttttacacagtagggttcagggattagagggttggctctttaaaaaccgtcagagacacaggcaatcctacacaaaattctcagaaggaaggcgcctacgcctgggaatgcccagatgcccctcagagagttgaagatggcgtttctctgagtcaggtcaaagttaacacattaccttcgcttcaaagactgcttggcttcctttcggtggattagtcaagatgttttgctgactgagactaggaaatctataggagggcgggttagtttacattgttccttgtcattatcgctaaaacactccaaagccttccttaaaaatgcgcactgggctaaaaaggatagacaaggaacacatcctgggccggtaattacgcaaagcattatctcctcttacctccttgcagatttttttttctctttcagtacgtgtcctaagatttctgtgccacccttggagttcactcacctaaacctgaaactaataaagcttggttcttttctccgacacgcaaaggaagcgctaaggtaaatgcatcagacccacactgccgcggaacttttcggctctctaaggctgtattttgatatacgaaaggcacattttccttcccttttcaaaatgcaccttgcaaacgtaacaggaacccgactaggatcatcgggaaaaggaggaggaggaggaaggcaggctccggggaagctggtggcagcgggtcctgggtctggcggaccctgacgcgaaggagggtctaggaagctctccggggagccggttctcccgccggtggcttcttctgtcctccagcgttgccaactggacctaaagagaggccgcgactgtcgcccacctgcgggatgggcctggtgctgggcggtaaggacacggacctggaaggagcgcgcgcgagggagggaggctgggagtcagaatcgggaaagggaggtgcggggcggcgagggagcgaaggaggagaggaggaaggagcgggaggggtgctggcgggggtgcgtagtgggtggagaaagccgctagagcaaatttggggccggaccaggcagcactcggcttttaacctgggcagtgaaggcgggggaaagagcaaaaggaaggggtggtgtgcggagtaggggtgggtggggggaattggaagcaaatgacatcacagcaggtcagagaaaaagggttgagcggcaggcacccagagtagtaggtctttggcattaggagcttgagcccagacggccctagcagggaccccagcgcccgagagaccatgcagaggtcgcctctggaaaaggccagcgttgtctccaaactttttttcaggtgagaaggtggccaaccgagcttcggaaagacacgtgcccacgaaagaggagggcgtgtgtatgggttgggtttggggtaaaggaataagcagtttttaaaaagatgcgctatcattcattgttttgaaagaaaatgtgggtattgtagaataaaacagaaagcattaagaagagatggaagaatgaactgaagctgattgaatagagagccacatctacttgcaactgaaaagttagaatctcaagactcaagtacgctactatgcacttgttttatttcatttttctaagaaactaaaaatacttgttaataagtacctaagtatggtttattggttttcccccttcatgccttggacacttgattgtcttcttggcacatacaggtgccatgcctgcatatagtaagtgctcagaaaacatttcttgactgaattcagccaacaaaaattttggggtaggtagaaaatatatgcttaaagtatttattgttatgagactggatatatctagtatttgtcacaggtaaatgattcttcaaaaattgaaagcaaatttgttgaaatatttattttgaaaaaagttacttcacaagctataaattttaaaagccataggaatagataccgaagttatatccaactgacatttaataaattgtattcatagcctaatgtgatgagccacagaagcttgcaaactttaatgagattttttaaaatagcatctaagttcggaatcttaggcaaagtgttgttagatgtagcacttcatatttgaagtgttctttggatattgcatctactttgttcctgttattatactggtgtgaatgaatgaataggtactgctctctcttgggacattacttgacacataattacccaatgaataagcatactgaggtatcaaaaaagtcaaatatgttataaatagctcatatatgtgtgtaggggggaaggaatttagctttcacatctctcttatgtttagttctctgcatgtgcagttaatcctggaactccggtgctaaggagagactgttggcccttgaaggagagctcctccctgtggatgagagagaaggactttactctttggaattatctttttgtgttgatgttatccaccttttgttactccacctataaaatcggcttatctattgatctgttttcctagtccttataaagtcaaaatgttaattggcataaattatagactttttttagcagagaactttgaggaacctaaatgccaaccagtctaaaaatgcagttttcagaagaatgaatatttcatggatagttctaaatactaatgaactttaaaatagcttactattgatctgtcaaagtgggtttttatataattttctttttacaaatcacctgacacatttaatataggttaaaaaatgctatcaggctggtttgcaaagaaaatgtattacaaaggctgctaagtgtgttaagagcatactcatttctgttctccaaaatatttcataaggtgctttaagaataggtatgtttttaaaagttaagttcctactatttataggaactgacaatcacctaaaataccaatgattacaaacttccttctggccttctggactgcaattctaaaagtgtaaaaaacatattttctgcattaagttaggcagtattgcttagttttcaaagtggtaggctttggagtcagattattttgattcagatcctacatctactgtttagtagctctgttgcctgaggcaggtcccttaacatctctgtgtgtgacttgacctttaaaatttggagactgtcataggggttaatcccttgagaaaatgaatgtgaaaagttagcctaatgttaactgctattattatggattaccatattttcacattcatcacagtacatgcaccttgttaatataagatgctcaattcatctttgagtataattttgtgactctcaatctggatatgcaatgagtgggcctgtatgagaatttaatttatgaaaaattgtgtttcacatggccttaccagatatacaggaaacacgtcacatgtttctattgtatgttgttaaatgccttagaatttaactttctgaataggatcccttcagtttgagagtcataaaagagtaaaattattatggtatgagttatagattgtattgaatatctctttatatgtctaggttttgtcattggaaaaccaaaaagtttggaaaaaaaatctaagttatttcttactttcttaattttgtgtggatttcacatcaagtataaaatttgaagaacatctgaactatcataatccatatatatatataaaataaacataatctaagagagaatttcaccatgaaaaattcaggtagttcatgactatcagagcaaacaagtacattaaattgaaacttttatgaaaataacatttatgaaataggaagctatttttaaactagaagtgatatattagcatataatttataattcatatacaagtgggattgatttataaatggtcaccaacagagattgtgctatttaatttgggaaaattttttaaatttacattttctcacaacttttaaggtagttattcagtttgttcctctctgtctcttctctcatgccctgaatttttcatatttcgtttagttgtaagagtgtatatcaaaccgtgtgtcacatgacataacttgaattttcgtcgtgatatctgtgctatgtctaggtctatactgaggaactgtgggaaccccacagaatccaagtatacagtgccactgatttcttacaagggatgtggggtctcctgtaaactctgcagttagtctcaagtaagaccaaagagtaaaatattgttaggatctaaggtggaaattcagcaaagaatcacatagtctaagtctcgagtttaacagtaagataatttgagatacttttgtaattattaaacacaaagtaatgagagattttaaaacaaacaaatacacctgaatttatatatcagaataggtatggtggttcaaaatagctatctaataaaaaccacactcctattctaaacatttgcctttgatcaaaataattttgggtctcttattatgaaattgcctttctaaataatacataaatttcttctcataagtatatattagccacattattttattgttattgttttatattcatagcttgctttagattaaaaattatattacccagactggtctcttggacttgcttccaagtgacttttgactgtatcacaaaatcaaattcactctgaaaatataaagatttttcatcataatttcctttgttaacagccaagtgctacctaattttaggtgttttcattaaaaaaaaatgcattgcaaactttaaagacaattcttttgtttgtttgtttttaaaagacagagtctcactctgttgcccaggctagagtgcagtgacacaatcataactcactgcaacctccacctcctgggctcaagtgagccttccatcttgcctcacgagtagctgggtcttcaggtgtacaggtgtgtaccaccatgcctggctaactttttttttttttaagttatatagagacagtatctcactatgttgcccaggctgctcttggagctcctggcctcaagttatcctcccactcagtctcccaaagtgctgggattacaggcgtaagccacctcaccctgtcagcctaaagacagtgcttaatgaagagaaatataagtgctttgagcaatggaagtataattaaaattatactatgaaagatttataaagatgaccattttgaatgggaccacacttatttggttatataaattatgatacactattaaaaattcatcatgatgattttgtatttacattttatttacatgtttgcaatttgtgaggaaagctaaaattatggctaagccataaatatttttgcagtttgttgagggtgtttgtaaaagtgttgccaaggaagaccagttggctacccaaacaagggtttagtctaggtctgatcaatacatacacattatctcaggtttgtctatcagaaaaaccttaggttatccaaatcaaaataaaatagatgcataaaacaaaggccaatatgtgttgaacaattatattgtgatatacaactgccaagcattcccgattaccatgactccatttagtcagtccatgggcaaatgccatcaatgaggacagcccagggtttccatattctctcttggctttacatcctataggaattggaggggcccacctctgggataggagcccttctgtcttgaacaatgttgtctgaacactaacaaatgttgactttctacaccagtccctcaatagtcttttctatttatccttttgctgaccatgttttgttattacacagttgagatttttcagctgggaatctgtgttaattttgtattaattttgattagcttaactctcagagttctaaaagtacctcctgtacctgatatatgacaaaaattataattacatttatttatatataaaatatctttgtatatgtaaaatatctttgtatatataattatataattgtttcttttaattttgcaaattttaaaaagttctcctttgttttgaagtttattcctatagttttttatatgctagttaaattattaatcacttgattcaagtaatattcttatatacttataaggaatagtgtagttttaatatttaattccttgctaaagagagaagtggaatctatttttcttagctacttcatcaatattttatgtttgatgtgacagtcaaaatatccctcagagctaactgttacactagggaaatcacggttttccagttttccatttatgtgttatgggagggagtggaacttagtgtaataatattcaatacataaatgttaacacttgtttaaaggtccttgagtgagtactgctataaaatgcattattattgctagtgtcatttcacaagagcctataatttcagtgtgatagagctacaatataagtatagtattgcaaaaccatcaggaagggtgttaactatttagcatgcagttatgtgttggttgtcaaaacgttaaaaacatctctgactcagcagcaattttggcaattttgatcctgaggcatctgtgtagggcatcttcctggagaaaaacctctgagatgcaatgaggtcaaaaggggaaaacagactatgataaagatcaagttgtttggagatcttgtagaaagattaatttacaaatatgtcaagtgcattatcatggaggaaaacattgctatttctgttggttctcttcagagctctagaatcaatttaccacatagttgtttcagtgtgaaattagcattacagagtggctttacggctttactgtagggcattgtgtcagcaaagagcttaggcttcttttagcaagaagcttgtaaaaatttaatttactcttagattgcttgatgtagagaattacattcctacagagctctgaaaaatcttttttcagagtttttcacagctgtattcaagttgcaaggcttgtcaactttgctatttttctgtgcagctctgttaacttattattatcttttgacataaattatgattccaaattgtaaagctctggatgtcagggccttttctaatttgtttagtatgatattcagaccatttcaagactcttccgtggaacaatttaataaagatttttttgtgatgttaatgagttcatggtgatcaaccctagagacctgtgtctattgtagatcgatgacattcaacagtcctgcagtgctggcatcattttgataaaaaggggtcaaagcaagtgggactgtgggcagatttttaatgcttagaacaattattccatcgaagttttcttgtgtcccttctgccttagcctttgtaggatagcatgcttgctaatttcttgctcatggggtaaggaaatgaagatttttgctaggtccgtaggattattaggactactcaggcctgaagctatgcctggatatagccagaaaactctcccatagcttgctccaaggagctgagatacagcagtacttcctttgtaggtcatgattctgggtaacctggaagatgacctcattcatattctgtattctatgtgagacgttaagaaggtagaggtggccaagaaggaaattgttgctgcctttatggaacaaattatctgaaacccagctttctcgagggcttcattgaagtactcaactggggcacttaacccagtctaaggctggtcaaggaaggcttgctgggggaagtgtcttttgtattcacacctaaaggaggttattcaattagaattatccaaagagggtagggatgggctaggaaaaatttaaacaggtagtgtggaggactgacaggataagtaagcatggcaccttcaaaatatcctgagaagttccctatgacgggaacataaaatatgtgacagagatttgtgggagatgggtctggaaactctagcaggggccagatcgtaagggggctttgtaggctttgtaggctttgtttgggctttatcatactggaagtgaaaagccatggcttttaaacaggagagggacataatcagttcatatactgttgcagttttgtaaaagaaaagatgagctgaaagagtggccatggtggaggtgggtggggtgggggggagggggcggggagagagagagagagagagagatttgaaagacatttaggaggtaaaatcaactggtttggtaatcaattagtagttgaaggtgaaggaaagagaagagttaaggataacatctatatttgttgatttggataatagaggggacagtggtgctgcttattgaatgagaaaatttaatcggagaagaaggcatggagcaggagtgcagacctatgtgactctacttctctcaaaaccagaaacggaaatgatgtatatggctcagggttaggtaatatggttatttgaaaatgtattaaagtgatttagagcttagtcttaggtaagagatataagatgtctgaggtgacagttttataaatatgtagagtgcccacttgtttggccttattgtggcatagtgtgacctgagagtgttaggaagaagcagctgagttctagggacagtactggttaaattctacttagaaattatacttagaactctcctatataacctgctaactgatgtctgaacctcctgataacttcactcctttaggcagtgcttttcacatcacgggacacaacatatgagagatcatagaaattcaatgtggtatgaaaatctgcttgggacttcagatattgtctccagtgattgaataaaaataggagctcacctactatgatgaggtttctgtgtgtgttaaaagaaggttttcattacttttgaaaaggttatgtatccttgttttatgttaaaactttgagctttgttaaatatgcagagttctctttcttagcatggactacagaggtgcaactacctcctacctgacttcacatctactcccaaatgcctagtgaaggcttaataatttcaaaaagggactctagaatttcatttgataccagtcagacaaatgtgtgaaaattaagcataataggcagaatcccaggggtactgacagctgtattaagaggtgattcaagggctaaaccttagagtccagcattggttatgggtgtgacaagaaaatgaagcctatgttggctgggattagcaaccacagttctagaggaagcaaggtggagaaactatatagggggctccctttgtacgttttatttattttaaacatctctataaactctagaaattaaaacaacaataccaacacaaaagcatcactttttcgaccaaagaccattgctatacttttttgtgtaaagggctagatagtaaatattttcagctttgtgggccacataagtctctgcaatagacaatatgcaaacaaataagcatggctgtgtttcaattaaactttattatgaacattaaaatttgaatttcatataacttttacatgttgcaaaatattctttatttaaattctattgcaatatgctttaaaagatacagtttttagtctttcttagtttaaaataaaatctagaaaaaattttaagtcttctataactttttttcggtaactgaataattttaaaagtaagtgaaacatttagacatgcaaaatggacttttcagaagaagaaaatggtagcttaacagttattagattattgtccagaataatttttgacttataagtctctgttgaccatttcattgcctctttttttggaatatgcatcttttaatgtgtccttcaaggcaaaggctctatcttatctatcttgtgtcttgcattttcccagggcaatgtttttcacaatttttttaaaaaacaatactgtaatcaattttcaaataaaattttccatgggaccgcagtgtatacaaatagcagtgacaataaaagataataactctcccataaatacaaagaaacagttaacctagtgctctaaagtaaaggctacagtgattttgtataacatttatatgtaattttcttgatcctacatggttgtgtttttcacagtgttatgtttctgaaatcgagatgccttttataattgatgtcaaaagaaacttgtcagccacaaggcccaggaataagttgtaatatgggaacttagcaatacataaaggtatatatactcctgtgacctcagctgaattatttgcattggttgcatcccacaaggttgactcttaaataaatttagtttgttgcttgaaatttcttgggataaattactttgtgatgtagttttgaaaaaaaaacaggtaatatttagtctgaagtttgtctgacatactaagcaatgtaattaaagtagaagtcgcctaagctcagcactttattatgccttgaaattatactgcctgtcctacaggtgaaggtgttatgaatgcagtttgtcactgtaactctattcatagctctgaaaggctgagagtgactcagaagaatatttttgctctgaatatgaagaacgcttagactaaaactttaattacgatgctgaagaagaaagtggtaggtgattgcatgaataagtatgtaatattgttaatttctaaaaactgtgtatagttaatgtagtgcttctttttggaaaggctattgttaaattgatggtaaattctataaccaatatcaccttaaagcaagtacgcatgataaagtattataaaaccatgataatatcatatgtggcttattattgttccctgagtgttgtacaactctgttatgctgtgatgaaacctcatgcaaacaggtatgtcaaagatatgatgggctgttaactgagcttggcccacatatggtgtagtgacatgctcactaatgcagtgcagagataaccaataacagatcataacaggtttaaatatgtgcaaggagatgtcagcagaagctttcctacatagtgaatactaaacaagcctgacagcccaggatcatgttcggatcaatctagtgtgctaaaattaacatatagtcctacatttgagaatgtgtgattttcttggttcctgtctataaaataatattttaaaatacatacatttcaaatcagaagttggtgaattcactgaaatatttctagagaacactaggtattggggctcatagtgtgaaaaccactgacttaattcttcccccatcttggttgttcctgatcttcccttgtgtccccattccagccatttgtatccttagaaaatgatctcatattctacttcatctttatcttcattgtcaactgtcaggtagcaatatatgatggaagaagcatgtactttggaatcagacagacctggctggaatcctaactctgtcacttattaacaatgtgatcttaggcaatttacttaatctctctgaacctcagctactctcgtcagtacaatgagttatccttatctttacatggcacagtattattatgatatcaaaaattcattgagtatttactctgcatattagtcaaggttctccagagaagtagaaccaatgatacacacacacacacacacacacacacacacacacacacacacacacaatttattataaggaattgacttacatgattatgatggctaacaagtccaaaatctgcagtatgggtcagctggcaggaaacccaggagagtcaatgttccagtttgagtctgaaggcagtctgttggggaatttcgtccttctctgggaggccagcctttttgttctatacaggccttcaaccgattggatgaagttcacctttattagtgagggcaatctgctttaaccaaagtttactgatttaaatgttaatctcatccaaaaacacccacccagttgacacataaaattaaccatcactctctgtaagcactttctatgcattaagtgatagcaaataatgccagacatagggcgtctttaataaatggtaagcactgttatcagcaacaacaggattattataattagcaccttttcatctttctgtctgggctctgagaaagtacctctcttctctaaatttatccctcctttcctatgaattagacccagtgctttctctgaattatgaaggtcacactcctacaaatgccccttcccaattgcacatctgtcggctttctttgccattgacttttatctctagcttttaaatttacaggcatatgtcagttaacaatgggaatgcgttctgggtaatatgtccttaggcaattttatcgttgtgagaatactatagagtatacctacacaagcctagatgtcgtatagcctactacacacctaggcaatatgacatagtcttttgcttctaggctacaaacctgtacggcttgttactatactgaatactgcaggcagttgtgacacagtggtatttgcatatcggaacatgtctaaacacagaaaaggtgcactaaaaatactatgtagtgatctcatgggaccaccattgtatatgcagtctgctgtagactgaaatgtcatgcagtgcataactgtatcttaaatactcaaagtatcacctttgtttgtttgtccccttgtgtgcatcatcctaacgtggaatttctctgttgattagggccagcgtattagtttgctagggctaccataacaaaataccacaaatttggtggcttaaataacaggaatttattatcttatggttttgaagactagaagtacaagatcaaggtgttggcaggtttttcttctaagggccatgaggaagagtctattccatgcctttcccctaccttctggtggtttgctagaaatccttggcattccttgacttacagaggcatcaccctgatctctgttttcatcttcacatggcattctccctgtgagcctgtctctgtgtccaaacttctttactattaatataaggacaccagtcatattggattagggtctactttagtgacctcattggaatgttattacctctgtaaagatcctatctctaaataaggtcacatccttaggtaccgggggttaggactcaaacatacctttttttggggaaacacaattcaacctataacaattgataacactctttaggagcagaatgcgatatggaagtaatttgagaccataaagtatatacatgtagggagttaatctatgaaacctattgaaagccatatatacctcatgtatagtggtccataaatagcatggagacattgcagaggatgttaagtgatatgatacaggaacaatccaagaaggtcataagaaaaaggaccttttgctcttgagaggactgaagaatgactttccatttatgaaattttggtacatgtccactaaaaataggatgaaggccaaacttaggaagaatattttgataatggagaaggttgcatataaaaacattttattgaggacaattaaataatgttggctggaagttttaggatgatcatctttaggactcagaaaaagagaagaaacattattaaagaattgtccctgaacaagtataggcaccctcacatttgcattgcatttactatagaattgaaaaatgttttgaccttttttttttggcttttaatatatttgaccaagagtaacagctaagcaatacctatttgcaatcagtgtcatcatgtgggctccaaacatatcatgtttgtgtaattaattgattgacccattaatttgttcaatttctgctctgttccaggcactgaacaacatgatggagataaaagataaatattacacctgccttgtcctcaagaagttagtcttctgagggaaagaaattagcaaacaaattgtaatctcagttatgtgccatgttccatgctgggcacaggggatacagtagtttaaaaaaaacacaagatctataaggtgtttcttcttgtggaccttacagtctagggtgcttggaaacatggggcgttggcagacaagtaaatacacattttgtggtaaaggctcaggtagaagaagtacaggatagaatagagcacaccatggggaattaatctagacttcagagaggctcacacatacataatttatgtgtgactatttcaatgcatttgaggtttcttggaaatagaggttaggttttattttaaggaagttaccattttttttttcagtgtgatgtggttgaaccaaagaatgccatgcccagtgatggtaataggataatctttttaaaaattaagagccacctaataaatcaatagtttcattcagcgggagctcctgcagagttcaaaaagaagagaatctggcacagcgtttcctttaaagttcattttcctagagtgtgaatggaagcaagagattataacattttgaggtcaaaaaaattctgaaatgcctataaaaattattttctccaaattatcatcatttgtgcttttaatgacctgattgcaaagatgaacattttgaattcttaaattgcttattaggattggttaatgaatcaattatctattactgtatgttttgctattggaaaaaatagcaacttaagtgttttgcagacctttacttaggtatatgttgcttttatgaaaaaaaagatgtaaatattaagtaaaagggatttaaagcaaggcttttgaggtagagtcttattaattccttggtaaaccttgagccaattgttgtctatgttctctgcctctgtcttgctccttccttctgggattcactgtgggaatgcgggattgttaatctggggatgctgtccaatcctgcctctctcaagctttgctattgatctccctcccagtgataataaagcttgaagaaaatgaaagtagcgttagtattggtcctcaaactcaagaacaggatgaaacttaaatcttgagtcatacaattgtgtctacatactgctccccaaaaagagaagtaaagaagatgctaactttcccttttaatttgcagtacttagcaatttgttttcttgagggttaagtaataacagtggaagaaaaaagggttaaaatgccaccaagaacccaattccatgtttagtttgaaagtgggaaatcagctgccactgggaagtctgaatccaatgccatgatgttctttgaatccttctgagaaataatcatgtgtagccataacatacctgtataacagagcagagaacataaacaaatgaaggtgaagggaagattaagacagaagagaaaaattccagaatcgactgatcatttttatctgtttagatgatttcaggcagaatcctagagaccaactttatcacaactgaattttaaaaatcaccagctttgtcattgtgatgcagcatcagtttcagtattatccttggagtattaattcttaatcatcttcatcttagaacatttttgaggtcacttctagtctctatttcaccagtgaagaaacaaaaatccccaaactatatcaggtggaattacacagtattttttttttaattttggggaaagtcgattcaaggcagtaacttgcaagctagtgttagaaaggatttaataaatagtggtttttctgtacacatagtgagaggtcattacatcatttggttgttgaaagtcataaggatgtctagcatgcgctttgcctgtagtggttcatgccaggcagattcctgactcctataacccagagcttatcagagcatttatgtccccaaagagaaatgtcacctccatctttcaataaacactttagcaaagaaaaatcaagtactttaattccaaatcttgagttaattccagaataacaatgatggctcggaaaaatatgggtatttctgtcaaaggacagagaaacctagtagagagtatttactttgggtcctagtgatggtatctgaacaagctaggtgaacaaagagcctcaataagggattttgaggtctagaaaaagagaggaaataccaaataaatggaataattataaaataaataccagcaaagttaaatcaatatatcatgtgggagatatccttatatcactcatgtgatttctattttgttcctatattaggccaaggagaggtggaacttgttttcctttttccctctcagctacgaatggacatacttaaaactgtttctctgcttctgttctctaaaatgtgattgtctaacagtaaccgtgatgacgttttgacagttgcacaagtttctttctttaagctttaaaaatgccagccagtaacccagtggcatttctactataaaatcttaaggccaatccatttccccttttccttattttcttggtttcaaatatatttttattgccaatggaaataaaaatcctaaattagagagcaatggcatcccttgtcttgtgaataaagagctcctaaatgtgaacttatacaggatgcagcaatttatagggtagttaatcattcttctttctagccagttgttccagctacagttttgtggctcttgttagtggcttcattcccagatagaataaaaatcaaaccaaaatcctggaaaggcactctgaggatgcttctctaaagtagatgggcatcaactataaatcacaatgctttgtttcctctgttatgtttcaagatgggtgggattttttttgtagcattacttattattgcctctcaagtgcttgagtctttgaaatccaagtcatgtgagtgaattagatacagctgttagaagtggcctttcaatgccaatggtacacattccttggtttctttacgatactattgctcttacaacttttatctgaagtcataaattcatagttgtcccagaagttaagttccttgcttctagaggacagaaaacaaacaatttacacaactcatggtgcatgtcaccagtccttagatctcatgaaatatgcatgaaatcttaaatcacttgctgtagccacccagccattgacatatttgaaagactttagtgtatcaaagtcactataatgaaaattttgatttcaccagttctaggagtgaaaaatcaaatgtttagtaaaactttctaaaattaacactgacagttgatttctgtatactgttgttcttaataatagctttattgagatataattcatattcaaaacaacttacccatttaaagcatacaatccaatgattttttagtatcttcaaagagttgcctatcaccataaccaattttagaacactttcatcactgtaaaaagaaactccattcctattagcagtcattccttattccaaatccccctgctcgccctagacaactacaaatgtactttccatctctatagatttgcctgttctggaaattttatgtaaatagaacaaagtgttcttttgtgactggcttatttcacttagcattttttttcaaagattcatccctgttgtagcgtgtatcagtgcatcattcttttttatttttttagagacagggccttgctctgttgcccaggttggaatgtgcagtggcatgatcatgggtcactatagctttgaagtcataggcgaaagcggtcctcccacctcagtctcccgagtagctgagactacaggcttgcaccacatgactgtctaatttataattttctttagagacagggtcttgttatgttgtctaggctgctctcaaactccagggctcaagtggtcctcctcccacagcatcctaaagtgctgggattataggtgtgagccacagcacctggcttgcatcattctttttattgttgaataatatcccacttgtaagaatatgtattttatttatcctttccccagttaatagatatttcgattgttcctaattcttgtctattataaataatggtgctatgaacatttgtgtacaagtttttgtgcagacatccattttcctttcttttgggcatatacctacgagtgtaatggatgggccatatagtaactttatgtttaatattttgaggatttttcaaactgttttccaaagtggctgcatcattttaaattccttccaccattgtgtgagtgtttcaatttctccacatatttgcaacacttactattatctactcttaaaaattacagccatcctactgggcatgaagtggtatttcattgtgagttttttttttctttttctttttttctttttttgctaatgtttgtggattttcttttcattttcttgatggtgtcctttgaagcacaaaagtatttaattttgataatttccaatttattttttgttattgctgtttgtgcttctggtgttgtatctaagtgtatgctactttaaaaaattagttgtaatatggcaaattggatacatgtgtaggctttggtgtcacaatcctaattttaaaattctgactctgcccttgacaaattaactaattaagcttccttagcctcagtttctcaactgtaagttggagatattaccaagacctacctcttgaattgttgtggggatcagatgaaataatgtatgtgaaatatttagaattatgcaagtctgtggtaatgaatactaatgttagctatcattattgttataatcccaataataaattctggtgctttgaaaattaaaccaaagccaagcagttgatatgaagaagcatgtaataatgtacagacataatgctttatagacaacattgaatttggctctcatgaacatcaggaatagtggtcatggtagttattatctccagcaggaactgtagctgagagatcttcagagctttttccaaggcgatatcactgggaaataatagagacaaggttacaagctagggctgtgttttcttcttaaaatctttagttcagtttttttcaataacagatttgtagtaggcatcaggtgactggggattcgtattcttcaagttgaaatattaccttgttgagaaagaaaccatgtgtgagacaaccatgttgagaaagaaaaagtgattttatagaaaattaatattgatagtgagcattatatgaaaatcatgaagttagaacatatttggccagaaaatttacattaatagttacccatagcaattaatgcattataattacacataccttttctttaatgaaaaagaattctttccttccaaagttatgcatgctattgttaaacattagagaatatagagaagcaaaaaagaaaatatcttttttgatattttcttaacatacgtctgttcctaataatgtttatagtttagaagcattgcatgaaatgggtagatcaattttctatttaatgtttggattcattaggtacgaagttagcaaattaatttccattagggtgcctgtatggttgtaaatcctggacctgcagaagatttttcagtattggtttgtagtcttttgtttagcagcaaataattagttctccagagcttctgaaattaattgaccactttaatggtgtttacctacctagagaaagaaaaagaacttctccaagtcccttggtaaaattaagcctcatgaacaattaactcaaatatacacaaggcttgtctttagcgagcatatactccctaaagttgattaagctgaccaagtgattactgcttataaattcaccattttatggagaagaagcaaacactgctaaataccttgtggaatcagaggaggggaaattagtaacttgaccccaatactgcgattttaaattgaattcttgaagcctacaagttttacacaggactttagagagctggatagtatcactttgtcaagtcctacttttactatgattctttgagaaaaatacatctgactaaataactctgaatctaaattggataaaataaatgtgacattcaaaatgttatttatgattttagaaaaatatccttatagacactagatgagttttagtctcaaatcaatcctccctatcatagtcacttatcaaaataactaaagcaaagtggtagagctgtgctctagaagtttgggatttatgatcacaatcttttccaatgagtcccctctttcctctgcctgtcttcaacatttgtttttttttttttttggttaggactatccagattgtgtggcctatttcaaactcatggcaaatacattggatgatcagaaattttctaatgtatttgaatttgtctacacaaactagagtaattgctattaattcctcaagtgttaattatttcatgcaaaaaggaaaaaggctattagtctttaagtgtattagtatgtcaatatttgggagaagtgtcatgcaattagtggtttgaatttcctattttattttattgcattttattttatttgcctagtcaaataaaaagtaatgttaaatacatggaagcatgattgttttctacactaaaaatcattttgacttgaaaagatctgatatccatgaccttcatctgaagttttggcagatgaaaatgtcagatgcgtcttttggattaataaaaggcaaaagtcagatcgaaaaatgagtataagctttaattatatgactttaggaggatatgttatgaaaatcaaagctttaatagtgattataattggcaagttctttttttataaggaattacaagtcactctatacaaaaattggaatttttgtcctaagaaatgaaatttactatagtttcatctgtgtgtgtgtgtgtgtgtgtgtgtgtgtgtgtttaaaaaatcaagtgatagggcttttcctcaataaaatctgaaatctcttatagttaagtgaacagaacagtgtatctaggatgctagacttttttttcaaagttagtttaaaacttatacatagtaaaatctgtatgccttagggatctctgtttgctatcccatagtgaatgattaattagtttctgttagaaatagtcagaactaggctgggtgtggtggtggctcatgcctgtaattccaggactttgggaggccaaggcaggaggatctcttaagcccaggaatttgcaaccagcttgggcaggctggtgagatcctatctctacaaaaacaaacaaacaaacaaaggacaataagaaagaaagaaatagccagagctttgaacaaaatttctaagtagaccaatgtaaaagtctgtcgtcaatatgtagtggctatgaatggaggttatgaatgaaagagaaggataagatgaactagaggtgagaggggaagacagcaggcccaagtgaaaggcagagccgagtttattgctttttggttattccaggtgtgtctgctttgtctcatgaaacacctggatgatcactgatttctagtggaagaaatgctgaaaagtccttactgtgcatttaaacattctaggtttaatatactcagggtttttcaaaagaaagggtggctggagttttgcactaactaatatttcataaagtgtctaagtatagatgtctggtttttttttgtatttctaagactggcttgaggtaggcatggagaattctttgatgggacataattttcttcctttctttttttttttttttttttttttttgagacggagttttgctcttgttgcccaggctggagtgcaatggcacaatctcggctcactgcaacctccgcctcccaggttcaagcaattctcccacctcagcctcccgcgtagctgggattacaggcatgtgcccccatgcctggctaattttttttgtatttttagtagagatggggtttctccatgttggtcaggctggtctcgaactccttacctcaggtgatccacccacctcggcctcccaaagtgctgggattacaggcgtgagccaccgcgcctggcctgatgggacatatttttcattcaattttattgatttaacctcacaaaataaaatatttccttaagatgactctgtggtcattgttgggcagcataagcttaatggattttagttatcataatttaccttaaacccaatttgtatttcaggatataaatagaggtttattgtagtgaatcttccaggaaatactaagtgatactaataattatagatggtgaacttaagtctttatattactgaatttgtttggtttgatgatgctaggctatggcattcttgctaatcaaaacgatgtgtcatggtgtaacataacttattaaaatgggcacagataacacaggaagctttttataaaagcagctcacaaattgtgttactttgaactgaactggccatttatgggaaaggtcactgggttgtaaataaggaccaaaagagttacgtttatattttttaaaagagattgaggagatttatttttacatttcttgaaaatgccttattttggtatggtattgacagatagtgaaattctgctcatttgtaaatatagtgtcatattttaataatttcaaacatattgaaaatgcagaatttattaatagtgggagcacattttcctttttactaaatgttctacaggttcttttctttccatccacacacagtgccattaccctcattctaagcctttcaaacatctggcagtaagtgatctgctgcacttagctctttccagctgagctgatttttaaattttcagaaaatttgtgagctaattgttaaacatggccattattaaaaattaaattatttcaacttataattaaataaattatattaaaacaaaagtattaaaaactcaaaagttggctgggcgcactggctcacgtctgtaatcccagcactttgggagaccgaggcaggtggattgcctgaagtcaggggttcgagaccaacctgaccaacatggagaaaccctgtctctactaaaaatataaaaaaatagccgggcatggtggtgcatgcctgtaatcccagctactcaggaggctgaggcaggagaattgcttgaacccaggaggtggaggttgtggtgagctgagattgcgccattgcgctccagcctgggcaacaagagtgaaactctgtctcaaaaaaaaaaaaaaaaaaaaaaaagaaacaaaaaaaaaaaaaaaacaaaaagcaaacaaacaaaaaaacaaaaattatcacttcctaattattttgcattttactattatctatgctattaacgttatttgccttcattgtatttgaaaggtggactatattctattgcactttcattgtactatattctaatatgcaactgtgtatcccttcccaactctgtgttcaatgactttatatttggttgctttaaaatgatgacgatgagagtatttatatcatagaaattggcaaatgccgtaagtcagtttttgtttttgtttttgttttccggagaggggattgttaaatatttgcctgcatgcaacaccactacatgcagtctgctatcttttgttcttcctgctttcaggctcctctcccagctgtctgtctagcacaacccagcataccaaattttcttaaatagggaaagttgaacatggtaaaagaatgaatgaagtcaaaagaatgtggaaagacctaggctttgccatttagtaaagtttagcatctctaagcctccatctctttatcaataaaattgagcaatgatcccttttagttctacccatttaagaagattttcaaatgaaaaccacaacctgctcatgtttatgaaggcactttggaaagcgctaaatacacgggtttttattagtagtaaacacttacttcacctttttcacttcttgactttagtttacaagggctcataatctaaattatatcataaattgctgtcccagatttttttacagcctaattgccacctgtatgttcgactttccttctgttctttatgttagatactgggatagtatgcaccaggtgggtgtgccatcactttctcagatgatgtccactgaagaccttgcatgatcatggcattcattttcctgctgtattcagactggcctcaactattttctttattgctctccaggaaaaattacaaatgaatcagactgggcaatgaagggtaaacctaattatcgctctttgttaaagacagctcttgttaaaatgcggatattgcaaattaatggaaaaaatatgacatagtaaaccatactcacttattaatatcttagtaaggaataattgatgaagttacttaaccttagagccctaattcagttaagttttaatgaaggacaagttgtagagatatcgagaacccagggcaggtgcctactgaagaagttccagaccaaggaagtataaagaaggacctgggtgggagcagtgagattggatatgagggccactggcaaagttttgccccagaacagtgtcaaaatgtttgcatttggcatagccctttctctttttgttctgaatggctttgctagaatatcttttctataatgaatttatcctgcttctcagatattgctaaagcactcccttttgaattttggtgctttaacatgcattttgatacattaccaaataaggtctgaatgacacaaattttagaactctccagagaaaagaaagatgctgagggaaaaagcataggtttgggactcactaaatcccagttcaattcctttctttaataaatatattcaattttacctgagaaagctctcgtgctctcgaattttatttagaaatttctctttgtacatgattgatttcacaatccttcttctgcctcctcttctactttcttctttctagattttcctatctttatgaagattattctgccttatcctcaacagttagaaacaatatttttgaaaatcactacggtatcctgcatagtgatttcccatgccaactttactaatttccattataaattattatttattgatgcctagagggcagatgagtgtagctgctatggagtgaggagacaaaacataagaaagttatgatcctaccctcaggtaatgattcagacatgataattaagtcaacaaattgatagaaactaatcactaactctctggctatagtcattctttcaatgaatagctcattactgagtatgcatgctacagtaacaaaattatataaggctgttgattaaatgttgattaagtgcatgtcttattcagagtttttttatatttgaaatggaagaggctggacttcagtaatttgctataaactgctagtatatgattatttgggggcagttattttttaaagaataatttaaatatggaatgtttagcagtttgttttttccctgggaaaaaccatactattattccctcccaatccctttgacaaagtgacagtcacattagttcagagatattgatgttttatacaggtgtagcctgtaagagatgaagcctggtatttatagaaattgacttattttattctcatatttacatgtgcataattttccatatgccagaaaagttgaatagtatcagattccaaatctgtatggagaccaaatcaagtgaatatctgttcctcctctctttattttagctggaccagaccaattttgaggaaaggatacagacagcgcctggaattgtcagacatataccaaatcccttctgttgattctgctgacaatctatctgaaaaattggaaaggtatgttcatgtacattgtttagttgaagagagaaattcatattattaattatttagagaagagaaagcaaacatattataagtttaattcttatatttaaaaataggagccaagtatggtggctaatgcctgtaatcccaactatttgggaggccaagatgagaggattgcttgagaccaggagtttgataccagcctgggcaacatagcaagatgttatctctacacaaaataaaaaagttagctgggaatggtagtgcatgcttgtattcccagctactcaggaggctgaagcaggagggttacttgagcccaggagtttgaggttgcagtgagctatgattgtgccactgcactccagcttgggtgacacagcaaaaccctctctctctaaaaaaaaaaaaaaaaaggaacatctcattttcacactgaaatgttgactgaaatcattaaacaataaaatcataaaagaaaaataatcagtttcctaagaaatgattttttttcctgaaaaatacacatttggtttcagagaatttgtcttattagagaccatgagatggattttgtgaaaactaaagtaacaccattatgaagtaaatcgtgtatatttgctttcaaaacctttatatttgaatacaaatgtactccctgggaagtcttaaggtaatggctactggttatcaaacaaatgtaaaaattgtatatttttgagtacctgttacatgccaggtagaatatctcctctcagccactctgagtggaaagcatcattatctctattttacagaaaagcaaactgaggctcagagagataatatactttgccagttaatgaatgatggagccatgattccagctgaggtctgtattgccttgctctctaggaatggtagtcccccccataaagaatctctcagtttcctttccaatcaaaaggttaggatccttttgattgccagtgacagaaacccaatttactagcttaagtaaataaaaggaacgaatttattggctcatgaagcctgaactatgtgaagacctaggtggagaactggccttaggaactcaatgggaccaaggactcaaatgccacctggtggcatttgccttatgctggttttattttctcagaccggaccagctttctacataaagtgggtccctggttagaactctttgctcctatctttaaggaccacgaaagaaggagccctttgtccttggctaaatgtgaaaaatcccagagactcttgagtcatagtgcttaccccttgggccactcatagtctagaatgaactaggctgagtctcgtgccaacagcacaggcctgatgccagataaaagggtgagtgaagggggataaaaaataagacatagctactaaattattgcaccaaagtaaaaacattgagttgacttgcaatttgtttcttttaattaaattcatttcctttttttggcattttgaaggcaaagtaagatattaaactttatttttattgattttattcaaagaattaagctagtgggagtagcagattcacacttctaagatcaagggccagcttctattattgaacacttggtgtgtgcaaatgccatgaggtagggatactttgttttgttttttattttttattgggttcgatctcttttgtttatgatgtatccccaagtgcctagaatagggcctggcatatggtatatactcaataaatatttgttgaatgaatccatgatggaatgtgaaatggctagcattacatagaaacctgtagcattgctggagagataaaatatataaacataatccattgcaggtatattgacaagttcaaaataatataatgggtattgaatatctaaatgtttgttgttgttgttgctgttgtttttgagacagagtcttgctctgttgcccaggctggagtgtaatggtgcaattttggctcactgcaaacttcgtctcctgggttcaagtgattctcctgcctcagcctctcgagtagctgggtttacaggcactcgccacaatgcctggctaatttttgtattttagtagatgtggagtttcgccatgttggccaggctggtcttgaactcctgacctcaagtgatctgcccaccttggcctcccaaaatgctgggattataggtgtgagccactatgcccagctttgaatatctaagttttaattggatgctgagggaatgattaatcagagtagggctgggttaattgaaaaatgtgatacatttgtatttatggccagatagagaacatgaatctgaatttgcagaattatctggcttaacatttttttctttccagttttcactgtatcccccatgttgattcaatttaaaaaatatacctattttacttcaattcaacaatgctatgccagtacaaacccatacgttctattatttttgttttgttttgtttttgtatctccaccctgttacttcttttcttataaaattggtatttgaaatttattgaaatattttggaagagtgacataccatttttggtactttgtacctctgcacccttgggaagtgaccctggcttcacatttcataactgccttgtgaccatggccctcaagtggttgccagatggttgaagaacattaacctatctggctcaattttgtgaccatggattgaatcctctacataactgcagtgtgcaaaccacacatccgttccaagattgtagtcaggatatgaactttttaagaataaaacttcttcccttctgatctgggcctggtatgtggtcctactagaaccacatcacctactcttggtgctaacaatttgtggcaccaagttgttcaagtttcacccattaaagaaattccccgaccttgccttctcctcaggtaactaccccattctattttttctttcatagctaacattctctgctctcctggtctctctacttcactttcatttacatctcagctcctgaagtatggtttccaccatgttcctaaaactacattgcccagggtcactagagacctcttatgaaatataacaacacctttctacattacttccgtgtggaccactttttcacattgaacccattttgttggtttatgtacacaccccttccttggctttcccatctgatccatttctcctttgatggagaaggtgagtctgctccatatttagcttcttactctgagtaaccaaatgttatggatgggaggttagctctgtgtgtgagagaaaggtggagaagcatgtggggagggaaatagatgggaaaaggtaattaggctttatagaagggctctcattagcaagcttctaggggatgccaagatccatgcttagagattgccaggcttgtcttcaaatctcagctgtgtattactcctttatgttttttgtttgtttgtgttgtttgtttttgagacagagtctcgctgtgtcacccaggctggagtgtagtggtgtgatctcagctcactgcaaactctgcctcctgggttcaagcgaatctcagtctcctgagtagctgggactacaggcatgcaccaccaggcctggctaatttttgtagagacggggttttgctatgctggccaggctggtcttgaactcctgacctcaagtgatctgcccgccttggcctcccaaagtgttgggattagtggcgtgagccactgccccggcctattactcctttagagtgatttagagccatgtttacttatggtaacttgacagtaatgggaataaccactgatgaaacgtaaagcctttgtctaattgtttacctagttcttccttgtggttcatgaaatttttcatctctgtacagtttgaaaattaagatgataatatttagagatattttattcctttgtgaagagaaaaaaggctttcattaacagaaatcagtggcaataacttaataaatacaatcagctggtgttcctatagtatttaaaagaaaacagaaagtttactagatttcagccagttttcagactatttaatgtctattcttactataatagaaaatatataatttgatcttgttctcatttttcaaagacctttaatacatgattttagtagttgaaaatgaagtttaatgatagtttatgcctctacttttaaaaacaaagtctaacagatttttctcatgttaaatcacagaaaaagccacctgacattttaacttgtttttgatttgacagtgaaatcttataaatctgccacagttctaaaccaataaagatcaaggtataagggaaaaatgtagaatgtttgtgtgtttattttttccaccttgttctaagcacagcaatgagcattcgtaaaagccttactttatttgtccacccttttcattgttttttagaagcccaacacttttctttaacacatacaatgtggccttttcatgaaatcaattccctgcacagtgatatatggcagagcattgaattctgccaaatatctggctgagtgtttggtgttgtatggtctccatgagattttgtctctataatacttgggttaatctccttggatatacttgtgtgaatcaaactatgttaagggaaataggacaactaaaatatttgcacatgcaacttattggtcccactttttattcttttgcagagaatgggatagagagctggcttcaaagaaaaatcctaaactcattaatgcccttcggcgatgttttttctggagatttatgttctatggaatctttttatatttaggggtaaggatctcatttgtacattcattatgtatcacataactatattcatttttgtgattatgaaaagactacgaaatctggtgaataggtgtaaaaatataaaggatgaatccaactccaaacactaagaaaccacctaaaactctagtaaggataagtaaaaatcctttggaactaaaatgtcctggaacacgggtggcaatttacaatctcaatgggctcagcaaaataaattgcttgcttaaaaaattattttctgttatgattccaaatcacattatcttactagtacatgagattactggtgcctttattttgctgtattcaacaggagagtgtcaggagacaatgtcagcagaattaggtcaaatgcagctaattacatatatgaatgtttgtaatattttgaaatcatatctgcatggtgaattgtttcaaagaaaaacactaaaaatttaaagtatagcagctttaaatactaaataaataatactaaaaatttaaagttctcttgcaatatattttcttaatatcttacatctcatcagtgtgaaaagttgcacacctgaaaatccaggctttgtggtgtttaagtgccttgtatgttccccagttgctgtccaatgtgactctgatttattattttctacatcatgaaagcattatttgaatccttggttgtaacctataaaaggagacagattcaagacttgtttaatcttcttgttaaagctgtgcacaatatttgctttggggcgtttacttatcatatggattgacttgtgtttatattggtctttatgcctcagggagttaaacagtgtctcccagagaaatgccatttgtgttacattgcttgaaaaatttcagttcatacacccccatgaaaaatacatttaaaacttatcttaacaaagatgagtacacttaggcccagaatgttctctaatgctcttgataatttcctagaagaaatttttctgacttttgaaataatagatccataatatatattcttatggaaatctgaaaccatttgggcatttgggggtaaaaagtattttattagtaaatttaaatgaggtagctggataattaaattacttttaagttacctttgagatgatttttctcaatcagagcaccacccagagctttgagaaacaattttattcacagcttctgattctatttgatgtaatttttagaaaataagttttgctggttgctttgaatcagggtatggagtacagttcactctgatcctatcatataaatcatgtaagtatataacattttcaataagtgattgttggattgaagtgaatgatatttcaagtaattgttatgtcatggccaagatttcagtgaaactcaaaatttctcctggttgtgttctccattgcatgctgcttctattgattaacctaagcactactgagtagaagctggaagaggggtctaattagaaggcccctttctatgctctgcttggcttgtaaaataatttatttctctagatcccaccaacatagtagtttcatgtatgcaaaaacacccacctaaatgtcaaagtttgtatgatacatggacatatctatagaattttttttggtctggtgcatgccaaaaaataaacatgatatagaagaatttaatatttattgagtacctaatctgttccagttcaatatgaaggtctttatgcagattattttacttaattttcctagtaactccatggagcaaaaattatctctaatttatataacaggaagttgagcgtgaggcaaattaagtaactttcccaaagttacacatatggtaagtttgagagatatcccagtctctttagctccaaagcctttgaccctttcaccataccagattatgattgctattaatatataattataattataatgattgtatttaggtactcaacagaatggtgactctagtaaccagccttggttctgctgagcttctctgcgtcttctcaggagacacaggctacagagcttgaaggctgaggattcttccagggtcacttcaggggcaaatctgaaactttcttcaggacaggaatcaacgagatcttctcacttacttatacctgggggaggaactgtatgaaatccacccaagaaccagtcatgctaagggccaaacctatagacaaaaaaagggataggagaatggagtatgtatggagaaagactaaattgttcttaaacttctcaagcttaaaaatatcccagcaaaagagatcgtaaaagcccttcatggcgtattaattatccatgcatgggggtgagtggaaaggtactcctgagcccgaggctacagctttggaactagcagcacctttgaaggggaaagcgtgtttccatcatctcaactcctactgataaccaatggaatattggtgagtaaaggatcctgggggaagaagcagctgaaatgtgtaggtgagaaggcagagagaagaatatttatattgggaatggcacaagtgtgatgaggctgcaggtttttcacccttgtcatagagaaaaaaccacgctgacaccatgcagttttaaatagtgagaaatttgcaaattgttagatcttaaataatttagataaacatagtggccatttagattattgcagttttttcaggatatctgatctcttgatttcattctttttgtctcttataagaataaaagggggggagaaaatttagccattatagtatttctctacattttctctgtccttttacataacttacaccagtgccttcctatttatggtattatttatgggtatttcttcttttctttcactgagcaaggataaatgagccagggattcttgaaactactgtaacacttctcttagaaatagatggtcatactttcagaatctctacacattcttagtccctctaaacaatgatagttgtggcataaaaatatttgcttggtttcaggactgatagagaaaagtactataaaatttgctgttaactgtgaaaggttaaaaaaaaggaggtgccatcatgaaggagctaatctttctgaagtactgctgtagttttaaatattattagctatgacttctcaccattaactatgcacttgctttttcttcatctgactcagcagccagatagatgcaacattgtctttaacatttaagactcctagcaagtccgggcacgggggctcacacctgtaatcccagcactttgggaggccgaggtgggcaaatcacaaggtcaggagtttgagaccagcctggccaatatggtgaaaccctgtctctactaaaagtacaaaaatcagccaggtgtggtggcgtggtggcgggcacctgtggtcccagctacttgggaggctgaggcaggagaatagcttgaacctgggaggcagaggttgcagtgagctgagatcgcaccactgcactccagcctgggtgacagagcgagactccatctcaaaaaaaaaaaaaaaaaaaaagactcctagcatggaagagaaactggctgttgaaaacctgaatgtgagagtcagtcaaggatagtttgagggaagccaagtagaggaagctctcacaagcagattggtgagagaatatgattatacaatgcatttattatgataagaaattcacaagcattcattcaaaatactcttgattcctaggcagctctgggcatatttccaccaacaaattgaggcatatgtcagtgcagcctaggtcagactaccttttttcattaaacctcacaaaattaaaggacatacaggagaagtcctggtactcatgttgcagactacagtctatatggcaaaggaggatctctgtcccttatgtttggatgaaaacattgggtaggcatttgaatacaagcctactgctaatatggggctaaggtctttggccccctaaaggtttgctgaaatattactgacaggaggcagattgataagaggaaaagcacataaatgtatttgacatgtatacatgggagccttcaggatgaagacctaccctctcagtgcagtatggaagcttgtataccatcttgaggttacagaaagaatgggggtttggatctttgtaaaacaggtttcagtggcaagacaggttatgagaaggagaaaggaagagacttgggtagcaaagggggtcttgttttgtaggtaaatcgttggcagcccacagagaaaatagatggagaatgtttcttttcagaccttggcaggtgtcagattctcagttaatctctcctagatttgaaaaaaaaaaaaaaggtctagaaagggagagcctggctgcactaacacattttctacagatgcaaatttctcccacaaaatacagctttgcaggtccacttctatctgctgggcctgtggcaaccatttcaaaatatgtgaatgaaatatatgtgggggtaaactatttttatttacttccctaaagaagggatggtgttctctcgggaattctgtgcatagagagcctgtggcttaggcactttgatttatgtatatctcttcctgtgattggctatctagggactgctatctccagcaaatcttctaaatgtctgccatgtagaattcctttctcatctttctgtctcacccccttatctagctgcttctctaaccctagagtgacactgcactccccacaatctcctatgtcctgaatattttaccccatcctaaactccatctctaacacagatgcactttcttgtgctgcctactgcattgtacatcttccccttagttcccatgatgcaactctgccctaccccagaaaatgtaatttaattggtctgggataaaacctgggacactatcattcttgaaatattccccaagcgattctaattatatagccaaagttgagaactatttgtagacaggcatcagcatgatcacttaatgatttgacttttgctagatctaaggtgaggaaattggagagtggtatccataggaagaactgtttagtttaattttttttttattttttcttctaaaaaaaaatccaacaacgagatacatgtgcggaacatgcaggtttgttacataggtataatgtgccatggtagtttgttgcacctattgacccatcctctaagttccctcccctactccttacttcccaacaggccctggtgtatgttgttcccctctctgggtccacctgttctcaatgttcaactcccttttacgagtgagaacacatggtgtttgattttctgttcctgtgttaatttgctgaggatgatagtttccagcttcatccacgtccctgcaaaggacatgatctcattcctttttatggctgcatagtattccatgatgtatatgtaccacattttctttatccagtctgtcattgatgggcatttgggttggttccatgtctttgctattgtaaatagttctgcagtaaacatatatgtccatgtgtctttatagtagaatgatttatattactttgggtatatacccagtaatgagattgctgggtcaaatggcatttctggttctagatacttgaggaatcgccacactgtcttccacaatggttgaactaatttacactcccactaacagtgtaaaagcgttcctatttctccacagcctcaccagcatctattgtttcctaacattttaataactgctattctgactggcatgagatggtatctcattgtggttttgatttgcatttatctgatgatcagtgatgctgagatttttaaaatatgtttgttggccatgtaaatgtcttttgtgaagtgtctgttcatatcctttgcccaccttaatagggttttttttttcttgtgaatttgtttaagtgccttgtaaattctggaaattagatctttgtcagatggatagattgcaaaaattttctcccattttgtaggttgcctgttcactctgatgataggttcttttgctgtgcagaagctctttagtttaattagatccaatttgtcaattttggctttttttgcaattgcttttggcattttcctcgtgaagtctttgcccgtgcctatgtcctgaatggtattgcgtaggttttcttctagggtttttatagttttgggttttacatttaagtctttaatacatcttgagttaatttttgtataaggtataaggaaggggtccagtttcagttttatgcataatggctaggcagttttcccaccaccatttactgaataggagatcttttcctcattgcttgtttttgtcagatttgtcgaagatcagatggttgtagatgtgtggtgttatttctgaggtctctgttctgcaccattggtctatatgtctgttatcgtaccagtcccatgctgttttggttaccgtagccttgtagtatattttgaagtctggtagcgtgatgcctccagctttgttctttttgcttaggattgtcttggctatatggagtcttctttgattccatatgaaatttaaaataatttttttttattctgtgaagaatgtcaatggtagtttgatgggaatagcattgaaattataaattactttgggcagtatagccatgttcacaatattgattctttctatccgtaaggacgacactttttccatttgtttgtgttctctcttatttccttgagcagtggtttgtagttctccttaaagaggtctttcacatcctttgttagctgtgttcctaggtattttgttctctttgtagtgattgtgaatgggaattcattcttgatttgcctctctgctgcctgttgttggtgtaaacaaaattcatttcttgttcttatttgtgaaattttggaaccaaatctattttcaaattagaaattgcttgtgataatggttttgcaacttagactggatatgagacgatgagatattagttctttcattcctttgtaggaatatggtgcatcttgcattattttagctaactagtgtcctttaatgactaatgaatatgacatggtgaaacaaagtaaaatatatatgatgcactaagtatgcattgtttccaaaggttcagcattttttttttgttaactctgctgggatctgctttatgcactgataacataacttattttatgatcttaagcaaataaaaacacttatctggacctcagtttccttaactgtacaactgagggaaactgtatagtatagctatagtacagtataccatctttaccgtcacttccatcttttaaattatgtgtatataagatagggcctagataaatggtatttatcttaaattacagtgatactagcttataacttaatttgctaggtcatgttgaactgataacaatgtgtgaactgatgagcaactgagaagtaaccaggttgtgttataacagtttgtttttgatttagggttatcagtgagggtggcggtggggaggggactttggagtctaactgtctagttcaaatattagtttttgtttatttttatttttaatttttgtgggtacatagtagatgtatatatttatggggtacatgtgatgttttcatataggcatgcaatgtgaaataagcacatcatagagaatggggtatccatcccctcaaacacttatcttttgagttaccaacaatccaatgacactctttaagttatcaaatcacagttttgccagctactagccatgtgattttgggtaggttacttaaattctcttcatctcaatttcattattgtaaagtggagataatgatagcacattttttctttttcttttttcttttattttttattattatactttaagttgtgtgatacatgtgcagaatgtgcaggtttgttacataggtatcaacaactctataaaacatgttctatccaggaaaagaaactatcatcagagtgaacaggcaacttacggaatgggagaaaatgtttgcaatctagatggcgattgcaatggcggttcgctgcatccatcagcccatcatctacattaggtatttctcctaatgctatccctccccttgctccccaccccctcacaggcccctgtgtgtgatgttcccctccctgtgtccatgtgttctcattgttcaactcccacttatgagtgagaacatgtggtgtttggttttctgttcttgtgttagtttgctgagaatgatggtttccagcttcatccatgttcctgcaaggacatgaactcatccttttttatggctgtatagtattccatggtatatatgtgccacattttctttatccagtctatcattggtggacatttgggttggttccaagtctttgctattgtgaacgctgcagcaatgaacatacataagcatatgtctttctagtcaaataagttataatcctttgggtatgtacccagtaatgggattgctgggtcaaatggtatttctggttctagattcttgaggaatcgccacactgtcttccacaatggttgaattaatttacactcccaccaacagtgtagaagcattcctatttctccacatccgctccagcatctgttgtttcctgactttttaatgatcaccattctaactggtgtgagatggtatctcattgtggttttgatttgcatttctctaatgactagtgatgatgagcttcttttcatgtttgttggctgcataaatgtcttcttttgagaagtgtctgttcatatcctttccccactttttgatggggttgtttttttcctgtaaatttgtttaagttccttgtagattttggatattagccctttgtcaggtggatagattgcaaacattttctcccattctgtaagttgcctgttcactctgatgatagtttcttttgctggatagaacatgttttatagagttgttgtgagaattaaatgcattaagcacatagaatagattctggtacatagcaagtgctctctctatatatggaactctatatgtagttggtgcaaaagtaattgtggttttcaccattgaaagtaatggcaaagaccatcattaccttttcaccaatttaaatatatggaaggaatatatatataaaacctatatatatatgtcacatatatgtctctaacccattattataatatataatacaatatatattataattataattgtatataacatatgttatataataatatagtaatatttattctaaataaatatataatactataaataatataataatttatatatatgattataatatataataggctatattatatattattaacatatacatatgtgtatatatatgtctttcatagacttaaatatatagagcaataataggttagaaaatagcaaacatgtatatataaacatatatacatatagaaaacatatataaaaacatatatatatatatatatatgtgtgttttctgcctttcatttttagagacagggtctcatcatgttgcccaggctggtctcaaactcctgggctcaagtgatcctactgctttggactcccgaagtgctgggatttcagacatgagacactgcacccagtccagtccctgtctttttaaatagactctctacctaagtgcacaaatactcattatttacatttagttatttctgtatatatgctataagcaaatcttgtagcaccagtttgatttttataaggcacaagaatatattttactaatgctttaaaatggcagctagattctagtattactttagaaattaaaattaatattttaacacatctttcattattgtgttatctgaaccaaacctattattgctgctatttcagcaaatccaggggctttttcttataaaatatgaagaatatagcttagatttctagtgaagatgttaccagtaataattaataaaatcagtaagcactaaaaggaaaataccaaaactaaagcattttgaattagtcattgaatctaaaagaaaggtagatttttttctgagattctgttctaggtgtggtatatgtgtatttttgcaaaaactataaacaattgtggcaaaatgaaggaaatatttaaaaacaaacctcttaattcttcagtggattaagcgtgaatatgtttttattttctatgatgaatatggaaaaattcatttccttagcaatttgtatgagcccaaaaactattgtcagactctgctgtatcaaaatagacaaaaaattgacactcacttttaccctgccaaaagcaaaatcttaaacttttgctttagtatataagccagcattcattgtatcctatgatgggttctgagtgtaggtgtatttgctttcttccattttttgtatgcatgttttctttttatttattattgtaagttgtatgaaatttttatccaaatttttattttcttctgattaataatcagaataatcagataattactggtaaatttgatgttaatccttccagctttttcccatgggaatttatacttaataaaggggagaagtcatcattacataatgtgcatattaatctgcttctccctttaatgtgttgtgaatgcctttccatgtcattagatgtttttctacctagttactttcatgaatcatatggctgtaccatgatttatttaatcagttcctcatcattgagtatgtaaattgcctccatttttttattactataaaaggtccttcagtacacacccctttaaaagctgactcttagaaggtgttcttgactctctacctaagtgtaaaaatacaaataaattgctttccagaaaaggtgcactactattttactttcctgatactaaactatgaaaattcagtcctaacaatagatatttaaataaagttttaaaaatgccaagtgaaaaagagcatattattattttcatttgcattacttttggttcctggtgagtttaatctgtttttgtatattaattatgcatttatatttctttttgtgtgtgtgaattgcctttcatgttctttgtgtgtttttattttgttgtatttgtctctttcttgatatatgagagaatattttccctagcctgtcaattgccttgtaattttgtttctagtgagtttttttttttttttttacaattaaaagctttaatttttgaaaattttgctggcaaatctatataactttttctttgttttctgctttgacattattcttttataaaggcccatgccacccaaatattatgtaagcatgcatctatgtttttattacttcatcttttacatttaaatatctactctatttagaattcattgtgatgcatgtatgaggtagaaatctaatttcaaaaagatgagtatccagtttgtccatcatttattgcatgatctctttctccactgaattaaaatgccgtattttataatatattaaagtattacatgtgcttggacatgttcctggacttttgagataaatcagtctatttctttgtcatgtcacatattattatggctttatgatttaatatccagtaatgtaaaccctctgacacattattcttattcctcaaatgtttttgatgagttttcttccaaatgaaatttataatcattttattcattgattcaacaaatatttgttgaatggatattctgtgcttggtattgtgcatggtattaggattgttgcaaaaattgagactgacagtccctactcttacggtgctaaaaattcacttccaaaaaaatctttaaatgttgatgaagattgcactaatcttataaaataacttggaggggaatgtaatctttgcaacattaagttcttcattttagaaagttttaagactctccatttatttgagacttttaaaatatgtcccaataatgttttgtgagatgtatattttaagatatatatcttattgctattacattgtatcttttgttatattgttactatgaatgggatactcatttaattagatgtcatttttggtatatagaaatctattttcttagcatagtcattttttaaacctcgatctattaaattcttgattcatttacatttgttacacaatcatattctatgctgataatacttcttgcttctttccaatatttgtacctcgatcatttttcttgttgagttgtattagctagaagttctagaaaaatgttaaatggtagtaatagctagtattctgttttttcctgactctaaatgtaatgcatctagacttttataattatggcattgattgtaacattttgaggaagaaatcctttttcaggttaataatgtatctttatattcaagtttattaagaacatttattggaaacatattgaaattttatcagattccttttcagttgttactgagataatcataggttcttctgtattcttttaattaatttctcaaaattaaactgtcctattattcttggaataacgacatataaagtactgtatatttaaaagaagttaaaatgataatggtgattttattaagtgacctcacacaatagaaaacagtgtagccttagaagttttccaagtgaccattctacttagaaacaaccctgctttgggatcagaactgtaatttttaaagtaaagttttctgggtttaattcatttagtgtaattacaagcatgagttcaggtttctatttttttcacctgaactttccttcatggtttgaatatctagaaaaagcagactttcctatctctagactaaacatttgatcctatcttaggtatgcattacaattttttaaccataaatggttaaagaatttagactcatctacaataactttgaagctctggtcttgaagaacatgtgagaaatgagatataactcctagaagatataggagacatttttagtcttccaaattttccctgggaggctgatctaaattgagtcacaaaattgttcccaccaggaatgcaatcacttgagctgttttctaatctgagcccctctacccagatgatcttctgaactcatactgttcagactttcatccttctgagtagaaaacagccatagtcatggcaggatgagggctaggacaattacccaaggaattcttggcctctgccatgggactctgcagactcagatcatataatcagagatgttagcactggaggggacatcacaattagctttctccacctcttagtttatcagtgaggaaaactgtccagagcgcggaagagactaaaataacacagccaatgtaggtaatgtgctggataagaatttggaattcacgattttgaattcagtgtttatttcaccatcacgctggcttacacgttggtatcaggcttcttctattattgaagtgagccattaagtgaattccatcttgatttgtgtctgatacagagtaataaactattttattaaatatccaaataattatacattcctccttcttacatgcaagcctaagtttgcttgtactatttcatgtggtagcaaatcaggacgcttcttgtgtctctgaaaatactctgagtaatggagtacagtcagctttcttgtaccaagaatatagggactatgtttctcccagtcattctggggataatttttgtgaaggattgcacttcataggttaagctaggtatcagttaccagtgttttttccaaataaaaaaaaaatcaggtgatatctgtaaatggttccattgtaaatattaaagaacatgatgcttaaaacagattagggaaaactatagaaggggtggggtttcggagtgctaattttgtccttgaatggtaacagctccatgtggtggtgaggtttatgttggtttgctgtttgcagatgatcttattattagaatttttcataccgaaaataaactgcattttagtttgtaaacatgcccttccagagtaatgctaccagttctttgtgaaatagctactgttgttcaaaggatgactatgtcctcttcggttgaggaaagatgacaacaaactcagtaatgacatgtaaaataggtattacaaaccaggtatggtggcatgagcctgtaatcccagctacttgagaggctaaagcaggaggatctgttgatctatggatttgaggctgtagtgtgttgtgatggcacctatgaatagcccttgcactccagcccaagcaacaaagcaagactgtctctgaatttttgttttgttttgttttttgtttttttttttttgagacagagtcttgctctgtcacccaggctgaagtgcagtggcgcgatctccactcactgcaagctccgcctcctgggttcacgccattctcctgcctcagcctcccgagtagctaggactacaggcgcccgcctccacgcccagctaaattttttgtatttttagtagagacgaggtttcactgtgttagccaggacggtcttgatctcctgaccttgtgatcctcctgcctcggcctcccaaagtgctgggattacaggcgtgagccaccgcgcccggcccctgtctctgaattttttaaaaaggcattccactcaaattaatacacattttaattgtgttttgttgtaaattacaactgaataaaaattcagcaaataagtctgttgtggtagggaaaagtctattgtgatctggaaaatataatggagaaatccagtggaagagattttatttcacattactcaaaataaaaaaatcttatacaagtctttacacttgtaacttgaaaaattctgtgctaaaatttagcttggttgctaaaatatttctctttttttctcagaagcttctttttagcatcctatagacacaagttactttttaaaatatttgcatacttgctttgcaatgtattgtttatcagtagttctatattctttgagatagtctatccagtctttctgtatttatcgtatgtctgtatagatatatattagcagataaatgagttctgaaaggggagaaatgtgattatgctaatcatgatataaagaattgactttataagcagtgttcacaggtcatacctttcccgttactgtcttacagtgaacaagaaatgatgctttgtctggtatgcatggtaaataatgccccttgctctctgcttcatgatcacatgtgatacttctaacatagatagcacatgtaaatccagtggccttgactgcaactcaagagagcattttggccaagtacaaacccactagtcatgaaaaaaaaaaaaaaaccaaatcaaagtaaattgatggtattgacatttgtctatgaaaaacaacataatatagaacaattctggggtaaaatattgatctaaaataattttaaggattaaatattgccattgtaagcatactatgagcaattatgtttgtaatgcagatatatttataattttaaatccaagatttaccttaattgtacattttcctaatttaaaaaagttattttgaaaaaaaaatcctcgaatctagagaaaggttggcaaatacatatggaactttgtaaaaaacatccagggcagcactttcactgattgcagtagcttaggagtgaaaaacaacacaactgctccaatgtatggcaatgggcaaatatcccgatttattcacagggtggcatgttaggcagtgcttagaataaatgagttggttatacaagtatcaatagggataaatgtgaaaaacacagtgttaagtttttaaaaagttgtaaaaagcacagtaggatgttatttatataaaatttaaaaacctcaaaaaccattcttctttgatatatattctaaagatgaacatatatgtaatagaagtacaaaacatacataaaataatatacactatgcagtcatttgtgtacttacttttcaaaaatatttcagtagatatagcaaacagttaacatgtaatatttggataggaggttggcaattttctttttagcacctgcctgtctgctatcattcaaactcacatttaaaatgtggctatgtgagatgagagaactataatattccaggtttgtgattagtttggaaactttttaaaagtttgaatgtggtctgagagatagtttgttataatttctgttcttttacatttgctgaggagagctttacttccaactatgtggtcaattttggaataggtgtggtgtggtgctgaaaaaaatgtatattctgttgatttggggtggagagttctgtagatgtctattaggtctgcttggtgcagagctgagttcaattcctgggtatccttgttgactttctgtctcgttgatctgtctaatgttgacagtggggtgttaaagtctcccattattaatgtgtgggagtctaagtctctttgtaggtcactcaggacttgctttatgaatctgggtgctcctgtattgggtgcataaatatttaggatagttagctcctcttgttgaattgatccctttaccattatgtaatggccttctttgtctcttttgatctttgttggtttaaagtctgttttatcagagactaggattgcaacccctgcctttttttgttttccattggcttggtagatcttcctccatccttttattttgagcctatgtgtgtctctgcacgtgagatgggtttcctgaatacagcacactgatgggtcttgactctttatccaatttgccagtctgtgtcttttaattggagcatttagtccatttatatttaaagttaatattgttatgtgtgaatttgatcctgtcattatgatgttagctggtgattttgctcattagttgatgcagtttcttcctagtctcgatggtctttacattttggcatgattttgcagtggctggtactggttgttcctttccaggtttagcgcttccttcaggagctcttttagggcaggcctggtggtgacaaaatctctcagcatttgcttgtctataaagtattttatttctccttcacttatgaagcttagtttggctggatatctctcagaccacagtgcaatcaaactagaactcaggattaagaatctcactcaaagccgctcaactacatggaaactgaacaacctgctcctgaatgactactgggtacataacgaaatgaagacagaaataaagatgttctttgaaaccaacgagaacaaagacaccacataccagaatctctgggatgcattcaaagcagtgtgtagagggaaatttatagcactaaatgcctacaagagaaagcaggaaagatccaaaattgacaccctaacatcacaattaaaagaactagaaaagcaagagcaaacacattcaaaagctagcagaaggcaagaaataactaaaatcagagcagaactgaaggaaatagagacacaaaaaacccttcaaaaaatcaatgaatccaggagctggttttttgaaaggatcaacaaaattgatagaccgctagcaagactaataaagaaaaaaagagagaagaatcaaatagacacaataaaaaatgataaaggggatatcaccaccaatcccacagaaatacaaactaccatcagagaatactacaaacacttctacgcaaataaactagaaaatctagaagaaatggatacattcctcgacacatacactctcccaagactaaaccaggaagaagttgaatctctgaatagaccaataacaggctctgaaattgtggcaataatcaatagtttaccaaccaaaaagagtccaggaccagatggattcacagccgaattctaccagaggtacaaggaggaactggtaccattccttctgaaactattccaatcaatagaaaaagagggaatcctccctaactcattttatgaggccagcatcattctgataccaaagccgggcagagacacaaccaaaaaagagaattttagaccaatatccttgatgaacattgatgcaaaaatcctcaataaaatactggcaaaccgaatccagcagcacatcaaaaagcttatccaccatgatcaagtgggcttcatccctgggatgcaaggctggttcaatatacgcaaatcaataaatgtaatccagcatataaacagagccaaagacaaaaaccacatgattatctcaatagatgcagaaaaagcctttgacaaaattcaacaacccttcatgctaaaaactctcaataaattaggtattgatgggacgtatttcaaaataataagagctatctatgacaaacccacagccaatatcatactgaatgggcaaaaactggaagcattccctttgaaaactggcacaagacagggatgccctctctcaccgctcctattcaacatagtgttggaagttctggccagggcaatcaggcaggagaaggaaataaagggtattcaattaggaaaagaggaagtcaaattgtccctgtttgcagacgacatgattgtttatctagaaaaccccatcgtctcagcccaaaatctccttaagctgataagcaacttcagcaaagtctcaggatacaaaatcaatgtacaaaaatcacaagcattcttatacaccaacaacagacaaacagagagccaaatcatgagtgaactcccattcacaattgcttcaaagagaataaaatacctaggaatccaacttacaagggatgtgaaggacctcttcaaggagaactacaaaccactgctcaaggaaataaaagaggacacaaacaaatggaagaacattccatgctcatgggtaggaagaatcaatatcgtgaaaatggccatactgcccaaggtaatttacagattcaatgccatccccatcaagctaccaatgactttcttcatagaattggaaaaaactactttaaagttcatatggaaccaaaaaagagcccgcatcgccaagtcaatcgtaagccaaaagaacaaagctggaggcatcacgctacctgacttcaaactatactacaaggctacagtaaccaaaacagcatggtactggtaccaaaacagagatatagatcaatggaacagaacagagccctcagaaataacgccgcatatctacaactatctgatctttgacaaacctgagaaaaacaagcaatggggaaaggattccctatttaataaatggtgctgggaaaactggctagccatatgtagaaagctgaaactggatcccttccttacaccttatacaaaaatcaattcaagatggattaaagatttaaacgttagacctaaaaccataaaaaccctagaagaaaacctaggtattaccattcaggacataggcgtgggcaaggacttcatgtccaaaacaccaaaagcaatggcaacaaaagccaaaattgacaaatgggatctaattaaactaaagagcttctgcaaagcaaaagaaactaccatcagagtgaacaggcaacctacaacatgggagaaaattttcgcaacctactcatctgacaaagggctaatatccagaatctacaatgaactcaaacaaatttacaagaaaaaaacaaacaaccccatcaaaaagtgggcgaaggacatgaacagacactactcaaaagaagacatttatgcagccaaaaaacacatgaagaaatgctcatcatcactggccatcagagaaatgcaaatcaaaaccactatgagatatcatctcacaccagttagaatggcaatcattaaaaagtcaggaaacaacaggtgctggagaggatgtggagaaataggaacacttttacactgttggtgggactgtaaactagttcaaccattgtggaagtcagtgtggcgattcctcagggatctagaactagaaataccatttgacccagccatcccattactgggtatatacccaaaggactataaatcatgctgctataaagacacatgcacacgtatgtttattgcggcactattcacaataggaaagacttggaaccaacccaaatgtccaacaatgatagactggattaagaaaatgtggcacatatacaccatggaatactatacagccataaaaaatgatgagttcatgtcctttgtagagacatggatgaaattggaaaccatcattctcagtaaactatcgcaagaacaaaaaaccaaacaccgcatattctcactcataggtgggaattgaacaatgagatcacatggacacaggaaggggaatatcacactctggggactgtggtggggtcgggggaggggggagggatagcattgggagatatacctaatgctagatgacacgttagtgggtgcagcgcaccagcatggcacatgtatacatatgtaactaacctgcacaatgtgcacatgtaccctaaaacttagagtataaaaaaaaaaaaaaaaaaagtttgaatgttttcttgcattcagagccttggttgacatagttaattaaaaataaaacattgtatataaagcacagaatgagcagctacacaaagctgctcaatcaatgacagctctatatgggttagggtttcttgtggggatgacattgatgtagaaagcatggtcatctattgagaatgatggggctggaggtattggatacttgaggtttagaaaatacattgtagaaaatggacaaaaacccctcaaattaagggatgaggcagaataatgcttggcaataccaggggtaggctgcagtctttcttggaaatatatattttaaatggaaccaattatcatagcatcatttcctctcagggttaccctctgatccctattttactaaatcgttataaaacaaaatgaggaattatgtgtccttcccttttgaagccaatgtaacaagatgggtaagaattagacctcctgagttcaaaatccctggattcagatctattcctgtatattcaggagaagtggtaataaattcgatggacaatttggtttagtagtcgattgaggaccctgatgaggtatatttgggaaaacataacttccgctctctctcattgactcacgggcctttgaggagtccaggagtcattggaatctggcctgaggttgaggctgctggcaaaactccttccccaaagtccattcctattgctgactgagaagggactagcattggaagtggctgattttaaataccgctagtgctggtgtgctcctccctcccattcccagctctgctttgtgtagttgccttgagaagctaagttcattctgaaaataatgccattgcacaaaacacttttgaaagttctagtttgaaattacatcaggtcacttggtctgtgtggcctcagtttcttcatctgccatgtgaaaataataatgcctactctgtagcaaagaaagtctctatagtaaacaaaaaaaaagcctactctgatactgaaagttgttatgaaaaataaaaaagggaaatgctttagaaactgttaagtgctatgtagatgttactaattaacaaaccatttcagaaactatactttttattttatggccactattcactgtttaacttaaaatacctcatatgtaaacttgtctcccactgttgctataacaaatcccaagtcttatttcaaagtaccaagatattgaaaatagtgctaagagtttcacatatggtatgaccctctatataaactcattttaagtctcctctaaagatgaaaagtcttgtgttgaaattctcagggtattttatgagaaataaatgaaatttaatttctctgtttttccccttttgtaggaagtcaccaaagcagtacagcctctcttactgggaagaatcatagcttcctatgacccggataacaaggaggaacgctctatcgcgatttatctaggcataggcttatgccttctctttattgtgaggacactgctcctacacccagccatttttggccttcatcacattggaatgcagatgagaatagctatgtttagtttgatttataagaaggtaatacttccttgcacaggccccatggcacatatattctgtatcgtacatgttttaatgtcataaattaggtagtgagctggtacaagtaagggataaatgctgaaattaatttaatatgcctattaaataaatggcaggaataattaatgctcttaattatccttgataatttaattgacttaaactgataattattgagtatcttctgtaaactgcctctgttgtagttttttttttctcctaatcatgttatcatttttttggaatccatggtttcctgttaagatgactcacacagcctacataaaagtaattgacaaaatatcatcttatagtaaaatgccacatatctttatgttcagcaagaagagtataatatatgattgttaatgataacccaaacaacaaaagatttcaccttaactggttgtcataagtagtagtatccaccgccttattttgagttggatttttatcatcctatgagccctacaaatttaaagtttttggaacagcacgtgcattgaacccataagaacctactctgcttttctgcatgtattgtccagacaagagaccaaattgccgaggcatcatttaggtgaattctaattaacatttagctaccttacaaccacaattcaaggttgtttcaaaggcatgtgcttgcatcatcctgattcactaccatgtgttactaacttggatctgcaaagtcattataaaaagctgttttgatggacttatttggatattgctttacccttcttctctcttttcttttatcaatgtaaaaacattatatgttaaatacttggcttttaagagcatagatctgaaatctgcctctagcaaataacccataacacttctaagatatacctgcaaggtcaattgtgttgtaaaaccttgataaccatactttattgttcaaaaaagccttttatgaaggcagaagttaaaaaaaaaaaacaaaaaaaacagagtccacagttatcacctcagctacaatctcatcagttcacaagtaccagcaaaacatgtgataagtcaacaaatgttttatttcaatctgaacattttacgtaagtgaagacattgttagatatcatttggaatgtggaatctacacagttggcatatcagagaaggttgaattcagtttaataaatgtttatagaaagtgcttgttatcataatgataatagctcaggatgtgcatgacaagcttttaagcgattgggtacactatctcatttgatcttctgcacaactattaatggtaggtactattatccctatcttatggataagtaaactaagatttaaaaagtacagaacatggtgtgaacactgcttcaaaatttctaaaataggtaaatcacgatctctaaactggagggttgtccaaccactagggacaatagagtactgatatttagtggtcagactgtaatgcgggaagagacaggcatgggctaaacgggtgtagagatcaaataaggggcaggttagtttgtaaacatgtccatatgtaacatttagcacaaatacaggatataggtgctttcagacccagctgcattgataaaaagttaggtggtattgtatctgtcttcctttctcaatgttgcatatctgtgttcttgcccagtttgcttcatctctctagccacacttattggcctacaatggcatcatcaccaaagaaggcaatcccatcttccgtgtggctttggtttgctccctaaagtaaaccttgtgtttacttttcccaggtctcatgctttcccatatctgacctgttttgtcctcatggccaggatatgtgggacctttcctacaatgttccaaagtttgtaatagagctcttctctgctttgttccaaattctgcaacattttactttaaataatgaatttaaatacaaacaaacttgagctttgcctatacttttcaagaatgcagagataactaaattaataaaaatattcattgagtccttactgtgcacacagctctatgttaagccttgtgcagaactcaaagtcactcgagattaagcctgttactaagttatgtgcaatttagctcagtggatttcccccacttcatattgctctgataatgttttggaattaactgccttgattccttcttttctctgcttgtctatacactatttattattctacaccatctcaaattctaactcctcaagaaaatccttccagatgatttttctaaccaggagttttaacttccttttaactaccctattactttctacttccttaactcatctatcatattatatttagttatttatatactaggtcgccttgaagaagggattgtgttttcataaatcttaataatccctgaggcatcaagtacagtgatttgcatttactaaatgctcaacaaatatgtgagggattcacttgaaactaatattagataattcccagtcaaagtgatctaatagcaaatcaattcttcagttttataggcaaagtatgactctggttttccataatcataattaatttgtcaactttataattttaattaagtaaatttaattggtagataaataagtagataaaaaataatttacctgcttaactacgtttcatatagcattgcatttttctttgtaaaatttaagaattttgtattaataaacttttttacaaaagtattaattattcagttattcatcatatacttttattgacttaaaagtaattttattcaaaagagttagtataggactacatgaaaaattcaaggccaaggcttaatttcaaatttcactgcctttggctctatcttttaaaacaaaacaaaaaactcccgcacaatatcaatgggtatttaagtataatatcattctcattgtgaggagaaaaaataattatttctgcctagatgctgggaaataaaacaactagaagcatgccagtataatattgactgttgaaagaaacatttatgaacctgagaagatagtaagctagatgaatagaatataattttcattacctttacttaataatgaatgcataataactgaattagtcatattataattttacttataatatatttgtattttgtttgttgaaattatctaactttccatttttcttttagactttaaagctgtcaagccgtgttctagataaaataagtattggacaacttgttagtctcctttccaacaacctgaacaaatttgatgaagtatgtacctattgatttaatcttttaggcactattgttataaattatacaactggaaaggcggagttttcctgggtcagataatagtaattagtggttaagtcttgctcagctctagcttccctattctggaaactaagaaaggtcaattgtatagcagagcaccattctggggtctggtagaaccacccaactcaaaggcaccttagcctgttgttaataagatttttcaaaacttaattcttatcagaccttgcttctttttaaaactttaaatctgttatgtactttggccagatatgatacctgagcaattcttgttctgggttgtcttatgtgaaaaataaattcaaggtccttgggacagataatgtgttttatttatctttgcatatccattacttaaaacagcattggacccacagctggtacaaaattaattactgttgaattgagcaaatatttattctaaatgtctctgtcaaatgacagagtgtggttgtgtggattaagtccctggagagagttctttgttctctcatgttctatgctgtggttcttgctttatgcaaaaagaagtaagttacttaaaacctggacatgatacttaagatgtccaatcttgattccactgaataaaaatatgcttaaaaatgcactgacttgaaatttgttttttgggaaaaccgattctatgtgtagaatgtttaagcacattgctatgtgctccatgtaatgattacctagattttagtgtgctcagaaccacgaagtgtttgatcatataagctccttttacttgctttctttcatatatgattgttagtttctaggggtggaagatacaatgacacctgtttttgctgtgcttttattttccagggacttgcattggcacatttcgtgtggatcgctcctttgcaagtggcactcctcatggggctaatctgggagttgttacaggcgtctgccttctgtggacttggtttcctgatagtccttgccctttttcaggctgggctagggagaatgatgatgaagtacaggtagcaacctattttcataacttgaaagttttaaaaattatgttttcaaaaagcccactttagtaaaaccaggactgctctatgcatagaacagtgatcttcagtgtcattaaattttttttttttttttttttttgagacagagtctagatctgtcacccaggctggagtgcagtggcacgatcttggctcactgcactgcaacttctgcctcccaggctcaagcaattctcctgcctcagcctccggagtagctgggattagaggcgcatgccaccacacccagctaatttttgtattttagtagagacagggtttcaccaggttgcccaggctggtctcgaatgcctgacctcaggtgatccgcccacctcggcctcccaaagtactgatattacaggcatgagctaccgcgcccggcctaaaaaatactttttaagatggtgtaaatattactttctgtatcaatggtacattttttacttgtcagtctctagaatttctttataaatatgttgattcagttcatttttgtagattataaaacaggtaaaaaaggataaaacatttatgtgaattaaagggaatacctaatttttgtgtagagtttattagcttttactactctggtttatggatcatcacaccagagccttagttactttgtgttacagaataactaatatgagtgaatgaatgacttacacaagtcactgcttaggataaagggcttgagtttgtcagctagagtatgacagaaagtatctaagttttggagtcaaatagcactttgtttgaatcccagattgcatgcttactagttatgtgaccttagtcaagccacttcacctcactgagtctttgcttttttcatctctaaaatagagatacccaccgctcataggctgtcataagggatagagatagcatatggaatgagtctgtacagcgtctggcacataggaggcatttaccaaacagtagttattatttttgttaccatctatttgataataaaataatgcccatctgttgaataaaagaaatatgacttaaaaccttgagcagttcttaatagataatttgacttgtttttactattagattgattgattgattgattgattgatttacagagatcagagagctgggaagatcagtgaaagacttgtgattacctcagaaatgattgaaaatatccaatctgttaaggcatactgctgggaagaagcaatggaaaaaatgattgaaaacttaagacagtaagttgttccaataatttcaatattgttagtaattctgtccttaattttttaaaaatatgtttatcatggtagacttccacctcatatttgatgtttgtgacaatcaaatgattgcatttaagttctgtcaatattcatgcattagttgcacaaattcactttcatgggctgtagttttatgtagttggtccagggtgttattttatgctgcaagtatattatactgatacgttattaaagaatttcctacatatgttcactgctgctcaatacatttatttcgttaaaacaattatcaagatactgaaggctgattggtaactcacatggaactgggagagtatacaattctgaaccaaatagatgattctctattattatatcttaatttatgtgttatggtatattaaacatgaaaaaaattgtatttggttagaatatgtttgctcttccttaactcgggaatgacatagggtaatattcacagattgggttcctataaatcctccacttgaagtgaagtcagttcaagtaatgaaagctacctcctgagatagaatcagtacttggcacctatctctagtgttctttcacctcatataacctttcactgattagtaaagattatatccaacaaagaaagtacagcacagactgagatatgattactgagataaatttgggcaaaatataaactacagcatttctgtagcaatgagaccatttttcttcagttgagctccatgttctacaaacttcaatcaaaaaaggttctaggagactcagtgaaagttgatacactgttcaaggaacaaataatttcagcacatgggaatttcacagggaaaaatatactaaaaagagaggtaccattttggatggtgtcaatatgggttatgaggaattcaggctgctgagtccagtgtacaatggaaactgagctgcaggtgtgtgattgtaacaacaaaagaaatgctgaaatattaagtcctttgccatgtaaatagaaaaagagtatttatttcccaaacattattgctcacctgtttttgttatgcctttcaagataaatccaggaaaggaattgcattttctttccagaaaacaagttcttgggggaattgttcaattggtagatgttgtttttctcattaacaagtgagtgctccatcacacttgctgagtgctccatcacacttgctctctgcattactcctctgcctgcaaacacatatatagcaagggtgatgacaaggatatcagagggtctggttttctcaaactcatgataaactcatggctgggtcattcttggtgctgattttactttgttttttgttgttattgttccctcttcctcaaaagatgaaatctatccctcttacttggaatttctctttgatatatagcgaatgtttggttgtaacctgtataatctggcatgaaattgtcactcgaaaaggctagaagtgttgacataaatatgggacagcaagagttgctcctactcaagagagcaaatataatgttctggaagagattggcagaattcacatcaaaggagtgattacttcagcctgggccactgttgtactggtcaaaaggctgtgcaaagctctctgaaaatccactcttttattgctctttagtaataaagtcactttcaattttaaaaataacaaactgatatatttttatgactcataaaatgttagcaattatattatggagaatctactttctgggtgattcttacaaatgttcttggatctatttttttttcttatagtacctattcttcccatttttctcagctctagttaatatatttcaacaacagttcaacaaatttaacatttttataaaaagtgtttcctatcattttataaataccagcctagtccatgttattccttttcttgttgaggagaaaggacacacattgtaaattcaaatatagacctctactgtgctatttaatcttggtaacaactccacaaaggagatgacatgttttccttctatagaggtagattctgtaaagttagagggaagagtgacttgcttaagatggcataagctgtaactggcagaaccaggattcaaagccaggtgggatgccaaaatcataatctgtcttcagtgtcaagttactgaaattggtaaacattagacctaaatagacggaattgcaatccgggttgggcacattaaactccattttcttcatcaatgtgctcagattacattttacttttcaggctaaaaatggaaaaaaagagtccctcttagttctgcacttgagaatgagaatagcttttctgaattatacaaggaagaagaactaatgcccaaatgccaggtacccacatgcactatgccatggcacagctgttgccccctttcaccagagccctctctctgtatcctggttgacctttccttgggcaagagctgggtggggaggatcacaagtgactccaatttggatggcttcgggaagactgggaccgagctgaaggcagtgttgtcctctgcactccctgttttctgtctgctggagcactgaagcctcacatatgtattaaaaaaataatttccatttgcatttcagactagaagattgaacgtatagtgtaatgtgattgcaaataattatattgaaatgagacagagaggatgtagtatctactgtcataatttttcaaaacccacctgcaacttgaattaaaagaaccacttgggtttttttttttgtttcaaacgcaaatcctggaaacctactgagactcattcagtcagtatctctaagaggcaagcttgagactgtatatttaaaaagcatctcaggtgatttttacacatgctaaggcttaagaaccacttctctgtagcttatatgttattttcaatgttcctcaaagccaagttagaatttccaaagtgttaagaatccattagacaatcacagaattgtctttttcctttataaatcttgcaatgttgttctcatttccatacttaattacttaaaacaccaaccaaccaacaagcaaaaaatgattagtctaactaatattacaagttaataatgaagtaaaggtttaaaaataatgtcataataatgttaataacaaattattaattataatttaaaaataatatttataatttaaaaataatatttacaagtactacaagcaaaacactggtactttcattgttatcttttcatataaggtaactgaggcccagagagattaaataacatgcccaaggtcacacaggtcatatgatgtggagccaggttaaaaatataggcagaaagactctagagaccatgctcagatcttccattccaagatccctgatatttgaaaaataaaataacatcctgaattttattgttattgttttttatagaacagaactgaaactgactcggaaggcagcctatgtgagatacttcaatagctcagccttcttcttctcagggttctttgtggtgtttttatctgtgcttccctatgcactaatcaaaggaatcatcctccggaaaatattcaccaccatctcattctgcattgttctgcgcatggcggtcactcggcaatttccctgggctgtacaaacatggtatgactctcttggagcaataaacaaaatacaggtaatgtaccataatgctgcattatatactatgatttaaataatcagtcaatagatcagttctaatgaactttgcaaaaatgtgcgaaaagatagaaaaagaaatttccttcactaggaagttataaaagttgccagctaatactaggaatgttcaccttaaacttttcctagcatttctctggacagtatgatggatgagagtggcattttatgccaaattaccttaaaatcccaataatactgatgtagctagcagctttgagaaattctaaagttttcaagtgataagactcaatttatacaaagctaattggataaacttgtatatgattaagaagcaaataaatacttattatgcttttttgctgtttatttaaatatttaacccagaaaataagtcactgtgacagaaataaaaatgagagagaagggtgagccactcttaggtagttctggcattatttaatctaggccagaggttgcaaatggtgtcccatagaactaattttggctcctagacctgtcttatttaacctttcatttaaaaaatttgtattggttgccagcaattaaaaattgggagatgtctcacacacacacacacataaacacacacactcatgtgtgcagcctcttttgaagaattggaataactagtcaactgcgtcctccttttccacaagctgtgacagctccctgctcacagagcacctgccctctcctgttcatcatgctctcttctcagtcccattccttcattatatcacctatttggtcctgagactaagtgagtttgagatctgtgatttagacaaagtggtgaatctagctctgaatcatagtaagtagctctgggaatcatcttgtcttctgttagcccattgagagagaaatagagagagagagagagagaaagaaagaagaagaaacagatctggggagagtcactgaatgggagcatagagacagagaaacagatctagaaaaccaaactgggagaaaatgagagaaaccaaaagagaggtagagaggagcagagaagaaaatgaagaagcaaggcaaggaccaggctttttcattatttcttatggccaagacttcagtatgcgtggacttaattcttccttatgctcctaccttccctagggaaactgatttggagtctctaatagagcccttcttttagaatcacagtttgatgccttaaaactagttatataccttcacatgcttccttaacccacagaagtgatgctaatgaggcccttaataaggagcgtgctattaagatgaagacattcattttttttctccgtccaatgttggattaaggcacattagtgggtaattcagggttgctttgtaaattcatcactaaggttagcatgtaatagtacaaggaagaatcagttgtatgttaaatctaatgtataaaaagttttataaaatatcatatgtttagagagtatatttcaaatatgatgaatcctagtgcttggcaaattaactttagaacactaataaaattattttattaagaaataattactatttcattattaaaattcatatataagatgtagcacaatgagagtataaagtagatgtaataatgcattaatgctattctgattctataatatgtttttgctctcttttataaataggatttcttacaaaagcaagaatataagacattggaatataacttaacgactacagaagtagtgatggagaatgtaacagccttctgggaggaggtcagaatttttaaaaaattgtttgctctaaacacctaactgttttcttctttgtgaatatggatttcatcctaatggcgaataaaattagaatgatgatataactggtagaactggaaggaggatcactcacttattttctagattaagaagtagaggaatggccaggtgctcatggttgtaatcccagcactttgggagaccaaggcgggtggatcacctgaggtcaggagttcaagaccagcctggccaacatggtaaaacccggtctctactaaaaatacaaaaaattaactgggcatggtggcagatgctgtagtcccagctgctcgggaggctgaggcaggagaatcacttgaacctgggaggcggaggttgcagtgagctaagatcacgccactgcactccagcctgggcaacaaggcgagactctgtctgaaaaagaaaaaaaaataaaaataaaaataaaaagaagtggaggaatattaaatgcaatataaaagctttttttatttttaagtcatacaatttgtttcacataacagatcaggaaataatacagagatcataagttttggagctgggtttgaatcctggctctgccatttactttctgtgtaatctaagtcaagttactgaactttgtgggccctctggctctccatgtgtaaaatggagaatattaatatttaccttgcaagtttgttgtgaagactgaaggagagaatttaggtaaaacattcatcagagtaccatgcacacagttgttcctcaataaacattagcttctctgattgcaagttccagtctaaagtgctttatatataccagccaataaaaggatgcgagagagatataccagtgtattgttttctaccattttaaacctattttcatccactgttacaaattctatcatactgctccacataaaaaatattatcaatgatttttagtctctgaagtgcaatatttgattattgagcacacctgttgaagttttagtttcttctcacttacatgggttgtgtaaaggtaggaggtataaaaccagtgtcctaggtctaaatctttcttaatgtcatactttggattcattgatataagtaacttgagcaccagcgcttcattttacttcattttttaaagatatagtaagagtaattcccatctgcctagcaaaattgttttgtagaaaagtttgtggatcagatttattttactttgattttaggaatttcaagtgtcttcgtcggcatgaaggaaaaatatgcagtttgacattttctactactttcaggtcattattttcctactctggtgcaaaaaccctcaattcctgtctcactccatctaatcaaataggtagcatgcttgagcccttactatgtgccaggcactaggataagcactttatatgttttgtcccaattaattctcacagcatttctatgacctaaataaaattaatattttcatttcaccaataataaaatggaggcttcaaaaagtttagggacttggctcagctcacacaactggcaaggactgaaaatggattttagtcccaaatgtcataggctagagccctttcactaaactgttgtcttccatctggtggcatcctcttcctccagtctttgtcacctaaactctgggcaccccttgatggcatttacttatgatggtgatgcttgttaaacttcctgtttgcgacttcaacgtccatataaatgagtcttccaatactgtacttagaacttatattttgtagtgacttctttaaaagctttctctcttagtcatatcctgagttttgttagcacctggacttaccttactttggaaatgttgcactctgaaatctctttctcagcttggaatttcctaatcttccaactgtttgagtcttttaattctacatttactgcctttccatttcatcaggatttctagtctctttaattcttccttttgaactcctcctgatttaacctctgcttattcgaagaacaataattttattctctcagctgcactctcaattcccttttccttttggtgatttttctttttcctacagaacacttactttatcagttttggagaaggaagtgctatctgggtaacagtagtgctatctgttgactctagtcaactgtaagttttatacatttattgtttaaaccttatatgggtctataatccttcttgggaaatcctttcatttgtctttaatttcctttaccatttccctaaaggctattccagatttttatcacattcacaaaattcccgtcttttctcaggatctgttcacccccagtagatagccttgtctcccacaatacatggagaaaatagaggccaccgtcatatttgaatgtttccaacttctctcttcacctttggaattatctttttcttcttttgtgtctaagagaaagatgtatacttcttcttacccttgtctgaactactctattttgcttcatcttctcagaacaggggaccagcaattattcttcctccagaagcttcaacatcttttgtcaactgactccttctcatgtttaaatattttcaagttaaacaatttctttcctgactttcgctcacgcaacctcatgcccaaaaccttatcactcttcttccctttgctgtcaaggctgttctcacttcttcactttttgtggacttctccccactacaacatagattctgctatcaccaatctattaaaactgttatactcttgtggaatttatcatttaatttagcttcagtgaaccgttctttccagattattttggcctcagaccatgacttctaagtctgccgtgcttgccacttaagtgatgatgggccagtgggtccccacctaggcctctgtgttagtctgttttcatgttgctgataaagacatacccaagaatgggcaatttacagaagaaaggggtttgagggactcacagttccatgtgactggggaggcctcacaatcatggtggatgatgaaaggcatgtctcacatggaggcagataagagcatagaacttgtgcagggaaacttccctttattaaaccaccaggtcttgtgagacttcttcactatcacgagaataggatgggcaagaccctcccccatgattcaattatctcccactgggtccctcccacaacacatgggaattatgggagctataattcaagatgagatttgggtgaggacatagccaaaccatatcagcctccttctggctttttatgttctccgtgggtgacctctctcaggctcaagtgataaccaatgtgctgatgactctcaaatgcgcatctctggcttcagtttcttccttgaacttcatacatatgtttccaaatttcctgcgtgtacctcaaggttcttgttcatcacttcccaagcttcataaacgcactcattttagtgtattctctgtctcctttgatagcatccctgagaggcaagtccctggtgagttatatacaactcctcccttgctccaaacctgagagtaagtaacattcctattaacatattaggaagctgaggcttagacagtttaagtaactcaagcatggttacacaactagctagggcagagctaaaatgtcaggctaggcttctgtgactccaaagccctttctcacttagcatatcatcacttatttttttttttaatcacatatatgatttttttttctttaagagatagaatcttgctctatcacgtgggctggagtgcagtggcacaatcatagctcactgtaaccttgaacttgggctcaagtgatcctcctgccttagcctactgagtagctagggctacagacacacaccaccatgcctagctaattttattttattttattttattttttgagacagagtctcactctgtcacccaggctggagtgcagtggtgcgatcttggctcactggaacctctgctgcccgggttcaagcgattctcctgcctcagcctcctgagtagctgggattacaggtgcctgccactgtgcccagctaatttttgtatttttagtagagacggggtttcaccatcttggccaggcttgtcttgaactcctgacctcgtgatccactcgcctcggcctcccaaagtgctgggattacaggtgtgagccaccacgcctggccacctacctaatttttaatttttttgtagagacagggtctcactacgttgcccaggctggtcttgaactcctgttctcaaacaatcctcctgcctcggacaccccaagtgcagggattacaggcatgagtcattgcagctgacctgtatatatgatttttagtatatgtaaatatacatatttattaaatgtaaatataaatataaatgtgtggagtgatatccattgaaatgttaaacatagttctcagtggtacaactacaggtgatttctcttttcttatttctggttttctgtgttttccaaatttcttgaaatgtgtcttctgtaatcagaaataaaagttattagtaacaacagtcttccactggtacaagtgcttattggataaaagtcccacttctaagcatgatactcacaacttttaggttaatagcctttgtcaccttgccatatacatctgatccagccactcacaccattcctgagatatattttgttcctttgtgcctaaatcattgtgcatgcagatccatcttcctggaacacctataaccatttcttagtcctgtgaaatcctacttacatccttcatagcctagcatgtatgtcatttatttggtcaagggtgagttggttgttctcttgaatgtactgccatatgacgtggtgtgatttcaattgtagcaccaagctcattgcaatattaattcgtttgtcattctcccatgtaggatgtttgaagtagtttctaacacagagattatactcaataaatatttattagataaataaatgaataagggaataacaaatgcctttgtctcattttaaaatactttcattgttagctacccatataataaaaaactaaaagcagtagttttcaagcatgattgtttatgtatgccttaaaagaattttgaaaacctatgtacccctgacacacttttaagttaacttataaatttttcaacatagttttaagtggtggcaaatgatgtagtttcttgtgtattttaaactgcttaagtatgctatacatggatttcttcaaaaccctgaagctgcagtttcagtgcattcaatttatggaaaagaaattaatttataaaattggttcttattgtcaagtcaatcagctaaatataacttgctttctgtcaggaaaagtctgactttaaaatacagataagtaataactattattaattaattaaattattaaaattaaaataattaaataatttgttaattaaaatgccttattcccctacttatttctgcaatttgactctaagaatagataggacatgtagattgccttaggtttgaaatctgggtgaaataagatactgcctccttcagtatttctgcctttgcttttatgggagcctctttcaagaaaaagtcattctctcatggtccctttgtttgagtcccagaggttttcctactccagaaagtgcaacgtagtgagactagtactatactcccttgcatggtaagtgagaaggctgtctgtataaaatgagggaaggactcatgagagggaagtaggtcaggagaaatgataggttctcaggcaggttaattttaggaaagagtgaatagagtcccttaaaacaaggtgcatctgcttcctcctgatcaatctttaggactgtttactttgatttgaagaccactatgctaaagcttcccacgggggcaatagtgaggcaaggaatttttaaaagggaattacttcttcgtagctacttttgtgaaatgaattcatttgaattatctggcaatctcttcatatttatattcaacaataattacttaaagaaatgctttgagcttctcagaggagggtgctaccagtgtgatggagtagaattcagatttgggtagtgactttaaagctgtgtgactttagtcatttaactgctgagtcacagtctacagctttgaaagaggaggattataaaatctatctcatgttaatgctgaagattaaataatagtgtttatgtaccccgcttataggagaagagggtgtgtgtgtgtgtgtgtgtgtgtgtgtgtgtatgtgtatgtatacatgtatgtattcagtctttactgaaattaaaaaatctttaacttgataatgggcaaatatcttagttttagatcatgtcctctagaaaccgtatgctatataattatgtactataaagtaataatgtatacagtgtaatggatcatgggccatgtgcttttcaaactaattgtacataaaacaagcatctattgaaaatatctgacaaactcatcttttatttttgatgtgtgtgtgtgtgtgtgtgtgtttttttaacagggatttggggaattatttgagaaagcaaaacaaaacaataacaatagaaaaacttctaatggtgatgacagcctcttcttcagtaatttctcacttcttggtactcctgtcctgaaagatattaatttcaagatagaaagaggacagttgttggcggttgctggatccactggagcaggcaaggtagttcttttgttcttcactattaagaacttaatttggtgtccatgtctctttttttttctagtttgtagtgctggaaggtatttttggagaaattcttacatgagcattaggagaatgtatgggtgtagtgtcttgtataatagaaattgttccactgataatttactctagttttttatttcctcatattattttcagtggctttttcttccacatctttatattttgcaccacattcaacactgtatcttgcacatggcgagcattcaataactttattgaataaacaaatcatccattttatccattcttaaccagaacagacattttttcagagctggtccaggaaaatcatgacttacattttgccttagtaaccacataaacaaaaggtctccatttttgttaacattacaattttcagaatagatttagatttgcttatgatatattataaggaaaaattatttagtgggatagttttttgaggaaatacataggaatgttaatttattcagtggtcatcctcttctccatatcccaccctaagaacaacttaacctggcatatttggagatacatctgaaaaaatagtagattagaaagaaaaaacagcaaaaggaccaaaactttattgtcaggagaagactttgtagtgatcttcaagaatataacccattgtgtagataatggtaaaaacttgctctcttttaactattgaggaaataaatttaaagacatgaaagaatcaaattagagatgagaaagagctttctagtattagaatgggctaaagggcaataggtatttgcttcagaagtctataaaatggttccttgttcccatttgattgtcattttagctgtggtactttgtagaaatgtgagaaaaagtttagtggtctcttgaagcttttcaaaatactttctagaattataccgaataatctaagacaaacagaaaaagaaagagaggaaggaagaaagaaggaaatgaggaagaaaggaagtaggaggaaggaaggaaggaaagaaggaaggaagtaagagggaagcagtgctgctgctgtaggtaaaaatgttaatgaaaatagaaattaagaaagactcctgaaaggcaattatttatcaatatctaagatgaggagaaccatattttgaagaattgaatatgagacttgggaaacaaaatgccacaaaaaatttccactcaataaatttggtgtcaggctgggtgcagtggctcacacttgtaatcctagcacttttggaggcagaggcaggtgaattgcttgagtccaggagtttgagaccagcgtgggcaacatggcaaaccccacctctacaaaaaacacaaacaaaagaaaatagctgggtgtggtggtgtgtgcctgtagtcccagctacttgggaggctgaggtgggaggatcacctgagcctgagaagtggaggctgcagtgagccatgattgcaccactgtaccctagcctaggtgataggctcaaaaaaaaaaaaaattggtgtttgcaatgctaataatacaatttggttgtttctctctccagttgttttcctacatacgaaacagcttttaaaacaaaatagctggaattgtgcattttttcttacaaaaacattttctttcttaaaatgttattatttttcttttatatcttgtatattattactagcagtgttcactattaaaaaattatactataggaggggctgatactaaataagttagcaatggtctaaacaaggatgtttatttatgaaaaggtagtaattgtgtttcatagaatttttaaaattaattctgcgtatgtcttcaagatcaattctatgatagatgtgcaaaaatagctttggaattacaaattccaagacttactggcaattaaatttcaggcagttttattaaaattgatgagcagataattactggctgacagtgcagttatagcttatgaaaagcagctatgaaggcagagttagaggaaggcagtggtcccttgggaatatttaaacacttctgagaaacggagtttactaactcaatctaggaggctgccttttagtagtattaggaatggaacactttatagttttttttggacaaaagatctagctaaaatataagattgaataattgaaaatattaacattttaagttaaatcttacccactcaatacaatttggtaatttgtatcagaagcttaaaagataacctaatagttcttctacttctataacttacccaaatatgtttgcagagatcttatgtaaagctcttcattataacactgctttcaggagccaaaaattgggtgggggagccccataaatgttgaataataggggtttgattagataaattttggtgtagttctataatggcgtgttattcagccaataaaaggtttgttaaagaatgactgtgacggatgtatatgatatactcttaagtgaataaagagttacaaaatgttatgtacaagttacaaaatgtatgtacattatgatccatttttcataaaatcatatgtatgtatatatgtgtgtctggaaggataaatttatcaagttgttatctctgaaattttgggtatattttatatttctagattttctgttactttgttactttactgataaagtaataacgttgttgacttttgtcactctcccctattaataatcatctaggctgcaaaaggatcatgtcttctttatttttatattccaaggactgtcaacaagtgcctagcacttgacaggtatattatagaaatttaactgaatatctttaggaaatagatttttgtttgtagttgttctagtctacattaaatgtcttgcgcttatgaaacttccttgaattattttagtgaagcaatattagtatagaattttgcatcactggatgcccttgactgaaagctggcttatggcatctcaccagtgtgtggggagtttcagtccttctgttgtctgcatcacagctgaagcagtgctgttgctgacaattcctgacaccaccttgtctctattattgatcattgcctcactatggtactgagttttagcttattcttgtaataactgggactcatatgtatagaataagctattagctcacgtttttgcttgctttttatacagaatacatgtctgcaaatagttttatcaatattttggaattttgggagatatgaagttaaaaacatcattgaatatatatatatacacacacacatatatatatgacactatacatgatttattttatttaatttttaaaattttattctttttagagattaggtcttactctgtcacccaggctgaacttcagtggtgtgatcatagctcactgtaaccttgaactcctgggctcaattgacctttccgcttcagcctcccaaagtgctgggtttataggcatgagccactgtgtctggtccaatatgcatatatatatttttaacctggattatcagagctatattgtgtttaggtttataaagctgtactatgtgaaaatatcacttctaggtttaattttgtacaaaggaattttatatagaaatgaggtaattcagattttttcccatgtaataagaattgtaaaatttactgaaacaaacatcaaaaagatatctgttacatgaccttcctttcttttgaatatatttcaggtgatattatttattaaaatttaaaaatgaaaattaaaatatataaaaagttgaaaattattcctttctttactgtctctcatctgtccattttccattctcctgcattccctcatccaaccaaggtagccaatccaggtaactttttttagtatcttcccagagatgtttctctctatatatataatcaatatacattttttattattccccacctctctttttatgtaacaatatgcagagttttgcttcttgcttttcccactatcttggacaactttccatattcaaagcacagaggacttgcacatatgttcagactgctgaatatttctgtctctcccctgccattcatatgttgaaatcctaattcccaaggtgatggtattgcagggtggggcctttgggaggtgattagtccatgagggtgaagtctttagtaaatgagattagtgtctttataaaagaaaccttagagagaccctcacaccttagagagaccctcacccctttctgccatgtgagaacacagcaggaagacagctggctatccaggattcaggagtctcttagcagacccaaatctgctggcaccttgatcttggacttcccagcctccagaactgtgagaaataaattcctgttgtttataagccacacagttcatggtattttgttatagcagcctgaacaaggacacacacacacacacacacacatgcacacacatttaaatagatgcatagtattctatcatatggatggatattctatgatataatgaatcactattgattgacatttgggttgtttccaatattttgttaacacaaagaacaacactacaaataactttatatacatatcatttagcacatctgcaattgtatcagtaggcttcctataagtggtcaagcatttgtgtacttgtgattttggtagatgttgtcaaatgtccttccctgaaatttgtaccaattcgtactcatgccatacactctaaatagagtgctgatttccccacagcattactaacagatgatattatctaatttaaaaagtttctcatcttatagggaaaatagtatgtcaatgtattcttaacttgcatttcttttattataagtagtgtaaaatatcatttcaacttatacacaggaggaatttctctctatataaagtgatcctagaatcataatgaaaaatatcaccaactcattaggaaaatgtacaaaggattgaatagatatctcatcaaaaataaaaatataagtggcctttaaacattgaaaggtaacatttgaacaaagacttgcaggaggtgagggattagggaatgcagactctgggaagagtcttccaagtagcaggtgaagcaagtgcaaagctttcagatgggactgactatacctgtctggtttgaagaacagtaaggaggtcactgaggctggcatagagtaagacagggagggtagaatactgtcagagaagtaatcggcggtggaggtagggggtaaaccataaagtgctcgtaaagactaaggcttatttctctgggtgagattagaggccactggagagttttaaacagaagtaacagggccactttggctaatgtttttaggctattctgtagggagacaagggaggaagcaaggagatgagttaggagtctattgtgccagttcaggcaagtgatgatggtggcttgatccaggtagtagtggaagtagtatagtaggaagtgatcagattcaggacatgctttgaaggaagatccaataggattaatggataagttgaacaatggcatatgagaaaagtcacagaggagtcaaagatgattccaagctttctggactgagtaactggaaggataaatgtgccgtttactagaaagataatgggagaaacaggttttggatggagcttggtttgggaatattaagtttgaaatgcctatttgacatccaaatagagatgttagttggatgtacaagtctagtttcaaggaagagggggctggtagtgtgaagatggggctggataagattctaaaggaaagagggttgataagaagagaaaggggtgtaggggttagcctaagggcattctaagtattagaggttaaggaggtgggtgaagaaaacccaataaaataaaagtctgagaagacaaagctagtgaatgaatgtggtatcccggaacccaactgatgtcaagcagaagggtgttatcaactaggtcaaatgctcattcatcaagtaagatgaaactgttataattaaccggtgtcttctgaaatacggagataactcgtgacttaatgaaagcaatagtagagaaggtcaaacttgaccagaatgaaattagaaagaataagaggaaagaaaagaccaaatacagacaaccattgatgccttattcttttgatatactcctggagtccacttgctaatacaattgacccttaaacaatacaggcttgaactgcatgggtccacttatttgtgaattttttttcagttaatacattggaaaatttttggggttttttgacaatttgaaaaaactcacaaactgtctagcctagaaataccgagaaaattaagaaaaagtaagatatgccatgaatgcataaaatatatgtagacactagcctattttatcatttgctactataaaatatacacaatctattataaaaagttaaaatttatcaaaacttaacacacactaacacctaccctacctggcaccattcacagtaaagagaaatgtaaataaacataaaaatgtagtattaaaccataatggcataaaactaattgtagtacatatggtactactgtaataatttggaagccacttcctgttgctattacggtaagctcaagcattgtggatagccatttaaaacaccacgtgatgctaatcatctccgtgtgagcagttctctctccagtaaattgcatattgcagtaaaaagtgatctctagtggttctcgcatatttttcatcatgtttagtgcaatgccataaaccttgaataacatcaagcaatccatacaaagtgccactagtgatgcacggaaaagttgtaacagtacaagaaaaaagttgagttgcttggtatttaccatatattgaggtctgcagctacagttgcctgcaatttcgagataaatgaacccagtataaagactgttgtaacaaaagaaaagaaaatgtgaaaccatcagtgcagctatgccagcaggtgtgaagtcttgcactttttgcaaaatacaaaatatgaaatatgtgttaattgactgtttatgttatctgtaaggtttccactcaacaataggctattagtagttaagtttttgtggagtcaaaaattatacgtggatttttgactatacagtgggttggcacccctaaccttcatgttgataaagggtcaatggtatattatttaatttttttgtatttatattcataaataagattaaatctatatttccaagtaatctctataagattttgttattaatattactattatttttgagacagagtcttactgtcaccaggctggagcacagtggtgcgatctcggctcactgcaacctctgcctcccgggctcaagcaattctcctgcctcaccctcccaagtagctgggactacaggcacgcacaaccacactcagctaatttttgtatttttagtagagacggggtttcaccatgttggccaggatggtattgatctcttgacctcatgatctgcctgcctcggcctcccaaagtgttgggattacaggcatgagccactgtgcacagccattaatattattgttacccaataaaaaaaatttggaaacttgtcttcttttcccctgattctgtttaaatagcactggagttacctgttttgaattttttttccaagcggtcccttatgagttttctctatgttttatttgtttcatttcttttttttttttttttttttttttgagacggagtctcgctctgtcgcccaggctggagtgcagtggcgggatctcggctcactgcaagctccgcctcccgggttcacgccattctcctgcctcagcctcccaagtagctgggactacaggcgcccgccactacgcccggctaattttttgtatttttagtagagacggggtttcaccgttttagccgggatggtctcgatctcctgacctcgtgatccgcccgcctcggcctcccaaagtgctgggattacaggcgtgagccaccgcgcccggcctgtttcatttcttatatcgtatttttgcaactcctttattgatacttttcttcctgattaggtttctactaaaaccaaacaagctttccatgaattagcttttagatttacttattagtttaactgttctgttgtattgtaactcattaatttataattttatctttattaattattctatttttcttcgcttttttgttgtttttctagtttttgagttagatgtttgacgcttttttaaaaagctgtgcattttcctctgggtaatactttagctgtatattatgtattctgatatatagtgtttccattacattgttttctagaaaatctgtagctttgatttatatttgtttcctctttgacctaagatatcctaagggaaaatttaacattttccagaaagaaaacaaattttctttgttttccaagaatgttgttcaaattatttctactgcttggaatttttatcatttttgtgtatccagtaaatagtcaatatttgtacttgctctctgaccacataaaagaatatattcgtgtagtttctattaatagattagagttcaattcagatattaaatgtacatcattattcatgatatttaggtcttctacatcttcacttatcttttttctacttgctttgccattaacagataaagttgaattaaaggcttctactacatacatttctccctgttattccttataggttctgtaatttttgcttcaagaatattgctttttaaatttaatatatagatacttataattacactctagcattataaagagccttttctttttcattgaatgtatttgggcctgcatatgtctaacatgaaaattatagtcctttttttgtttctttgtttgtatttacagttttaagttccattttcaacctttatgcactctttgctttaggtgtgtctcttttagttagcataaagttaggtttgtctttaatttcacctgaagtcttttcctcttaatagatgggttaagccaactgaaaaataaaactgacttatatacttttatttcaagtatgtcctccacaaatattttttgaatagattagcttatatactttggaatttgttaaaaaaagatttttataaaaaataattgtggtgaaatgtacataacataaaatttatcattttgaccatttttaagggcatagctctgtggcataaagtatactcacatagttgtgcaactatcacctccttttgatttttttttactaattttgtaaatttgtttcatctgagctgtcttattatgttttgttttatgtttttctttcctttattatgaagtcactgtattgtctgtaggctatatgtatctgtgagtgtgtgtgtatatgtgtgtattatggtttttaaaaaagtctatatttgttttccagtggctatacttaatactaataactttatgttaaatttttcattctatgtgactctagttcactaatatgagctctgataaaatcagtgctttttcgaggttaggagatcaagaccatcctggctaacacagtgaaactccgtctctactaaaaatacaaaaaattagccagacgtgatggcgggtgcccgtagtcccagctactcgggaggctgaggcaggagaatggcgtgaacccaggaggcagaacttgcagtgagccgagatcgcgccactgcactctagcctgggtgacagagtgagactctgtctctaaataaataaataaataaataaataaataaataaaatcagtgctttttcttcctctgctacctcctttccttctactcagttttagtcagtagtattatcttttttcagatttatctttgtattgttaaatctgcttatgcttctattactttatttattagctttaaatgataccttttgactttcagcttttcttaataaagcaatcagcaaatttcctttacactccacacttataccccatttcctttgtttgtttatttggtttttacttctaacttttcttattgtcaggacatataacatatttaaactttgtttttcaactcgaattctgccattagttttaatttttgttcacagttatataaatctttgttcactgatagtccttttgtactatcatctcttaaatgactttatactccaagaaaggctcatgggaacaatattacctgaatatgtctctattacttaatctgtacctaataatatgaaggtaatctactttgtaggatttctgtgaagattaaataaattaatatagttaaagcacatagaacagcactcgacacagagtgagcacttggcaactgttagctgttactaacctttcccattcttcctccaaacctattccaactatctgaatcatgtgccccttctctgtgaacctctatcataatacttgtcacactgtattgtaattgtctcttttactttcccttgtatcttttgtgcatagcagagtacctgaaacaggaagtattttaaatattttgaatcaaatgagttaatagaatctttacaaataagaatatacacttctgcttaggatgataattggaggcaagtgaatcctgagcgtgatttgataatgacctaataatgatgggttttatttccagacttcacttctaatggtgattatgggagaactggagccttcagagggtaaaattaagcacagtggaagaatttcattctgttctcagttttcctggattatgcctggcaccattaaagaaaatatcatctttggtgtttcctatgatgaatatagatacagaagcgtcatcaaagcatgccaactagaagaggtaagaaactatgtgaaaactttttgattatgcatatgaacccttcacactacccaaattatatatttggctccatattcaatcggttagtctacatatatttatgtttcctctatgggtaagctactgtgaatggatcaattaataaaacacatgacctatgctttaagaagcttgcaaacacatgaaataaatgcaatttattttttaaataatgggttcatttgatcacaataaatgcattttatgaaatggtgagaattttgttcactcattagtgagacaaacgtcctcaatggttatttatatggcatgcatataagtgatatgtggtatctttttaaaagataccacaaaatatgcatctttaaaaatatactccaaaaattattaagattattttaataattttaataatactatagcctaatggaatgagcattgatctgccagcagagaattagaggggtaaaattgtgaagatattgtatccctggctttgaacaaataccatataacttctagtgactgcaattctttgatgcagaggcaaaatgaagatgatgtcattactcatttcacaacaatattggagaatgagctaattatctgaaaattacatgaagtattccaagagaaaccagtatatggatcttgtgctgttcactatgtaaattgtgtgatggtgggttcagtagttattgctgtaaatgttagggcagggaatatgttactatgaagtttattgacagtatactccaaatagtgtttgtgattcaaaagcaatatctttgatagttggcatttgcaattcctttatataatcttttatgaaaaaaattgcagagaaagtaaaatgtagcttaaaatacagtatccaaaaaaatggaaaagggcaaaccgtggattagatagaaatggcaattcttataaaaagggttgcatgcttacatgaatggctttccatgtatatactcagtcattcaacagttttttttttagagccccattcttattttttatacactttgagagcataatgaaaagaaaagctacctgcaaaagttttggacttacctcaaagaggatatacttcattcctcaaaaggccttcttccaggaatagtatttcataacctggaggttggaaaaatctggatttgttacaaaaaaatctgagtgtttctagcggacacagatatttgtctaggaggggactaggttgtagcagtggtagtgccttacaagataaatcatgggctttatttacttacgagtggaaaagttgcggaaggtgccttacagactttttttttgcgttaagtatgtgttttcccataggaattaatttataaatggtggtttgatttcctcaagtcaacctttaaaagtatatttagccaaaatatagcttaaatatattactagtaataaatttagtactgtgggtctctcattctcaaaatgagcatttactaatttctgaacactgtgctaggtcctgggaataccaaattgaataagacatagtctatttttctgaagggtttatagcagagtcccctgtgttaataatgaaggagtgtgtggtatgtgaatcatatatcaatagggttgttaaaaataatgaaaaaaggagaagaggaagaacatcttttttttttctgattgcacgggcagccttaaaattatttttgaagtgtacaattcagtgtttttttagcatattcacagggttgtattatcatcaccatatttttggcctcttgaaaagaaatcctgtgcctattagcatccaattaccgttcctttgtagctaagtctcccccattccagctttaaacaatcacccatctactttctgtctctataaatttgtctcttttggacatttcacataaatgaaataatataatagggttttttgtgcctaaataagcttctaaagaagaataaggtaaggaatcatcattcagcaaatatttattaagacttgctttattttatacagtgtactaggagctggagatgaaaatatgtgtagaacatgaatcatatacttcgggaatttgtggactagtgggaaagattgacatatcaataacaaatcgaattagtgatgtaatagaggcatttttacaggagtaaaatgaggtagcatggactctatctgggtctgaataatgtgaggagtaacctccttacacaaagaggcacaaggctaatgtcctctgatggaatgattcaccatgcaattctaagggtgacaagaatgaaagttagggccttgaagaaatattttgattaagagctgccaataaagtagagtaaagattagattgatgtgaagaagtgggagattaatgagtaaatggtcactggcttgttgagaagattaaatgagatgtacatgtaatgtacctaacacaacgtcttgtacaaagtagccattcagtagagactagcttgtattatctccctttgaggtaaagaaaactgttagaaatagtatttctactactgatagtatttcttctacttatgcctccctttgaggtgaagaatactgttagaaaacatgacataggagaaatacccctgagagacagttcttattagtgactactgtgcagaaaagatggaggttggtgtaattaaggagaaggaaagccatgaagccaaagtattatgaaaaagcatcaatatgaattttcatgttgacaaagtggtataaaagataattataaagatggtcacttataaatacggtagttctgtgtgacacaatttacagaagttggtatatcgtgtggaagaaaacagcataagatcctgaaggtttgaactgtgggcacattggctccatgctcaggaaatggcaatggggttgggaagtgattccactttatgtccctttcagacacataaaaattacttgtgtgagtatcttatgccagacactattcactgtgtagtgagcatggtgggtatgaaatgacaactttattgtctttcctgtcaaagaacttgtaggctggttgggggaaagagaccatttcaatatgaagtgctgagctagaggtacccttagggcactacagaagcctagctgatggcttttagcctggctagacagttcaggatctctaaaagcaggtgccttgaaggctgagtcaaatacaaaaatgtattttggacagaggaaattgtatgaacagaaacacagaacatgaaactacttggttggtgcagggtatcatcagcatagaaccagacagaaccagagtgtaaataagccagaaggccatgtcatggaggccttgtataccagtctcaggaatttggttgtggagagctttcatcaggggaatgatgtaatcagcttggaaatgtagatatatcactgactgtgatagtgaggagcagaattaaggtggacgtgattagaagctttgtgaatagcagaaagaacatagattttgaaagctggcagacgtaggttactgaagaaagttacttaaccttgctatgtctttagttttatcctctgcaatatggggataatactgcctattttgtagagtcttgtggattcttctggcatatataatagaaaataaaacagctattattattattgttgatggtactatttgctatatctgactacaaggagaaagactaataggaaaccatttcaggaatccagatatggtcatgatggacaggaagagacaagagttacatagaggaattctgggaagataagaaatgtcatttttatgtactgtttgcatccatcagacaaggcatcaggaaaaatgatccttcaggaaagagtgattttttttcttcaagaaattagaagaggggagaaattggtttaagattaaggactccatgcataagagaaactgggagggaagacaggtagaaatgctatggggttaggaaggaagaatgcagaggtggattacttagaattgagacatctgatcaagacagagggatcacagcttttgctaacaaagtactagtggaggatgccactaggtgaggtttaataaataattgttgacaataagttccatttaaaaaataaacaatttatgcttcttctttgcctaagtgtcaaataaaacattcagatttttatttcaaagtatccctgagtccctgttcccttttttgtcctgctgacttttggaactgatttaggcttccttagtcatctcataatagaaaaaatcagccaggtatttcctacatttcttgtattttaaaaaaatgtaatggatgtaatgaattttaagcaaatgtaatgaatacaataagtaacttagtatatgctgttttcttctctatgctgaatgtttcatacatgttattttctatacaactacatggtcaattccttgaaaatatcaactccaaaatctttattttggtatactccacgtagcacattgagagagttttaaactcttgttggatgactgtttcaaaagtgttttgaagtaggcatgtcagttgcaaaaagtttgctcagcaaatgttgttctgtctcacagtctcagacattgagcagatgattacatgacagcacgtgattgctgggagtaacagacaaaagtaactgaaagtgctcggttatcttgacagtcaaaatcaaaagtgtcccctattttcagtgacctaagagtttctttttgtgtttttggtattgttgttaaataagtgttctcacctttgaaaaggtcaataagaattcaatacagtataatgtctgtgtgccaaatgaaggtgccccttatttttaagtgtggaggagttttgatcataagaacttgaaatacctacagaatccttgatggttaagcagctggtgccagcacaagaatccctcaatatgttctctatgaagccccgatcaccaaatgcaaacattcatgattcagtatattttcatcttgactgccaaagttgatctgtttcttaatatattacatctagacttggaactggagatgagaacagaatattatcttcctcatttttgtgtttttgttcaactctaatgtctgcaaagcacttgcgtatgtaatgatgctcagtgtcataggagcaggcaggtaagtgtaaatttgtctggataggagaaagcatgcacaacatatttcacatagttttctgatttcagtttgtttttgcaaattattcactcagtgagatagcttaaagacgttatcacagggaaaggcatggagatagttctgtgttgatagaaaacttgtaatgtacagccatgagtgagaagtcaggttcagattcttcaccttcagtcctcctctttcataaacagctccatgtcctattttacatatcctactttaaaacgagattatagaagaatgaatttctaggcaaagtgacacttattttaaaatactattacgtatccctgtgcccattaacttatcctaccatttttcttcccctgtgtccaaaccacctttagaatctcctaaatatttgtagctattgtaaacagcactggagactttgctagtttaaaaggagaaatcaacgcaattaagccctagttaatttacttatcccttatgagattataattgtattttgttattaaaagggggacagagtacactgttctcttgcctttttaatttccagactaccacttctcctgcacttgacaataccgcagtctaccacgtagtcccatggctgacaggaggagaattctaggcaggccagtgtttgagtagtgagtaattggactgtctttacccagcaactcactgttttgtaaatgtacctgagtttggagaagtaattggcttttataaggggtgcggggtggagggttggggtggggagagtgagaaggaggtcagagctttaggatatataattggtctccacaaagttgttgtgatacttttggaaccacgtaatggtcttcattaactaagtgtctgtcatgacagccattacatatgcattataataaaaatttatttacagtgtaagttgaagaaggtaaaatctggatgtagtttctaaactctgcttggcagttttcatatttaagccactagaagaaaaaaattgggagggaagctgagaagaatttactgaaagaaaaaaatacttgggagggaaattggcaagaagtatgaaaaagcttgggagggaagtaagcaaataaatgagttaatgactgttctggaaaataaactctatcatgcagatatcacatgactgattaaatttgaatttgacctcctgctttccaggtctggtaaaaactaacctgtaagaacttgaaacttagcctttgaatggtcaatccaccactgtaggagaatttatgaatgttcagttgagagaactgaaaataaagaagtaccataggaattaacatttgcattcagtagccaagatataatggacatctgaaacaggtatttgaggccaggcgtggtgtctcatgcctgtaataatagcactttgggaggccgaggtgggtggatcacaggaggccaggagttcaagaccagcctactaaaacacacacacacacacacacacacacacacacacacactagccaggcgtggtggtgcacgtttgtagtccaagctacttgggaggctgaggcatgagaatagcttgaacccagaaggcggaggttgctgtgagctgagattgcgccactgcactctagcctgggtgacagagtgagactctgtctcaaaaataaaataaaacatatatttgaaacacattgaattatgtcccttaaacaagaataaacatcactaaatgactgtaccttgaactacctgtaattttctcctgataggtaattaagcttcaaagtactgacacttatttactgtaatatgaagcaataacttaaaaaaaaaaaaaaactattgaaccagaaccaaacaggaatgccatagcattttgtaaactaaactgctatttcatttcatttgagccctggaacttgaaaataaatgctagctaacatctgtgaacagaacatacccatcagtactgtgctaagcacctttcatgaactggtcattaaatcctcactttccatttatttagtgacaacttcacccagagtttgcagtcaaagtgaaaatgtgctgaattccaaaagtgtgagctaggttttagaagttaatcacaattctggaacaaattactagcttaacaaatgagagttcttatgtctctaaaaccaaaatagccctaagtctgtccctcccagtaagatttgggccagtcaatggaacagtaatatacaaatataattacagctgtctaggagcaaactatcctatgaatagataataaaattaagacacttaagccatgttttcatattaaaacacaaagtaaaaaatcattgttttccaaagataaaagccatactgtatcatgacatatatatgcccgatgtttcgaccctcttgaagaattgagattctcgactctacactcttagcgttttctatattgaacagatgtttaatttaaggaggtcaagagaaatcttacacttattttttaatggtaccttagacatagaaggaacctcagaaatctctggctgaatatttccatctgcagatgatcatgtcattaggcttctgactctatagccatagaaaaatattcatgaagacctttcaggaagggaatgttggtatttctaaaaattgagtacaagtattctctagacaaaacagctcttgaaatggcagattgtattcccattattatatttcagaatcaagacattaatacctactttttatttaccaggtttagttatccttgaattagattttataaattaaagaaatagatttcaataaatatttgttgagttcctagtatggaaacatcgtgtttggcaccagggatgttgcctgcaagtataacaggagttcgtatttgtaatgagtttatgatttacagatatttggggggcaaagatatcattcggtaaatacttatgagtgcaaactttgaactagggactgggccaaactctaggaacatatttgatgacagagacacaatccctgtcctcaaggagctttcattctagtagagaagatgaaaaccagtacagtttggtaagttagatgatattggttaatgtagggttcttatgtaagtctagagaagtagcatttaatctgttcttagaaggtcaggaaagatttccctggaggaagtgacatttaagctgagagaggatggataaacaggagtcatctgagtgaacaacagggagaacattccagaaagagaacaaaatgtacgaggcctgatgccaagagagaacattcattgcattggggaactatagtcacttctgtgtggctgggatgtagaatgaaatgagcctggacccaagagagcactttgccctttggggaagctgtaggtattacagtaaggttggagtctggaaagaaaggggtatattgtgagatctgaattgggagaggacagttatatccagacctttatatgctccagtaagaagactgaactttacactgggggccatgggactcactgaatggcattaaatttgagagtggtcatatgaccagatttgcattttacaaagattgtcattgactgcaacatgaagtatggagtattggaggagcggtaaggctggtggcagggagataatttaggaggctttaggtgagggatgataatgacttgccaggtaggaaggagtaaatttcttctcagtggataattagaagattgaatggatggacttggtcactatttggtatagaaggggaaaaaagatgtcaaagatgatgccaatttttaaaaataatttaacatttatttttaaatattttttcagccttattaaggtataatggacaacaattgtaggtatatgtcatttacaacatgatgttttgatttatgtatacattgtgaaatgactgccatagtcaagctcattaacatatccatcactcacataattaacattttgtgtgtatgcagtgagaacatcaggctctactctcttagcaattttcaagtatagattacatttgttaccaactatagtggccacactatacaatagagctccaggacttattcatcctgcctaactaaaactttgtactctttgaccaacatcttcccattcgtctctcctccccatgccaagtttccatcttggtcagttgggtggatagtagtactatctgccgaggcaggttggtagggtgaaaacaatgtgttcccttttggaaatgctgaggtgaccagggaacttccaagggaatctgtctggatctagagcttagaagagatgtttgggctggaaacagacatcaggtattcttcagtatatgggttgtaaatgaagtcacaggagtgggtgatatcaccaatggtgagtgtagtataagaagactggactgaggacagatttccaaggaatttcaatacttaagaggtacgcagagaaaagaggggctgtgaaggacaccaaggaggagactaagagccaggagggaaaactttcaagagagtattgcattatggaagggaagaagagagaacattttaaatgatacgcaatgctcaataatggtatccgctttggagaggccaagtaagattcctaagtacccattggatcaaggtccttaatcttacaaaaacttatgcaaatcaataataaagagatgataacccgataatcaaaaatagacaaggcatataagaagaaaatgaattaaaaatattcaaagcattcaacatatacaaatgcgctcaatctgatatataatgaaagaaaagtaaattaaaacaacaatgggcatgactaaataacagtatgagggagcctgaggagaaggagcatttgaaatttcagtacagaagagaaaaggggtgacttatagaaaaaggagacagaaaccatagaacatgtttggaggataagactcaaacaggtagtggggacccttttctagagtaggatgaaaacaggtaatgtgtgtggatgcaaatatgaggtaggatgtaatgggaagttgagcgaattcatatttagtcattcattcaaaaatacttaattgagttactgctgtgtggcaagcatcattctacaaacagagggcacagtgataagcaagccagtttgtactctcgtgtaacttacattctactttgagaagacagattataaataggttaaaaagtcaataatatgatgtttcagcatcaacaataaaaaattagggtgatatatagagtgccagggaaagtgctttcatggacctcttcattctctcctctcctggtgtcataagctactccttcatccatgctgccatttctcttggtttacggttccagtatagtactcatcacattattactatagagccatccaccttatgaaggtgaaggtgtccatctccttacttaaaaaaaaaaaaaacaaacaaaaaaacaaaaaacccgaaaaacaaaaaaagaggcagaaagacagaaggtcctccactaactttcacgtgccatgtaaccagcgaaatccaattattttacagcattctagctatagaagagtttgggaagcgtagtgcttagtgttctagcctttgtagcacaggaaagggcctggaaggaaaggaattgtgtcttccgcagttgcttttctttatggggaagtgctatagcccaaacaatattttaggaattttcatctattgtcaatatgcaaactggaaggggataatgaaaatgttgtggttagaagtttatgaaatattgttattcacattttaaagtaaaaagagggaatgtttaagagacttgtttaagatcacatgtctcataattggtgggaccagcaatacaatccaaatctaactacttatctttttgctatgccctattagtgttcatattagaaaagaaattctatctcagacactaatgatttgttctttggacaccaatgactttaagttaaaacttcatactagttaatttaattatggtgtagcagtattattaaactatcaagactataaattttctatttgtaaaggagattatgataccaaagattagtgaactaatgatattgagaattctatgacataattttgaaaaatatttgcaggatatttatttttgtgtaaatgatgctttcaagctaccataatcctaagtaagtgtatatttgggaaaaccacctattctaacacacttgaaatttaaataagtcaggaaatttttttccagatcttctcccaaattatcttcatctttttcctctccccttgggaaagaatctcttcatgcctcataatatcaaatttaaactatggaagtccaggtggtggacagtcagcaaaggggaagatgagaagcttgtgttataaagccagctcttgtcagaataaggatctggtaggaacttcagaagtgatgggtaggtaagtatgaaggccaggtcctaagatctaaattacaaagcagaagacttacttaccagggagctggaaaacatgttaggaaatccagagcaggaacagatttcaagatagcacaataatatagcagtgaagtactgagaaaagagtttttttcacgggttggatttattctagcattttaggcagcatttgggcatttctaagtggtcagacttagaggagatagttaaggaattagcagctgctaaatgccaattcttagaccagttgaatcaaaatcatctaaaaagctttcagaaaccagactttttaagggccatttgagagactctcaaatctggaatccagaaatctatagctagatgagtttaaggtagagccagaataagaaaaataaaatagtttgtttgtttcaggtatcttttccaatattatttccgaacctaccccaaacaccttaaatcactgcattctatagccattcttttaaaaatgcttgagttattagttttcaaaaacaaatacaaatctgcacacatacagaaataaacattaaagagacataaagatattaaacagagttacatatacttacaacttcatacatatatattatatataaaactgaatattaagtgtttgatattagtgacaaaatctgtaacatccattatattagtgctttttgtactttttgttgggtgtagtaaaaattgcattcgaatttgagttttctgctatatatttggtcagttcctatcagtgaaggaaaaacctttttttattattttattgtttttttattttttgagacggagtcctgctctgttgtccaggctggagtgcagtggcatgatcttggctcactccaacctctgcctcccgggttcaagcgattctcctgcctcagcctcctgagtagctgggactacaggcacctgccaccaggtccagctaatttttgtatttttagtagaaatggggttttgccatgttggccaagttggtctggaactcctgacctcaggtgatctgcctggcttggcctcccaaagtgctggaattacaggtgtaagtcaccacgcctggcccctttttattttttaagctgattgaagattcttagttctcatgctttctagtggtgattaatctttagccaatatttctatatacagttattagtaatcatgtttgacttaggtcaacaaacaatctttcctaaaaaaacagaaccccaattttaatttctgaattatttagtatctattttctgctgtggaagttgaattatgttgatagatatcatacagggccatgtaacactctcagatacacgttcacatgtatagtagctgtatacaaaaatgttacttcattctctctctctttataatactcttggctctcttacgttctctcacacactctactcttcccttcctctgttctttctacttgttccctctgctcctaccacacttattccccccttgtccattttccttgtgcataaagcacaagtgcttagtaattatcaaatattaataacaatgacactaaccacccaatgatttagtgttaatgacatgctttattgaatggcattacctctaaagttcatgtttcctttacccaaccaagcttcttaccctcctcccttaccacaagcatctatattgtcaaggttgttataaagagtaataagccagccattaaaaaagggtttatggtattttcctatctacaaagtcacaggaagctcaaatgtactcagtaaatattgcaaaattacacaggaccattaaatgtaacactccaccctttctctctctctctctctctcttgctctctctctctctttctgtcaatatagcaacaccctatatcattgccctttgtatgtgcaaatcagagttaataagctttatattagcaattactccttaacaacttctggtttgtttggtccagttgaataatgtaagcacttaaaaaaatgaaattataaacatttatgtgaaaagtgcatatatcacattggatatgttgttatgcactccttaataataaagtaagttaatctttattgcacacttattataatattactttgaccctctctagtactctttatctaagtattctcaagtgctttacaatctcaaacagacccaatgtgttgtatacacagaatcctttgaagctgacatttgcctttctgaccagcttgttgtaaaggaaatcagccaaaaaacaagtatctagatgagtagctcaaacattagtacacatagtaatcacaggtcaaaatgcagatagattaccctgtccaaattctcctgagtaagagtaggtgaaacatttttaaataagctccccaggtgattctgaaattggtccaaggaccacatattaagaactaatgatccaaacaatttgactttttattgtagattaaaccatgctgagaaaattattaaaaattgaaatggcagtggaggatggtttgaaagaaaggtttttcagggccctttcaacaataaaattaattgaacacaatattaaaactctatatttgatttaagactaaggttttcattgtttttaaatctcagtaatttttatgtaacaggtcaattcatacccagcatcttaattccaatgaatgatttcccacaacaatttttgtggataactccaagggaactcgaaggaagttgtagtatgaacaaagagaagtagaatttgtccctgtgtgtaaggcttctctgataagcagcacaggctctcatactgctttttaaaaaaattatgatagcatcaagtggaattaattttttttagattatactttcatggaagggaagatctactgtgaaggctggaaaaccaacacccttaagataaatatattaccagatttgagcgctcttagtaatcagcaaagataaatgtttaacagtgcatacaaaatgaagtgttttatgttaaatcaaatagagaaagccaaacactaataatgtggttacaaatgaacaataaattaggtaatcagaacaggtacagacattaatagcaggatattggtattattaatgtattttgttttaaaataatgaacttaattacaattctcctcatcctaccccactattttattttattccagattcagcagcttcatattatgtctctgaaacacttattattaaagttatccaaatgtacacatttctctttatataaatgtttcagtccagaaaaggaggccaaatacattagctcagaacatcaaatcttctcagatgtgggaatcttttattttcacacttttaaaggtaatctgtatttctagcgtctattatagacagaaaactttcatatgacaacattcctattttcttaactgccttgataggggcgaagacaaattctaagtaggactttttaccccattcttcttaccatcattctttcacaaaacccccagctttagacaatcgctattatgaatttgacatgtactattccaatccattcccataaatttacacccatatatacatatagttatctatgaacaatatttagtagcttttttgtgtgtggctttaaaatttacataaattgtataatttgtgcacattcttctttaatttgccttcttggctacggttatctttttgagatctagctatgctgctggtatgtagaattctatttcattcttttttcattgttgttttgtacccataacgtgtcacattttatttataccttctgttcctgatggacatttagattcttccaggattttactcaatactgcaatgaaaatctttgaatttttctcttttgcacatattcaagagacttttctgacatatatatctataggtgaattgtgtagtcatatgatacatacacacattttaaatttcactagatactgccaatttgccctttgaaatagccatacaatttatagtaccaccagccacttatgaaagttcccatttcctcaaatctttgaaagttcttattataaacagacatattaattcttgccattctgatttgtaaatcagaatctctattgttctacctctagttctaatttggaattccccaattacttgtaagatgctatatattttcatgtttgttagtcattctgatttcatatcctttaccaattatctttttggtaagttattgtggtggccatgagatgtgccttacagaggccttgctagagggaatgtgattgaatgagagccccagatgctgtgtattaaaatcctgcactgagtttgtctcaagatttcttgcacgtgaatgaatgagtacagctgggatactaaagcagatgtgtatttgggagatatgagacttctttagtggctgatttttggctcataaatgactttgccaaaccttccttagactgctcagtgttctaacatcttccatccagccttctacccttctttcctttactaggggattgaatttacattgaggtctcatagccttctctgcctctctccttatttccttttatacaaatatttcccctaataaatccatgcacatttaataccattttgctatttgcaacctgcaggtcctggactaacacagttctatacattgcattaccattctctagagtgggatcttttgttgtagagagttttaaaatttttatgtagtcacttttatccatatttttctttatggtttatatttttgtgtcttctctttaacacatcttttctagcagaattcataaatatattattctatattgccaaaagtttgaaagttgcaatcattagaattaatttttgtatattgtgtaagttaagaatctaattttattgtttttcattggaaagccatttgtcccaagataattttttagtagtccctccttcccctattgtcattctgacatattttttctaggttccgatctatgcatgtgtttctttatggaagagttggccctttgtatctttgagtttcaaatccatggattcaatcaaccacagatagaaaatatttagaaaagcgtcagaattgaacatgtacatacattttgcttgtcattattccctaaacaatatagtataacaactatttatgtaggatttacattgtattaggtattgtaagtaatctagagatgatttaaagtatacaggaagatgtgcatatgttacatgcaaatactaccccatttatataagggtcttgagcattcatggattttggtatccacagagagtcctggaaccaattccccacagatgccaaggcacaactgtatttattctatcatctacttgtttaatctcacatcagtatctacttttgaaataacaataactttattatttaactttttttattacttaggattagagaatttcctctggtgaggcatcatagtgtctcaagctggccataaagacaagtgagggctaggatcggtaagactgggcagaggaagatacaacagatctcctatgcatgaagcaaaagtgcagctcagaagccagctctttcattaagttgtcctctataccctcactagattgtaagctcttgaaatgagaggctataccttaattgtctctgttatctaaaatacttccactcactgcttggaacatattgcctgcaataattaagcttgccctggctcccaaagcatagagcaaatcacactcctccccttgcctttgagaagctcacagtcttcgaaggtagagatatgtgaacagataagaaaatggatgacaggagaacagaaacgcatgactgtcagagaagtcattggagactttacagaggaaattaaatttttattgatcttgaaagagtttgccagatgaagtagaggacaggcattttagacaaagggaacaggaaatgtgaaaacacaaagtgatggaagtcatggtgagtttggagaactataaaacttcaatgtggctgaagggtaaggtggatatagaggagtgctgggaggtgaggctgaagaaataagctaggaaatgtctttttatgccattttttaaagtttggactttattctgaagttcacatggatccaatattttttgttttgtgttgttttaagcagaagcgtgacatgatcagcttgaatgatgaacaacttgaattgtttaaagtggatcacacagtctactgttttacagttattctttgaccaagatattctttattaactgaggaaaaaaagggctttcctgaattttgcagtcatgggatatatgataagcattcttgatttatcatcttcaatcctgttacataacataataaccattgttattacctttagcaatgctttcctcagtattatctaatggcctataaaatgtgactttcatttgcaaatacagtacatctaacaagaatttaccacagctgctatgcaaaataccaatacaattgacccttggacaatgtgggggttaggggtgctgattccccatgcagttgaacatgttacataacataatacataaccattgttattatgtaacaggattgaaaatgataaatctttggaaagtggggcaaatgaattcttatgaattccatatcttccacatgtgttttacttttttgataagaagtagtaacctagttcagaaagaaaataatcatccccttttacttatgcaggataccaagtctatcttagcaccataatagtgaatgataggaatcaagctctatgaatacattcacatgtacatatatatggctatataggacacatgcatgcacatatacatatatacacttgcatatatgtgtatatacatgtacatatatgcatgtatattcaattgtatatgtgtatatagccaagttattgtacagttgacctttgaacaacacgggtttgaactatgcaggtccacttacacgtattttttttttccgtttctgacacccctaaggcaacaaggccaactcctccccttgctcttcctcctcagctgactcaacatgaaaactatgaggacgaagacctttatgaagattcacctccacttaatgaatagtacatacatttctttttccccatggttttcttaataacattttcttttctctagcttgctttattgtaataatatagtatataatacatataacataccaagtatgtgttaattgactgcttatgttatcagtaaggcttctggtcaacagtagactattgctagttaagtttctggtagttacaagttatatgtgggtgttcgactgcatggggagtcagcaccccaaccctcatgttgtccaagggcgttgtccaagggtcagttgtaattggtattttggatagcagctgtggtaaattctggttagatgtactatatttataaatgaaactcacattttataggccattaaatattattgaggagagcatttctaagggtaaaatcttgtctaatgcttgaaacatcttcattttcctgtcagtttagatctttttgaagtaattctgaaaatctctcttttaagctaaatttaacacaaccaaatagccaaatatttaagttccactaatgaagatatctaaatttctgttaaaaatttaagatatatgttaaacccttctaatataactcttctctcagtcaaacttttttttttaacagttgctttgcttcttctttcaaagtcatacttcaacaaagttgctattgaatatgtctgactaaacatgttagctatatgataagatggctggataagagataaatatagaaaatgtagctttttttctacttgcaataaccctttaggaattaaaatggaaaactaataactatttgattcataatagtagcaaaccgtaaaatatttagacataaatctactaagaaatttataagacatatatggagaaaattcaattgaataaaccgttattgaagtatataaaataagatctggatgaatagaaagatcataatttttaataaaattttgcatcttaaaaagtgaaccctctccaaatatatgcacatttaataaaattataaatacatcccaatgaggttggttttgaaattttgttaattggaacttaaatttcacctaagaagaaaaaataaagaatagttaagagtgcatgctttgtagacaaattgccttagttagaatcctggctctatcatctattagctatgttatctttgggataacattcatcttttcttatagatatgcttaaaacagtgcctgacatatagtaagcacaaatatccattagctattcttcttattatttatgttattagtattgttaatatttgttattatatggaagactaaatgaccaaagagagtcaagaaatttatgaataagatttatgcgttgttagatattagagccattaaaaaaaaaaaaaccaaagtgccaaaaaacctagcacagtgttaatacaggaataaaaaaatggatcagaggaaccaaacagaaaagccagaaatggatcttaggaaacatgagaatatgatatatgatagatgctaaatgaattcagtataaaaatattaatgtaataaatcatgcttgctattcaagtaaaagaaaatgaggttagattcatgtctcataccaaatataaccataaattataccttgattaaattttttaattaaaaagcaataatatttgaaaagaaatataggatactcaatgtataacctgaaggttgggtagtacttttcaacaaatataggaatttttcacttgaaatactagaagaaaaaaagatagcaaacaaatacaggaattccaatttcaagcagatataatgatttcatgaaatgttaactgtgcacatgatagatggtctatggatagtgcaaaagaaaaagagaaaagaaaaaatgttttttaacatatgcagcaaaaaaggtttttaacatctattacatacaaataaaaatgaatgtataacacagacttcaataaaaataggcatttcacaggagaacaattcagatggccagtatttacaatttcataggtattaaggaaaatacaaattaaaatggcaaattagcaaaaattgaggtgtgattatattaatatctgttggtggtggtgattatggggaaaagggtactttcaaaacttgctaatataaatataattcttttggttgttttgtaaaggaacctgacaatatcttttaaaaataaagaaaacgcatacttttgacctagccatcccattcatgagggtatgtcttagaaaaataagatcacaaaatcatagagatttatgtgcaatgatattattggtaggtcatttttatgaggaggggtgtggatagtaaatgccagggtaaatcacatagcatctaataaacgtatttatgaactacaaaagcttacactttcagtctagtctagtccagactgcaaataaatgtgagcaagtgaattcaagcacagaagtgcttgaaggcaggtttcataaatctactttcttacagtatcctgatattgacttatcgagacagttactgtggggttgattattaaaatatttatgtatctaggtatttttcattcagtagtatgttattcaattagcaacaagtgtggggatttaaagatattcttgtttgtttttactgctgaaacatattctagtggaaatttcgaataaacgattagtcatcctaaaagcaagatacattttctcagaaaagacaaggtaaagaacttgtatatcctccctcaattcgtttataaggtaataagatgaataaaaatatcatagtacaatttagcattgtaaaataaaattaattggtcatctctagtgtggtcgtgcttggaaggtgaaagaagccaagatcttgtctgggaatatcatgtctaccttgacctcacccttaagaatcctagcctttagtttaaaatcacatggctacatacataccaacttcaacaatagtacatctggcaaggtcatgcaaacctgggacttgagcttctgattctaagtccagtgctttttgtgtacatcatctcttgtacataccttatgatgatatgctaataaaagctacgtgatcaggccttaaaaatctgctttttttttgtaatggtagaatggggcatattatcacatcaggtaaacactctattcaaggataaatggaaatgaatgtcatatatagatcattgataaatatctcattacaaaattatgagagttaccaatgtttgagtgtatattatgggccagccctttatattaaattacttcaaatttttacaactgttaaaggaagatattattatacccattttatagatggacaagttagggccagaaaagacttcctcaaagctgttagtccagtaatggagacagggctagaaaacaggtcattttgctctttgactaatgttactactcatgttttgtattttgtttaaagttttattttattttgctttatttattttttgagacaagatcttactctgtcacccaggctggagtgcaatggagtgatcacggttcattgcagccttgacctcctgggctcaagcgatcctcccacctctcaatctccagagtagctaggactactacaggtgtgtgccaccatacctggctaaattttgcattttttgtggggacagggtttcactatgttgcccaggctggtcttgaactcctgggctccagcgattcacctgccttgacctcccaaagtgccagtatcacaggcttgagccaccatgtccagccaagttttattttagaattaaaaaaaattccacttggattgttacattttatctcattgctttatatttatagaattactttataaatgccactttcttaattttcatagttagcactctttatgaaacataaactattatttgacccaggtttttgttagaggaattgagtcagagagctgttaagtaactgagatttcacaataagccagacagaccagggttcaaattctgggtctcacattatccaattcaatattccagctttgttacttattgagcaaccactacaagcacagtttacatgacatctgatagctctcaaaatgaattttacaaacataattcagatttcaactcagcagtgactcaggagaaaggacacttggatgcatttctttatggcatttttcccagggtacacgcaacctggaagatctcccaagtatgggggaaggtttcaccctgaggaatcccattccctctaatctgggacaagggggaggagagtactgtctcttatcagccatctccccagggaggcctgggccctcctggaatgcataccatggcttactgactcaaagtgttgaaaagaccaggcattgggacacacaacactactcttaaaataaaaaaagaatcagagtagcttgtggttataattgaaatggacagagtaacatggtaccaagaaactattagcaattccttccctaaatccctcattttcttaaagcattttctccttttcctcaacaagctttaagttggatttgaagaatgataagactaaaaggagggctgtttctggtctttggaggaatttgatattccattcgatctgagtgtgcaaagcctgagttcacatgaactcttctgatctctttctctaatattttttcaccttattcatatgggaaagaaggaggggaatactttagttccattctccctcctcctatttccttgacttgtttaaaatataaatgttatagacacctaagatagaaatttgactgaaacagcctcttaattattgtcttaaaaaattggtataatgaaattgcatttgtagtctttggacatttaaatccagaagggatattttctttttcttttttaaaaatttaattcaatagtttttgggctacaggtggtttttggttacatggataagtgctttagtggtgatttctgagattttgatatacccatcacctgagcagtgtgcactgtacccaatatgtagtcttttatcccccccccgctccacccttcctttatcgtccccaaagcacattatataattattatgcctttgcagcctcatcgcttagctcccacttgtaagtgagaacatgcgatatttggttttccattcctgagttacttcatttagaataaattgtctctagctccattcaagttgctgcaaaggccattatttcattccgttttttggctgaatagtattccatagtgtatatatgccacattttctttatccacttgttgattgataggcatttaggttggacccatattttcgcaattatgaattgtactgctgtaaacatgagtgtgctttttttttttccatataatgacttcttttcctttgggtagatacccagcagtgggactgctggatcgaatggtagttctccttttagttctttaaggaatctccatactgttttccacagtggttgtactagtttacaaccccaccagcagtgtaaaactgttccattttcagcacatccatgccaacatctattattttttgactttttaattgtggctattcttgcaggagtaagatggtatctcattgtggttttaatttgcatttccctgataatcagtgatgttgagcattttttcctgtgtttgttatttgtttgtatatcttgagaattatctattctgtcctttgcccactttttgatggaattatttgtttttttttcttgctgatttgtttgagttccttgtagatcctggatactagtcctttatcggatgcatagtttatgaatattctttcccactctgtaggttgtctgtttaccatgctaattatttattttgctgtgcaaaagcttttcagtttaattatttcccatctatttatttttgtttctgttttatttgcttttgggatcttagtcatgaactttttacctaaaccaatgactataagagtttttccaatgttatcttctagaatgcttatgttttctggtcttagatttaagtctttgattcatcttgagttaatttttgtataaggtgagcattgaggatccagtttcattcttctacatgtggcttgccagttttcccagcaccatttattagatagggtatcctgtccccactttatgtttttgtatgctttgtcaaagatcagttgactttaagtatttggctttatttctgggttctctattctgttccattgtctacttgcctatttgtgtaccagtaccaggctgttttagtaactatagccttgtagtataatttgaagtcgggtaatatgatgcctccagatttgttctttttgcttagtattcctttagctatgtgggctcttttttagttccatatgaattttaggatttttttctagttctgtgaagaattatgatgatattttgatgggaattgtattgaatttgtagattgcttttggcagtatggtcattttcatagtattgattctacccatccatgagcatgggatgtgtttccatttgtttgtgtcacctgtgatttctttgagcagcattttgtagttttccttgtagagatctttaacctccttggttaagtatattttcatgtattttagtttttttttgtttgtttgttttgttttgttttgtttttgcagctgttgtaaaagggattgagttcttgatttgattctcagcttggttgttgtcagcagggacattttctaaagtatagactgtagttccttatcttctatctgtttcttactgtccccttcagtattcttgtccttttttcccgctattatctttttgaccttttaatatatagatatctacttctacttctgacaatttttgcttctccaattttctttctttttctcctctgcacacatttatttattttcttctatgtacttctttatttttaacttaatatttgattaacttcccttccctgtctcttttccttctttccataaatcttcattaattgcctgcactgagctaggattctatactctctaaatcaataatctattttctatagtcaactgtgttataatcgtactgtcaagataactacttatttttaatacttaaaaatattttgaaattttaaccaatttaattaatacaatgttgagttcaaatttgaaaaaaacaatggaaaactgtaataattctagcaacctcctgctttttaataatgtattagaaaatttgcctctttttcaaaagcctacagtgaatctattcatacaaggcaaaagcaaaccattctcttcattctctttttttctccaaaagatttaagtgttttttgtttgtttgttttgttttgttttttagatattgagtcttgctctgtcatccaggctgcagtgcagtggtgtgatcatagctcgctatagcctcgaattcctgggttcaagcaatcctcctccctcaccctcctgagtagctggggctacaggtgcatgctaccatgcccagctaatttaaaaggaaaaaaattgtgtagagatgggtcttgctatgttgcccaggctggtctcaaacttccaatctcaagcatttctcccacccagcatcctgaagtgctgagattataagtgagccactatgcccaaccagatttagtttttaaaaagagaatacgatttgaaaaaggaaaaatgtgaggcaggagagaagaaatacacacacgagctgttttgtaattgctgtaaaactgaaatcttcagcctcactaaaggagcacttgcatgaacacctctaaattaccttattaccttctaaattaggtgtgaagtctaacttctaaattatgagtgaaatccactgcaattcttgttatttggatggaatcctaggtatgtggtccagttcatgagttgaacaaaagcatgctcatttaggccaggtagaaagaaataaagacctatgttttacatgtctcataaccactgaaggtccttctcataagcagtgcttatgggtattaacgacctctctatattttacttctccagtgcctaagtagccgagtccactgagtcctgctacatctcctccaacatgtcagcatttttttcacaggccttttgttactctagatcagaaatgttgatagcaacagttccttgagggcagcagctagcatgatgccagccaacaggaaccaccaaatggttcttaatataaattactacttattaatctatttactttgtgcatttggagttttgcatgtaaagtcctatttatgtccatatggtagataaatggaacaaatgaataacagaagtaaccattttgatactttagatatagataatattggattatttctggattgtgaaagaagaaggaagaagcatatggaagagaagttttagtagaggggaggaaggaggaggtggaaacgaatgtacaaggatgggaggagaaaagggagagagacttttttttttttaaggcgagagtttactacctatctaactcttcgcattcttgaagtctcagaccaaatcccatcggtttgaaagcctctagggtattctatctattgtatacttctgttatgtacaaaattaatttgccaattaattgtgaactgttttataaactatcttaaaatggttagttaaatctttgggatagtatttagctttctccaggattatgacttaccttctaaattagacatacaatgcctaggagtcaaggactattttgcataaattccagtcttcttttacaatgcctagaatgattgttaccacagaaatattcattacctgggagaaaggatgacaggaggggcagaatgaatggagagaggtcgtgagaatgaggtgctgaggatggacgaggaagaaagctgttttagttgggaggataggtgacagaagcatggaaaggaattgccttggacccatggaagcccagtgaagatacttagatcctgcaggggtgtgaataatgttcttttagtttctcttcttaggaggtttgttcattttgggagatttcttttgaaaagagtgaacttaaattggagaaaagtacattttagtatgttgataacatttgaatttgtaaaatggacctatggatgatctacacatatttatatacccataaatatacacatattttaatttttggtattttataattattatttaatgatcattcatgacattttaaaaattacagaaaaatttacatctaaaatttcagcaatgttgtttttgaccaactaaataaattgcatttgaaataatggagatgcaatgttcaaaatttcaactgtggttaaagcaatagtgtgatatatgattacattagaaggaagatgtgcctttcaaattcagattgagcatactaaaagtgactctctaattttctatttttggtaataggacatctccaagtttgcagagaaagacaatatagttcttggagaaggtggaatcacactgagtggaggtcaacgagcaagaatttctttagcaaggtgaataactaattattggtctagcaagcatttgctgtaaatgtcattcatgtaaaaaaattacagacatttctctattgctttatattctgtttctggaattgaaaaaatcctggggttttatggctagtgggttaagaatcacatttaagaactataaataatggtatagtatccagatttggtagagattatggttactcagaatctgtgcccgtatcttggtgtcagtgtatttgtttgcctcatagtatagtttactacaaatggaaaactctaggattctgcataatactggacagagaagatgtaaatatctgttagttccatcatagaccctgccactccaatgtacacaccagctttaggcttcttggtatagataaacatacattttcaaaatttttcatcataattttcataacaaaataggaaggcaaatgatgtcacttggcttaaaatctataatatttaaaataaacaggacaaatgcattaacattgttgggggaggaggtcccttagtagaaacactcttggtccaagcattttaaagctgtcaaagagatgtaaatatagataatgtatgtcaaggagagagctttgtggttaaactgtaactttcagtttaaacaattattggtgactctgatgtcaaatgtttctcaagctttatctgaacaaaattcttctcactttgttgccaaagtcgttaacaagaaatcacattgactcattgatgttttggctcctttcccttactttctgttgctttccaaaagctgagacaggaaactaaccctaactgagcacctgcaattgcctggtagtattctagtcatgtgtgtacttttgtgtgtatgtaatccccttacagctctgcaaagtaagaattgttctccctgctttacagaagagatcataagataattgaggctgttagatgttaacttgccaaaagccatacaggaaaatggtagagtcacagtttgaaccaggtccttttgattctttacattaaaccatgctttgatcttggaaatacactgtaaggcaataaatcaatagatacggataattcacaggcttctaaataaatggaagttgattgtttttatctgtgagccaaagtaagacttattctaagaattccacaaatttagataagatagagtatatggcttctagacatccaacatagaactgagtttgtgttatcagtttaagatttggttttgctgtaaggtgcacacactttgaggaactaaaaataattgtctgttcttattctgatcagaatgtgtaatgtgttgtccagttttggatgatgaatttcttatttctaatctcataagaaacttgtcatagatgtgagggagagaattaagaacagagtgtggggaagaaactgtgtacattttgatgggatccattatgtagctcttgcatactgtcttcaaaaataagttacactataaaggttgttttagacttttaaagttttgccattggtttttaaaaaaatttttaaattggctttaaaaatttcttaattgtgtgctgaatacaattttctttattacagaagtaccaacaattacatgtataaacagagaatcctatgtacttgagatataagtaaggttactatcaatcacacctgaaaaatttaaatgttatgaagaaattatctcatttctattaatatgggaactgtgtcttcatctttattactgttctaaggtcaactcaatgtagattttacttgcttatggtttcatattttagctaaatagtaaaataatatggatatacattttgttgtgacttactcatactttccttatttggaacttttatgaatatgatatagagactgaaactacaaggaacaaaatgcaatatcaattatacagttgtggcagcactgctgtcaatttgttgatagtgtttaacacttagaaaaacattttaaaaataatttcacataagtaatgtaatttattagctgtctctgacattttacagtttggaatagtttattttctttttggtgtcctcaccaaaacccaacatcttcaagggcaggaactgtataatttttgctattgtattttgagcacatagcatggtacttgcctctaaatagatactattgttaaaatattttttaaggtaatattttaaagtgtatgctatggtacagttcagtttgtgacttttgctagtttatgccacttacagttagcaaaatcacttcagcagttcttggaatgttgtgaaaagtgataaaaatcttctgcaacttattcctttattcctcatttaaaataatctaccatagtaaaaacatgtataaaagtgctacttctgcaccacttttgagaatagtgttatttcagtgaatcgatgtggtgaccatattgtaatgcatgtagtgaactgtttaaggcaaatcatctacactagatgaccaggaaatagagaggaaatgtaatttaatttccattttctttttagagcagtatacaaagatgctgatttgtatttattagactctccttttggatacctagatgttttaacagaaaaagaaatatttgaaaggtatgttctttgaataccttacttataatgctcatgctaaaataaaagaaagacagactgtcccatcatagattgcattttacctcttgagaaatatgttcaccattgttggtatggcagaatgtagcatggtattaactcaaatctgatctgccctactgggccaggattcaagattacttccattaaaaccttttctcaccgcctcatgctaaaccagtttctctcattgctatactgttatagcaattgctatctatgtagtttttgcagtatcattgccttgtgatatatattactttaattattattatacttaacatttttatttactttttgtgttagtattttattctgtcttctccttagatagtaaccttcttaagaaaatatatatgctaagtgttttactggtttaatatgcttagactactcatctacctcaatacttccttggagatctcctcctcagtcacacagagctcaggacttatatttccttggaactcctgttagggtccaatgtacatgaaattccctagacagacagacagtcagttatatggcttgatttcaaagtttcaaaatgatttaatggactatcaagtagtttattaggagaacagttattatactcttctaaaaataaagactttaagcaataaagatgtatatgtatataaaatggctgggttattcctagaagtacctttcttagaatttagttaaatttaatatccaagatactatcttttcaaccctgagattgtgaaaagtaacttctatcaatataaactttactacatttgtattgtgttagtgtgttacagtataatctagaacaatgtgtctttctatatgatatatgacattttaatgcctaaaaaaactgatatgtcttagatgattctagtcaggatttacttctagaatagattaaaattctatttgaggagagtcaaattaattatcgaattctcagttgttattattgctgttttatttttagtgaaacagattagtcttaatgtaaacacttgagaaataaattgatggtcaacctaaaatgtaaaaaagaaattaatagaaaatttaaagagcaacaaagctctgacatttaaaagaaatgaagtacaaatctctagggaccttaaagatcatctaataatttcctcattttctagataaataaactgagagaccccgaggataaatgatttgctcaaagtcaaatatctacttaatataggaaatttaatttcattctcagtctgttaacatgcaacttttcaatatagcatgttatttcatgctatcagaattcacaaggtaccaatttaattactacagagtacttatagaatcatttaaaatataataaaattgtatgatagagattatatgcaataaaacattaacaaaatgctaaaatacgagacatattgcaataaagtatttataaaattgatatttatatgtttttatatcttaaagctgtgtctgtaaactgatggctaacaaaactaggattttggtcacttctaaaatggaacatttaaagaaagctgacaaaatattaattttgcatgaaggtagcagctatttttatgggacattttcagaactccaaaatctacagccagactttagctcaaaactcatgggatgtgattctttcgaccaatttagtgcagaaagaagaaattcaatcctaactgagaccttacaccgtttctcattagaaggagatgctcctgtctcctggacagaaacaaaaaaacaatcttttaaacagactggagagtttggggaaaaaaggaagaattctattctcaatccaatcaactctatacgaaaattttccattgtgcaaaagactcccttacaaatgaatggcatcgaagaggattctgatgagcctttagagagaaggctgtccttagtaccagattctgagcagggagaggcgatactgcctcgcatcagcgtgatcagcactggccccacgcttcaggcacgaaggaggcagtctgtcctgaacctgatgacacactcagttaaccaaggtcagaacattcaccgaaagacaacagcatccacacgaaaagtgtcactggcccctcaggcaaacttgactgaactggatatatattcaagaaggttatctcaagaaactggcttggaaataagtgaagaaattaacgaagaagacttaaaggtaggtatacatcgcttgggggtatttcaccccacagaatgcaattgagtagaatgcaatatgtagcatgtaacaaaatttactaaaatcataggattaggataaggtgtatcttaaaactcagaaagtatgaagttcattaattatacaagcaacgttaaaatgtaaaataacaaatgatttctttttgcaatggacatatctcttcccataaaatgggaaaggatttagtttttggtcctctactaagccagtgataactgtgactataagttagaaagcatttgctttattaccatcttgaaccctctgtgggaagaggtgcagtataaataactgtataaataaatagtagctttcattatttatagctcgcaaaataatctgtatggaagtagcatatataaggtatataaacatttagcctcttgataggactaactcacattctggtttgtatatcagtcttgcctgaatttagctagtgtgggcttttttttatcttgtgagtttgctttatacattgggtttctgaaaagatttcttttagagaatgtatataagcttaacatgtactagtgccaatcttcagacagaaattttgttctattaggttttaagaataaaagcattttatttttaaaacaggaaataatataaaaaggagagtttttgttgttttagtagaaaacttaatgccttggatgaaatgagccatgggcagggttgtaatgaattgatatgtttaatagtatagatcatttgtgaataatatgacctttgacaagacacaagccattaacatctgtaggcagaagtttccttctttgtaaaatgagggaataaaatagatccctaaagtgtgtaattttagtatttctaaactttatgaaggtttcctaaatgataattcatctatatagtgtttttttgtgtgtttgtttgtttgtttgtttgagatggagtctcgctctgtcacctaggctggagtgcaatggtgcaacctcggctcactgcaacctctgcctcctgggttcaagctaatctcctgcctcagcctcctgagtagctgagattacaggcatgcaccaccatgccgagctaatttttgtatttttagtagagaaggggtttcatcatgttgaccaggctggtcttgaactcctgaccttgtgatccacccacctcagcctcccaaagtgctggtattacaggcgtgtgccaccacgtccagcctgagccactgcgcccagcccatctatatagtttaatatcaatctaaatgaatttctcagtcctgagcctaaaaatttagttgtaaagaatgatatccttgactaataatagtttctattaatggattgcatctagtgctaggtggcatatatttagtccccacaactaccctggaaggtatttaaaatttttcacatttgcagataaggaaactaaagttcagagttcagcaacatgcttgaattcaagcagctcctaggatgttaatggtggaggttgggttcaaatccagatctgtctgactcaaaaaatgcatactcctaaccagtgcactatatcccaattccataggagcccttctttgtgattcatagcactttcccatgagttttgttgattttgtgagaaacaaaactctttttcctttggactgtctggaatctctctttttcaaatttttgaaatgtatttctatgccaaaagacaaagatttctagaggaatatgcctaggatgagaattatgtaatttaaatcacagctggaaagagagaaagtcctaagttactaagaaatgttcaaacacaaatgggctttcagtctattggaagacctttatagctagaagtatactgaactgtacttgtccatggacccctgaagaaacaggttaaatcaaagagagttctgggaaacttcatttagatggtatcattcatttgataaaaggtatgccactgttaagcctttaatggtaaaattgtccaataataatacagttatataatcagtgatacatttttagaattttgaaaaattacgatgtttctcatttttaataaagctgtgttgctccagtagacattattctggctatagaatgacatcatacatggcatttataatgatttatatttgttaaaatacacttagattcaagtaatactattcttttattttcatatattaaaaataaaaccacaatggtggcatgaaactgtactgtcttattgtaatagccataattcttttattcaggagtgcttttttgatgatatggagagcataccagcagtgactacatggaacacataccttcgatatattactgtccacaagagcttaatttttgtgctaatttggtgcttagtaatttttctggcagaggtaagaatgttctattgtaaagtattactggatttaaagttaaattaagatagtttggggatgtatacatatatatgcacacacataaatatgtatatatacacatgtatacatgtataagtatgcatatatacacacatatatcactatatgtatatatgtatatattacatatatttgtgattttacagtatataatggtatagattcatatagttcttagcttctgaaaaatcaacaagtagaaccactactgatattttattatttcatattacatataaaatatatttaaatacaaatataagaagagtttttaatagatttttaataataaaggttaagagattcgaaagctcaaagtagaaggcttttatttggattgaaattaaacaattagaatcactgttgatattttattatttcatattacatataaaatatatttaaatataaagataagagtttttaatagattttataataaatgttaagagattaaaaaactgaaaatagaaggcttttatttggattgaaattaaaggccaggcatggtggttcatgcctgtaatcccagaattttaggagactgagtggggaggattgcttgagcccaggggtcaagaccagcctgggcaacacagtgagacaccgtatctacaaaataattaaaaaattagctgggcatggtggtgtgtgcctgtatgctaccattaactaaggaggctgaggtgggagaatcgcttgagcctgggaggtcaaggctgccctgagctgtgattgtgccattgcattccagcctgggtgccagagagagaccctatctctaaataaataaataagtaaataaataaacagcaacaacaaaaacactcaaagcaaatctgtactaaattttgaattcattctgagaggtgacagcatgctggcagtcctggcagccctcgctcactctcagggcctccttgaccttgacgcccactctggctgtgcgtgaggagcccttcagccctcccctgcactgtgggagcccctttctgggctggccaaggccagagccggctccctcagcttgcggggaggtgtggagggagaggcgctgggggaactggggctgcgggtgcccttgtgggccagcgcgagttctgggtgggtgtgggctgggcaggccccgcactcggagcagccggccggccccgcgagccccaggcagtgaggggcttagcacctgggccagcagctgctgtactcgatttctcactgggccttagctgcctccctgcggggcagggctcgggacctgcagcctgccatgcctgagcctccccccaacctgccgctgcagtgggctcctgcgtggcccaagcctcctgacgagcaccgccccctgctccacggcacccagtcccatagaccgcccaagggctgaggagtgtgggtgcagggcgcagggctggcaggcagctccacctgcagccccagtgcgggatccactgggtgaagccagctgggcttctgagtctggtggggacttggaggatctttatgtctagctaagggattgtaaatacaccaatcagcactctgtatctagctcaaggtttgtaaacacaccaatcagcaccctgtgtctagctcagggtttgtgaatgcaccaatcagcactctgtatctagttaatctggtggagacttggagaacctttatgtctagctaagggattgtaaatataccaatgtgcactctgtatctagctcaaggtttgtaaatacaccaatcagcactctctgtctagctcagggtttgtaaatacaccaatggacactttgtatctagctaatctagtgaggaggtggagaacttttgtgtctagctcagggattgtaaacgcaccaatcagcaccctgtcaaaacggaccaatcagctctctgtaaaaccaatctgctgtctgtaaaatggaccaatcagcaggatgtgggtggggccagataagagaataaaagcaggctgcctgagccagaagtggcaacctgctggggtctgtagaagctttgttcttttgttctttgcaataaattttgctactgctcactttttgggtccgcattgcgtttatgagctgtgacactcactgggaaggtctgcagcttcactcctgaagccagcgagatcacgaacccaccagaagaaagaaactcctaacacatccgaacatcagaaggaacaaactcaggacacgcggcctttaagaactataacactcactgcaagggtccttggcttcattctcgaagtcagtgagaccaagaacccaccaattccggacacaatttgactgcagaaaatggatgtccaaccctgtggtttccctgggccacattggaagaagaaaggagttgtcttgggccacacataaaatacacttactatagcagatgagctaaagaaaagaaaaaagtccatgcgtaatctttgtgatatgtgccaccaccaataagcaaaattgttctcttattcaaaaggttggacacagctgctctagatattttattattaaatatgcaggcaattactgtttaaatgaagatttcctcacagaatgagattaaaagtatatattagtggcttagcattcattttagacaaccattttagagattcaaatcacacacttgcttacagaaattttgttgtcttcaatgtccccattgtggtttctttaccaagcctctactgttcttcacatcaccaagttaaaaaaaaaaaaggggcgggggggcagaatgaaaattgcatggtaggccacaagttcagatcctcatcgacacaagaggtgcctgaagcagtggatgaggcttttctatggatcatgagcagccacataaatgcttaaaagggcctggcagggagcatcagtgggtgatgtggctgggaggctgaatggagagcatttgttcttcagttatctatagaaggcagctgtcactcagcaccagctaagggcttcccatgagggaactggggatcaggtttcccagatctttttatgtaacaggataagacagagatccagctttttttgggtaattatttcctattttaaaatacgggtagttgattaaataaaaacaaacgaatgaacaccatatgggcacaacaaaacacatctgtggcttggattcagcttgtgaatgattactgcagatatttattctagaggacacccctgggtatgtcctaatataaaacctaaatctaaactcaagtcccatgctaccttcagagaataaatgacccagaaaaagaaccacctctcctaaggaagtataaatttgtaaataactgagacccaaacttacaactatacatttttcttattgttgggctgttgctaacctcaattaagaaggcttgatgatatttgtaaagtgtcatcactccaccatggtccagtaacatctgatcactccaccatggtccagtaacatctgaatggtcaagaaatatctaaacgtatgtaccaaaaatttgtgtatactactgtaccaataaaccatttgtttccatttgatctctgagtgtggtaatacatgttatttgccctgctgttgtaaataaacaaaccaaatggaggcttgatgcaagatgcagtgtagcatagtgccaactctggactccgactactcagggtgtaaattctaactctgttctattaacaccatgaaactgagcaagttagttaaaactcgctgggcccattttctcatttatacaatggagattttaatagtacagctacataggccattttgtggtttaaaatacatcatgattatgaaacacttaatgtagggcttgctacataatgagcaaggtttgttgctgttatcattaatatccttaattctcattattataaaacttgagatagtatgaggtgaacaagttcataacagcaatataatgaaaattttaataattccttttatactttaacaaaaatacgagattgggtaatttattatttttacatgagtaataaatattgcattaaaatatatttaaaatttaccacattaatgtctgccagtcatgccaaatgaccaacatgaatgtgaataaaactcagtctgtgcccatttaatcttaaccaaccctttataattgttaatgatttgaacctctgccttgaaagatcacattacttgattgtcttcaacttatctgaatgtggtagtgatttctgtaaatttataggacctttgtctcatgcagctccatggagttgaacttatgcacctttaaaatggtatatacttaattaattaagtgttgatctgcttcacatgtgtataatattattagctcactaaaccaagaaaacagtggtcctttagggaaagaaactaaattacaacagagaatataaataccatataaatatctattatttattgaactgtcacaattattgcaaaaaattaccttttagtggacaaaacaattgatattgcccttttctggaaaagaaataatgtaatatatgatgaatagttttggccagtatcctctagaccttgccagttaactggctctcaaaattttgaataataaaaacttggtgatagtagaaaaatagtaattttttaaaagtatgtgcacaattatacaactaaacaattcattcaccagtgttcacaattctattgccttctttgaatcaaaatttacatagtttttcttttagactaagctcctttatgataccagtgtgcccatttctcattaccattgaaatgtctcatgagcatgtcacattctggtacaactgctaatccaggatgacagtttagttcttttaaatccaattgagagccttctactcatgaccagagaacctaaagaaaggttaagatacatttattccttggtgtaagtgatttgtctatttttagttttcctaagggtcatatttcaatttagatttttttttataggttaggtaaaataggcttcccttttgcaatatgaaatatgtagtcttttaaaaaatttcttcaaagctattaaactgaaaaaaaattaatttggtctattcagtttgttagcacttaccattttggaaagagagtgactctacttttgtatttggtaacattttccctactacagggcagtatcttttgtaagttcttagatattagcaccaaataaataggcaaaaaaaatctattatgttaattcttagaacccctgcttggcagtgcatcattgactagatggagaagaaatgaaaataatacattaggaagcagtttcctggttcttttgaaaacaactagagagtcttgttgttgactggaatatctgaagatcctgtttaatgctttcattctatgattgttaagaatatgtcatagaactgctgtatcctgtttctttatgtcttcccttctgtttgttgattagaaatccctgagtggctttacattattagtacagtagatatgtagtatattcccataataccactgctgctattgactaatagtaattattttagggcagctttatgacagttggtttatgttttagggtgtcatttgacttgtgaagcattgaaatctgggtattaagcacactgttttctatgtggtatggaatgattcttaaagccctgagaaaatggaaaataaaaatatttttcctttttaccataatcacctatgactgtcactctatcataaactgcataaactttataacctcaaaacattttggaaatgaaatgacagaacttgcttactcaattgcttctatatacaccaaatatttttttaaagtattatgttaagtccttgaaaatattttgttctactcaatagaagcagtttaggttggtagttctatgtggaaacagtgaggaaataattttatattatgatgactagaccagtctttgaacatcactttggttattgttccattagtaaatattataattatttctgagatttactcaccttcaaagaatgttggcaatgccagcattattaacactcctctagttagaacaaagaggaaatgtaataacaaaacataataatagccaaataaagagtgacttagaatgtacacccttatctaggatcctgagtaattcgattattcttaggaaatacacttttgtgctagaacaaagacttttgaaatagctaatttctgggtttcttttcattttgaattaacttgaatttcaaggaaacaagggtagtttttacagatacagtgcatagaagctctgtgtacaatgaagaaaagtaggaaagtgagaaaaatgccattagatttttcatcgttatactatctgatatgtgaatttaactaaaacttatatacctcattatagtacttcctaatgtaatttcttaatttaagtgttccccataaggtttttttttatataaacttaagtactgttaaatatttaaggcaaattcaggtataaaataagacttgttgatatcttattccaagcatatttgtttctctcctatttatttttattctgtgttcatttccaaaattgttttactcacaactgtttgttttttctgtttcattctgtggtaaaggtatcatttggctaattgtataatttcagtgtcatttctaatattccaattgtgatagtatcaacacaagattaaatttctctacatggtttatgagaatggaatgccaaattgaaatagaacagagcacagatgatctaaatataaaaagaactacaaaaatcacagttgtttaaaaaggttttttgtttgtttatatatggtgcagaacatttgttccttagccaaatgtttccaccttgagaaagctatagagattctatgtagtcctagtaccaataatatgttttaacctgaatgtaccttatctttattcataaactgtgactttttacactgctgaaacttttttttttaagacaatctcactctgtcgtccagtctggagtgcagcagtggtgtgatcttggctcactgcaacctctaccttctgtgttcaagcaattctggtgcctcggccacctgagtagttgggatcacaggtgtacaccaccaggcctggctaatagtttttgatatttctagtagagatgagttttgccacattggccaggctggcctgaaactcctggcctcaagtgatctgcctgccttggcctcccaaagtgttggtattacaagtgtgagccactgtgcctggcctgaaactcataattcatttccattaatattaatctcaccttttccaataattaattgatttcacaagtattagtcccctataatcattgaatggctaataaaattatttatagcaaacagattaattatctgccagcagtctgagattagtttctttaaaaaatgtttattatttaaaacattcagctgtgatcttggctttcttgtgaggttcaatagtttctattgagtaaaggagagaaatggcagagaatttacttcagtgaaatttgaattccattaacttaatgtggtctcatcacaaataatagtacttagaacacctagtacagctgctggacccaggaacacaaagcaaaggaagatgaaattgtgtgtaccttgatattggtacacacatcaaatggtgtgatgtgaatttagatgtgggcatgggaggaataggtgaagatgttagaaaaaaaatcaactgtgtcttgttccattccaggtggctgcttctttggttgtgctgtggctccttggaaagtgagtattccatgtcctattgtgtagattgtgttttatttctgttgattaaatattgtaatccactatgtttgtatgtattgtaatccactttgtttcatttctcccaagcattatggtagtggaaagataaggttttttgtttaaatgatgaccattagttgggtgaggtgacacattcctgtagtcctagctcctccacaggctgacgcaggaggatcacttgagcccaggagttcagggctgtagtgttgtatcattgtgagtagccaccgcactccagcctggacaatatagtgagatcctatatctaaaataaaataaaataaaatgaataaattgtgagcatgtgcagctcctgcagtttctaaagaatatagttctgttcagtttctgtgaaacacaataaaaatatttgaaataacattacatatttagggttttcttcaaattttttaatttaataaagaacaactcaatctctatcaatagtgagaaaacatatctattttcttgcaataatagtatgattttgaggttaagggtgcatgctcttctaatgcaaaatattgtatttatttagactcaagtttagttccatttacatgtattggaaattcagtaagtaactttggctgccaaataacgatttcctatttgctttacagcactcctcttcaagacaaagggaatagtactcatagtagaaataacagctatgcagtgattatcaccagcaccagttcgtattatgtgttttacatttacgtgggagtagccgacactttgcttgctatgggattcttcagaggtctaccactggtgcatactctaatcacagtgtcgaaaattttacaccacaaaatgttacattctgttcttcaagcacctatgtcaaccctcaacacgttgaaagcaggtactttactaggtctaagaaatgaaactgctgatccaccatcaatagggcctgtggttttgttggttttctaatggcagtgctggcttttgcacagaggcatgtgccctttgttgaacctccatttgactggcatgcacatgtctcagatattataggttatcatatattgttgctcctaatatttctgtgttagataattagagtagcttggtttgtaagaatgtgatgttggtgggactgtagcagaacaagaaggcccttatgggtcagtcatacctctcttttcaaatatttggtctagctctcttctgggcatcttgttgccaatatatagtattgctcaaaagggcaggagatttgaagtgatcaaggaaaatatattttttctattgattaagtcttttgatggggtagaataatctaatttcatgtaactgctcaaagttatatggtagggggatcccaaatgtattttaaaactatttttatatcatcatatttgaagtaatagaaagtcagagtagcagaataaaggtactaaaaattttaaaaactaataaggtactttgaaagaaatcaattatgttgattcctcattaaacaaatttgcacttaaagactgaggttaataaggatttccccaagttttttcatagcaacctgtgagcactttctctgttgaggcatttatggtatgaaaagatgagtaaggcacagttcttgccctggagaaggtcacaggtgagaggaggagttgacacagaaacatttgatataaagcaaggaataaattccaagactaaaattttcagaaatctaaaaaactcaagataagaaaaacccattatattttctgggtaacaaaatttcagtgttattaacatgtaggaagatcttgatatttattctgaagcccatgtgtgttgctgaaatattgccgcatttgcatatactcatcaccatcctctgttttggagctaagaattttagactcaagatgtctaattaagttgatccattgattttattttttatggaaatctgagacccacagaaggcaggggatttgcccacatttctagaagagtcagacatgagcgatgaggcacagtggaaagaacatgagcattgcctgagctctgagttggcgctataagagcagtgatcatgggcaagtgactcttctgagccttggcctcctcacctgttaagtgaagaaaagaatatttcagaagatctttgtgagaatgaaacaaggcaatttacttgcctgctacatagccaatgggaaatcaatataagttccccgtggttcccttctgtggggttttgttcccacagagggtgcactggccattccacttcttcttttccaagctcctcattccctttaacgctgttcatagttggttccaaaccatttgaaatataataagcaccaggatggttttttctttccaccaaagcaaatttcattttctaaacactgtttataaatatcaatggctattttttcaatttttgattatcatgaaaatatacaaatatgtttaattaaatatgctaaagaatgtattaataaatatgtattaaataattcctacatataaggcctttttgcttggggtatgggtgatacaaaataaatgtggcatgaacccactgacctctagcaatttataacctagaaaaagagttatgatatgtttataagttcctgtgatataagacatgcatatagtcattataacagaggtgcaaacaagatgtatcaagtatgtccagaggaggaagagattaatcccagctggaggaaacactgatgctttcttgcagcaggggcatttgagttgagaaagggaggaaacatagattttgacaatgagagctgaggggaaaggggtttcaggtggagggaaccgcatgtggaaagcagggaggtaggaaagtgtagagtgtgtttaaagaatagaccagtttggctgaaacaggatatttgagcagaggaagcttgtactaggtaggtgggttgaggccaaattatgcaaggcattaaatattaaactaggaattttggactttatcctgcagtttatggggggtaaatgataagattcaatatcactttatttgtacagtattatgttacattttatctaattgtttgtttaattcctgtctagacaatgaattcctcaagggcaaggagcatggcttattcacctcagtaatttcagtgcctagcattgtgcctggtacaaagtggacacttgtatataaccttttttaattgaagcaacaagttgtcaaccttacaaatgtgaatccgtgattcagatgacaggttgaaatgtagattgtctgcgaagagggcagaaagagagtatgacaaaggaggacaagacagtggggcaggcagggagagagagcagccagggtttcggtagaggtatgtcaaaaaggtatggaagtcagaggagaaggagacccctatgttatagaatacaaatggaagggaaatgatgacaacagtaagttgtcattaaatgcaaggttgcaaaagtaagattgtaaagcaggatgagtacccacctattcctgacataatttatagtaaaagctatttcagagaaattggtcgttacttgaatcttacaagaatctgaaacttttaaaaaggtttaaaagtaaaagacaataacttgaacacataattatttagaatgtttggaaagaaacaaaaatttctaagtctatctgattctatttgctaattcttatttgggttctgaatgcgtctactgtgatccaaacttagtattgaatatattgatatatctttaaaaaattagtgttttttgaggaatttgtcatcttgtatattataggtgggattcttaatagattctccaaagatatagcaattttggatgaccttctgcctcttaccatatttgacttcatccaggtatgtaaaaataagtaccgttaagtatgtctgtattattaaaaaaacaataacaaaagcaaatgtgattttgttttcattttttatttgattgagggttgaagtcctgtctattgcattaattttgtaattatccaaagccttcaaaatagacataagtttagtaaattcaataataagtcagaactgcttacctggcccaaacctgaggcaatcccacatttagatgtaatagctgtctacttgggagtgatttgagaggcacaaaggaccatctttcccaaaatcactggccacaaagtgtgacattttggcattggcatcactatttgatggaagccaacctccccccaaaaggcctgtattagaatgaagatggattccctgggtgggttacacttgaaactagcctcacccatgaacactttggcacagattagctagcccattcccccacagtaaggaccataaggaagggacagaagcaaagataagttttagaacaaaagagaggggaaagaaaaaatctagggttttatgagggctgtccctgagtgatagatgtgaataggcctccagggcaggctggctcagaggctgactctttgggttggggtgactgattggtggtgaggatggagaagaaaaggggagtggaggaggtgaaagtgaccttgggacattaggtctccataagtgacaggatttaaggagtgttgtaagctgtggttgttggaccaggtttaagcacagcttcctgagcttcctgactggtttaggtcaagctccagagagcaaatgccacagtctcagtgatctccttggagaaacagttggaataggatgttgcccatgttgggatgagtcattgtccgctcttgctctttccctacccctgcaaaataataatactgtatttgattgaacatataaaacaaaagaaggattatcacataagtatgtatatataaccaacattggcaggtgcagaaaaaccagactgtcagtttgcctcatctgaaatgattgacacaaacaaatatatttactgtcccaagtgaactttggcattttggatatccttcagttgttctgtttaaagatataacttagaagcagctgatggaatatttaaatccatgcgttgaattcatgcattcaaagaaacatgtcctgagtcactaaatgctgacatttgtttttcatgttaagagtgtaaataactggtcccaaatataatattattacatcagataaaaactggaatgtgaacctcttaacttgattgtgaaagtatttgccaatggtgcctcttgataattatttgaggctcacttcagaactcctctggaagggttaatttttaaatagtcattttataaattaacatttttgacatatgtgatggctctcaaattttttcttttatgccagtttgaatcatttctgctcaatttttttttttaattgggatggagtctcactctgttgcccaggctggagtgcagtgatgcaatcttggctgactgcaacctccacctcctcggttcaagcgattctctcgcatcagcctccagagtagctgggattacaggcgcgcaccaccatgcctggataatttttgtattattactagagatggggtttcaccacgttggccaggctggtcttgaactcctgaactcctgacctcaagtgatccacctgcctcagcctcttaaagagctggaattataggtgtgagccactgcaccaggccctgttcaacttttaatgctaagattcatttgttgttgtttcacaagtgattaggcagaggtcttttatattaatttacccattttatttgtaagagagtctcatattaaggaagcataatatatgacaatccaaatacagtacaaatttggttaattttgattttgttaaataattaatcacaggggtccttcaaattgtgagctcctctggttatacttatgttttacctctggttatacttaatttcaaacaaatgaaatttcattctattcatgatatttcagaagcagatctgttgcacaaaataaagcatacctataaattttctttttttaaaaaaaagtctctgttcactctattttctattatttttctctttttaaaatttgaattttattgtggcaagtccacttaacatgagatttaccctcttaacagatttttatgtgtaaaatacaatattgttcaccatgggtaaatgttgcacagcagatctctggaacttattcattttgcactactgaaattttatacctgttgattagtatctccccatttccctctctcccctgtcctgttacccatggttctgttctttgcttctttgagtttgagtattttgatacctcatgtaatcttcattctattttctaactttgacaatgttctgacaaatttgctttccggattggagcactgtatagtgaaaattgaaaatcttggttattttctacagattcccactattttaccttgagcagacacttatcttgaagggtctcagatttgtcacttgtagaatggggaatataaacctgataatggtccctttcagttctaaagttatatcagttgaaaatacatgtgtcacttatggtaacgggtagagaactggctcactgaacagcatatggatattataaagtggttttttttaatcctttctgcagacagttactttatactttattcaaatggattattgtgaagtacatgttagcggactttgtaccttttaaaaatgtatgtatttggtgtaatgtagaaatatagaaatttattaagtatgatttatttcaatgttaagcatgagaaaatatgctccgaaaggttagatagcttgcctaaatgacaagcttgtatttcaagcagaactttctgaatcaaaagactccaagacgaatgcccagctttcaaaaactgtctaaccaaaataaatcctaagattcaccttcatactaaaattatttaaaaatagtttattttaaattaatattcacttaaaatgtatttatcatgcaatactttaaagtgtctgggaaatgaaaatatccaaagatcaaagaacaccatgttttcaaacttcaaaaatgttatcagtgacctaaacaatttttaaaattttcatagagcctatgaaaaatgtacttgcaaatggctactttctgactaggaatagaatggggagagtatttagtccaacaatgatagactggattaagaaaatgtggcacatatacaccatggaacactatgcagccataaaaaatgatgagttcatgtcctttgtagggacatggatgaaattggaaaacatcattctcagtaaactatcgcaagaacaaaaaaccaaacaccgcatattctcactcataggtgggaattgaacaatgagatcacatggacacaggaaggggaatatcacactctggggactgttgtggggtggggggaggggggagggatagcactgggagatatacctaatgctagatgacgagttagtgggtgcagtgcaccagcatggcacatgtatacatatgtaactaacctgcacaatgtgcacatgtaccctaaaacttaaagtataataaaaaaaataaaaaaaagtttgaggtgtttaaagtatgcaaaaaaaaaaaaagaaataaatcactgacacactttgtccactttgcaatgtgaaaatgtttactcaccaacatgttttctttgatcttacagttgttattaattgtgattggagctatagcagttgtcgcagttttacaaccctacatctttgttgcaacagtgccagtgatagtggcttttattatgttgagagcatatttcctccaaacctcacagcaactcaaacaactggaatctgaaggtatgacagtgaatgtgcgatactcatcttgtaaaaaagctataagagctatttgagattctttattgttaatctacttaaaaaaaattctgcttttaaacttttacatcatataacaataatttttttctacatgcatgtgtatataaaaggaaactatattacaaagtacacatggattttttttcttaattaatgaccatgtgacttcattttggttttaaaataggtatatagaatcttaccacagttggtgtacaggacattcatttataataaacttatatcagtcaaattaaacaaggatagtgctgctattactaaaggtttctctgggttcccaaatgatacttgaccaaatttgtccctttggcttgttgtcttcagacaccctttcttcatgtgttggagctgccatttcgtgtgcccccaaactctacttgagctgttagggaatcacattttgcagtgacagccttagtgtgggtgcattttcaggcaatactttttcagtatatttctgctttgtagattattagctaaatcaagtcacataaacttccttaatttagatacttgaaaaaattgtcttaaaagaaaatttttttagtaagaattaatttagaattagccagaaaactcccagtggtagccaagaaagaggaataaatattggtggtaattttttaagttcccatctctggtagccaagtaaaaaaagagggtaactcattaataaaataacaaatcatatctattcaaagaatggcaccagtgtgaaaaaaagctttttaaccaatgacatttgtgatatgattattctaatttagtctttttcaggtacaagatattatgaaattacattttgtgtttatgttatttgcaatgttttctatggaaatatttcacaggcaggagtccaattttcactcatcttgttacaagcttaaaaggactatggacacttcgtgccttcggacggcagccttactttgaaactctgttccacaaagctctgaatttacatactgccaactggttcttgtacctgtcaacactgcgctggttccaaatgagaatagaaatgatttttgtcatcttcttcattgctgttaccttcatttccattttaacaacaggtactatgaactcattaactttagctaagcatttaagtaaaaaattttcaatgaataaaatgctgcattctataggttatcaatttttgatatctttagagtttagtaattaacaaatttgttggtttattattgaacaagtgatttctttgaatttccattgttttattgttaaacaaataatttccttgaaatcggatatatatatatatatgtatatatatatatatatatatatatatatatatatatatatagtattatccctgttttcacagttttaaaaaccgatgcacacagattgtcagatagcaattctgtgattgaaggggaaatatgtcacctcttcatactcatattggtgaagggtcctagcttcaaaattaatagattcctaaagaggggaaatgaaacatccgcatttacacacacacacacacacacacacacagagttcctcttgtcggtaagttttgttttttttaaatctctactagataaaatttgttatctaattgtgagttttacacaaagaaaaactgtcacagaaaagaaagacagtgtcacatttttcaaaagaaaaagaagaaaagaaagtgccatgtttttcaaatacaaatgttctggattgattttaggatctttagtgaaaaacaaagtatttcataataagtaaaataaaaatctatgtaggtaaatttgtttctctaatttaagaatttgaatttctgagtatttatgataagtgttgaaataacttcttatatgtgacagtgaatactggcagagcaaatgccaaatcaatgccaaatctgtaggatcatttgattgtaggaacagaattctactcaaaccgaaagcaggcatttgctggagttacagaaaggcctcatggaacaccgagaaggtggtgccattcgactcttaaagaagctgcaacaggcacaagagagtcagctgcagctcttcttcttgagtctatatctgtcctgggtccattcctttttgtggttgcttcattcctttctctctctgaagactggtttttctggtctaccagggctatgccacattgactttatgtagtgtctccattctggcctcctgaatttacaggagagttcctctgtacaaactcaaagtcctggagagaacagaaaacagcttccttttggctcaggggtccaactgcagtctactctgctgctatgaggatagtgggttcaccacctttgttgttctctcagctagggcagtgggaaatgactctatgaaaggaatatacatgggcaggcaaatgtactaatcctcatcagtactgtaattttaagcaactttaaaaaattcttttaagttatttgaaaataagatcaaagaaggctgaattacataaatgaagatttgttaacaattaattcaaaccaatataacacatgctataacatggttgagtgtgattgagtcttgatttattaggggcaataatcaaaacatttaacaatcattatagtacagaacttaccaatcaaatcagatgctcagccggagtggatgttggccacccagctattattatccctggctcaattggtcttcagctgtgttaacttgcaaacattaattaactatctaagcccctcattttcctcaagtgtaaatagacacaataatattacctattccataggtgtggggtgaatagtaaatgtaataatttgtccaaaacacttagtatagtgcctggtccatggtaaatactaaataaatgttatctgacttattattaaaattttatcttctcagcttaaccttcagaacagtaatatattggggtctagataaatcttgcctatatgaaaataatttaatactacatgcagatatatgctgtgtatattatgccttctgttagaggaattgcagaaacaaaaatttcaattaataataagatgaattatttctcccaattgtagaatcttttgacaattttatcatgcattacagatgtaagaactcttgattgggacttgatagtctaactttataataatttaagaacattcctcttagagaatttctatggccataatactgaacacatgaattttaattagctgtcctctttagccctaaaaaaaaaattactgtaatttaacacttaagtgttgttcttcccaggtacagtaatctttttttttttttttttttttttttgcatagagggtaatcttttctctttccaaatggcagaactgttagttttctgactgtccggtgaaattctaagtccacttacttcccaatagcatgcaattagcaaaggtcctccttgcaaaggcacagaacacacctaaacatcttgcagatgctgtttggacactcttcccctgcttttggtctctttgtaaagcagctcatctggatacaggatctcttttccccattgcccattctaatatatgttaccgttattacttatagaataatagtagaagagacaaatatggtacctacccattaccaacaacacctccaataccagtaacattttttaaaaagggcaacactttcctaatattcaatcgctctttgatttaaaatcctggttgaatacttactatatgcagagcattattctattagtagatgctgtgatgaactgagatttaaaaattgttaaaattagcataaaattgaaatgtaaatttaatgtgatatgtgccctaggagaagtgtgaataaagtcgttcacagaagagagaaataacatgaggttcatttacgtcttttgtgcatctataggagaaggagaaggaagagttggtattatcctgactttagccatgaatatcatgagtacattgcagtgggctgtaaactccagcatagatgtggatagcttggtaagtcttatcatctttttaacttttatgaaaaaaattcagacaagtaacaaagtatgagtaatagcatgaggaagaactatataccgtatattgagcttaagaaataaaacattacagataaattgagggtcactgtgtatctgtcattaaatccttatctcttctttccttctcatagatagccactatgaagatctaatactgcagtgagcattctttcacctgtttccttattcaggattttctaggagaaatacctaggggttgtattgctgggtcataggattcacccatgcttaactgagtggtgccaaattgtcctcaagtctgttgtactgatatatatccccatcaagagagtacaagaattctcatagctatgtatcttcaacaacacttggtgtctggtagatgtgaagtgattactaaaaatatagggaagctgcatacataattattggcttttgctgttctcttacattaatttcttattcatgttgattactcatttgtcacctagttttttcttccttaattaaattgtaggaatttatgaattatggattgatcatcagctctatacatttcaaacataatccctcagtcagtggcttggcttatagagtcttttgatgaaaagaagcttttaagtttaataaagttcaatttattgtcttttcctttatgttttgtgcttttggtatcttgattaagaactccttccttatattgggttctcaaatttagcagcataacattttcatactattatttaaatttttttcacattatttagtgatagcacctttcttattcctaaagtgtttatcattgccttctgtctttctgcttgataaatattgccacacatttgtatactttattagtgtgtacaaagaccacattttagttgtgttatttctcttgttttggttttctagaatgcagagccattaatattatagtaatgcttatgtgctaataccatatcaggggcacaaatcccattgcagcgggactgagaaattaaaggaaatgatgcacatttactcatttttgtttaaaaaatcaaatgcatatttttcaatcagactatatggttggtctggatagcttcatcattgaatttttaaagtatttttgtactactgtatttaaaattattcattcaccactgcttttgtagatggtttagaaacccaagttaggaatgactgtgcaacactattattatactctttttaaaattatactttttgcttaagtttctttccttgttctctgagacagtgttcatgttcccaaaccacacacatttattcagctataaaatttgtatgatcaactcctgtcagaacaaacatcattataaaaaatatctccaggaaaaagaaaacccttttaatgctctcttctggttcatgtgtcttcttattttctttaagcattttcataacccattgagctgtaatttaattggaacatgatttatactaaagttggtttctttacctttaactttttttttttagtttgatcagctctctttagcttctgtagttcggtctttaattccattccagtatgcttttggagttgggtctcataaatgtatagaaatgtttctgttgggaaacagcaggagaatattaaataaatattgtgcttacatctatttaattctttgcccaactttctacaactttgactttacatttaagctcctcatgcacttacatgtttctttacctaaaaatatcttttcaccatgggtgtgtacaattcctttgtccttgctgtattaattttcttggtttacatagtagcctctacacattgatgtcaaaacctctgtttggtgcatttctactctgcgtgttcaatctccatgaaagtttctgtaaggtattttcattcctctagtttttcacatgtgcatcctggctttgtgacctgtgctttgatatcgtgcctttcatcttgtggcattgaaggatctttgcaaggacctattgtgttataatacagtctatgaaaaatatcaatatttgcatttgatcacatttaaaaaaatcacattcttttgtttgaatatcaaagctaatatgtgagtgatttccctgccaaatagcacaagtagcctttcctgggtgtttatgggcatttatctggttaatgattcccatcatagtgctgtcacccatgccattgctaaacttatacagtaacttttttgttttcacctcagcatatgttgagagtaggaaatagataggactatgccctcaaattttacgtttatatgatgttaatcctaaaggtccttgtgacttctgaagtaaaaactcagtgttgtcattttacttactgaattgttagctgagtttagagttgagtttacaatggagtaaacaaggtgtttagtttgatgtatgcttttagtctttcagaaaaaaatgtttatacttggaaagaatagtttatttacccatctggcctagtttagacaaaaacacagagtcaaatgtcaacagaattctgaagttataaaaatgacagtgtggctttttttttttttaaccttccacctggtgcttatgcccaagtgcctagctttctttagctctcaactaataaaggtaatgtttagataacatttaacgttaagttgcattgtgtttatgatcacatatctcaaatattggtacacgaaactgtacaacaaccttttttattagattttcctacgaaattccttattatattccctaagatagctttttcccaccttcttcttccttctcccttctcaggtgctccaataattccaacccctgcagccagtgactttattatatctttttttaaaaatctaaaaaaaaaaattgatgcaaccaggaagaattttctcatttctctccaccagttgtaccagcctactgcacctctcctcatgcaccaccttctgcctgtgttcttgctcctatattcaggagcaagtaatatgcaatacctccctctttgtgggatctttctcattagcataaaaatactttcccttgatctccagctactaccccatttctttgacctacatatagcaaaatatttgagaaaggaccactttccatcttttcctcaatctacttccatttttttctcaatccactttcatttcattgttctcctcaacccattctttccacaacctacttcattttatttccatcagccccataactcaggatcaacatcttgccagagccaatttccttgtctcccttaacagctccagcagtatttatgccatggacaaattattcttcttgtgatactttctctcttgcttccatgacactactcccacttcattttctttctacctctctggctcttccttggtcccttttcctggccccttctctctttcagatctctaaacatcagctatatctcagccctgttctactgacactctctagctgttattttctaaacccatgtttcagaaaccatatcttgatgaatcttggaaggccgaggcaggcgaattacttgaggtcgggagtttgagaccagcctggccaacgtggtgaaaccccatctctcctaaaaatacaaaaattacctggccgtggtggcatgcacccagctacttgagaggctgaggcacaagaatcgcttgaacctgggaggtggaggtttcagtgagccgagatcctgccactgcactccagcctgagcaatagaggagactccgtctcacacacacacacacacacacacacacaaagaaaataaaccatctcttgatgaatcataaatttgtgtctctagtttagacctctatcctgctctctaaatgatgtatccaactatcatcttgacaccatcatatgttcataaaacataattatagaatatctttcagtaggcttgacattttaaggcatgagtttccgttcagtatctccttaaaatatacccagggtctcaggagactattcaaacaggacaaagcttctattctacttactaatgtgtctggccctatttggcaggttggataaaaagtcatctgaacattgtcactttatgaataatatagtttaatagtttgtgaatcacccctgcaatttaaaaaatagtaaaattatcagaatctaatttaataattcctattggaacaccccatgttaggggatttccagttatttcaattgatatctcaatgttttaaaaattgtttatttctattactaattcactctttattttaacataaattgtggctatctatctctattcatttcaattatatttctcataccattctatagatggggtgaaaagaaaagtgttaattttttaaaactccatacctcaaatactatatgaatttatagttgttattgctaaagcaattatcttacatcttttcctccaaaacaaagttatgtgctggtttattttctttgtactcataagatgccttccatttttagtaacataagtcttgtctttctcctattcttagctacttaagcattatgtagcttaaataagcactaaagattcctatctgtatgaaaaaataaagattaaataaataagatctagaaagggtgacaaggtgatgcttcaaaatgaaccataccaagccatctagcgattgataaattactcacactcataatcacattgttggaaagaagccattgacaattcagtttgtttcacaactgtctatcacatagtgagcacaactaaaagactactttttgtcttttactgcttgttttgttgatcaagtgactgattgtacaatgaccaacaagaagtctgatgtgtagagaaaaggggaacctggcttttctgccttactcctgatgcctaattctgagcatgtgaatattattctgtttctttaattctccaagtgaagcagcagataaaccatccttgtttccattagctgtctaccctgttcaactgtgtgtttctaataacataagaataagaaagccaccagggtgagcagggaaggcaatgagtctgcaaggcttgtggatagatttctgttagtgaggctctagaaagttcttccaagattgatgcaatctgagaagagttttctgtcaatacaaactccctgggtttctcctttgtccttttactgcctgtgtttgttttgggttccagtaaagatcaagtgactgattgtaccatgaccaacaagaagcctgatgtgtggagaaaaggggaacctggcttttctgcattactcctaatgcctaattttcttgtactgaaagtagtttttgctgtaagaatctgaggggaggagtcatttcttcaatttttttttttggtctccttttaatggtttcttgatcatgtctatccttatttttctgttttcacaaatttttgtggtatattttcctctcatgacctctgtctcaagacttctttccatccatctcttctcatttcatcctgtagagtgtctgtggtaagagccctgcattctactctggccttgccatgtgtggccttgggcaagtcctagcctccttgagggtcttatttttctcatttgtaaaatgaaacagtttgatgagaagttttctaaggttccttcaagctttgacaatctctctcttctggatctttttcccatgaaaaatttcaactcttgattagcatgtaggcagggattattccacatccttataggaatcacatttctgctactgtccctgaatgctagagtccattgattaagttattcactgctgcaattgtcagagctgatcaaagaactctgaaccagtgtgttactagaactaacaaagaaaatgccattatgatgttctagagtcttgaattagtagaagaggtttaataagaaccctaagggattgctagaatgttaaaaacaaacaaacaaaaaaaaaggttgaaaagtttagaaaattcactggtctttgtgcccatcattttacttccagggtttagataatctcatttttgcaatgaaggaatggattagatcacaagttctcatcctagtagcacatgcagaatctttataaaaacacagagtagccaggtgcggtggctcatgcctgtaatcccagcactttgagagcctggggcaggtggatcacttgagaataggagttgaagaccaagctggtcaacatggcaaaaccctgtatctactaaaaattcaaaaattagccaggcatgatggcacatgcctcccagctactggggaggctgaggcaggagaatcgattgaacccgggagatggaggttgcagggagctgagatagctccactgcactccagcctggtgacagggtgagactccatcacaaacaaaacaaaacaaaagaaagcaaaaacacagattactcagggtccactaagaccagtgaagtcagttctcttggtagggggcagggtgactgagcatgatgtttgtaattttaaaagtgctccaggtgattctagtgtgtatcaagcaagacttgtgaaccactgaactacatgctaagactcattttagctctgattttctgtgagtcatagcagagggctcagcaaactttttctataaatgctaagatagtaaatattttcagctttgtgggctgtatcgtctttatgacaactcaactcagtctttgtagagaaaagcagctgtacataatatgtaaactaatgggagtagctagatgtgtcctgtgggccatagttttgctgactcctggtctatgtcatagaatttccttttgaattgatggaccaccagcaaatgatttttgtcctgtatcaatcaatgatacatacataaatctctacaagacatgtaaaggatgaggcttaatgacagagtactttggggaagacataatattgcaaaattaagatgcttagagaaaaatcatattaaaatagtgaaaactgtgagaaggtattttgatttgttgttttggattcctctttttgcaaattcttttgaaatattttcagtggaagctacatagatccaattgtattcaccaagctagattgtaattaagctccagagtaagtaatagatttgatgagtgatgtccaaccttttacatggaagagtaagtttgagtcttcctttgcccattgacacacttagtaccatgtttaccaaagttcttagttattgaaatgggcaccagcatattttgaaacgttggtgttaacttgggatatgccttttgtcatgttgcaaatagattttgtttctgttttgtgaagatcaccatctctgtcacttctgatagaaaaagtgacactgacttctcaagtgatttgacacaggttaaaatatgtaaaccatttctgtagagagcaagctgtaataatatactaaagggctaggtttatagtataatataaataactcatttatgctgttaataatttatagcaacatggcatttgactgactttttatgtgctctagtcatgtaagtaatagatgtggaaacatagaccagagtttcaagaacatgttttgggcagagtctgttttcttgctattatctcttaagtttatgttcatggcctaaagattatgctaatggatctgccttggtcttgggtgtcaggtctgtgttagcgagtattgaaaagcatagtttttgcctactgggaaggatttatgatttaaaagccctaaatctccccttttatgtacttcatacttagaaaatttttcctgtaaactgtgtgacttttttacattgtgccagttttctagatgactctcgtcatatttatttcttgcaatccttctataactatcagttatgaagtctctttatagtgttgccagccaggtctcaggtgtgtgaaatgtattttctattatggattttggggtatgatggcacatagtttgggtgttaatgcctaatcttgatgtactggcttctgaacaaccaaaaggatgaaaggaaatagaacaaatatttttgtgagggagaggagtctggcttcttgacttactctagaaaaagcctgtaagcctcctcttccctccttgtcacacaaagtgacaaagaaaatcaagaattgttttcttcttggcttaaatgcatcccttataaagtaaggctgagatcaggctgtgaagctatctttttgtcaagactgtcataattccaaaacactttgttcttctaatgcttaggttagtaactttaaacatttttataaagatagtgaggtccagttttaaggattgaccccttctcaaggggctcagaagaggttttggagaataataaaattaaataatgaaaccaataatttaaaccagatcatgatccttaagaaaaaatcccatcaaatttgggctaaactctaatatacagaggtctgcacaacttatgtcaagtattcttccccacaaatgaagaatggggttcattgtgtcattggttgggtctcattttggcttcatcttctatttctcaaagtctaagaaaagtgctcctacggaagtgggtgttggctatcatgagactttgctgctggcaggccagcttgctgctctagacagagatatccctcgatcctccttggacaactcttttctgtgcacaggaagcagcaggctggggttaaggagtttgccaatccagtcattctgataattgctgaatatgaatttctatccagcacaatctaggtagctacaatggcacagtagtttttatgtatcaggtgaaaatgtttaataggcactctaaatgagagaaaaggttaagtgaggttaaaagctcaatgaaaacaaatagatgagactaaaaatagttcaataggttgtaacttccatctcatccaaacagcaatgaatattttgaggctgaggcgctgaggggtaaaattgcagcctggactacttgctaatgtagacctacagcactgtcattcttactgcacagacactgctttctgcataggaggtagaataatgaattcatttattattaacaaagatttattaagtgactgcatggtgctaaccactagatggggagggatgttttgaactgtccattgtttgactataacaaggaacgctttgaacgaggttactatcataggcagaatttgtttaacatgaagcctatgagacataagccacaggtcctctcacgtgcaggaactcctttgaaggccctatacttaattttatatgcatagtttggatttggattcttttttttttaagagttccccaaattacttaagcttcaggctccacaaaacctggatctacccctggtagcagctatgaatctttgactatgaaattaagtgtacaagaaatatgactttactttttctgtgattgagtttattttctatttgagcacgcattccactgagtgaaagaaataatatcattgaattcagagattttgctgggttctaagtggagtttacagaatgccatgatattaggaattaaggagtgtgttgccctacatcatcttttgtccgtgctcactgtctctgaggcactgatgttcctatgtgacctagaggggcatggtccaggtagatggagtctgtccttgttctcactgtgagctctcgcttgctgacccttcttcagtttcttccatgcccctgaggggtaaaaagattcaaatctgaagctatatcaagccatctgtgcatagacattccaagcaaccatgttcactctactgctcccatgtcatgcaaggcacaggaagcttcactatggcatgagtatttcctgggctttgccttggaattgaggcacgggcctcctttgttctaaaattccccaaatctacttgaggatagaaccaggatttggttgcaaggcagaacttttcttagaggacctggtatctaaaccctcttgttacccccatttatggaccccatttatggggtgaggagagtgactgcttctaatccatcataatttttgtctatggctactgtttttgcatagacactatgttttgagtccttaggctttggcttttggcgcttaatggccaatattcacatggctcaaaattttcaaatgatccatatctgacttgagtttcaaaagtcagtttttgaaacttaaatgatcagaattgatttgttctgctctggttctgatgtggcctctccttccagaggtactggaggtagaatatccaaggtggaaagcccacgactacaaggaattggttagtaattcataatgttagctgtccacatctattcagtaatggcatttcagtggctgcacaactgaccatggtgaaagtgtctgcacaagccactttttcttcctgtcagaaaatgttctcacccactgaattgaatgactgtctgctcatatgctgtgaatgagtgcccagtcttaagattaaatcacacgttcttggctatgcatatttgggcatgctgtggggagttataataggctgtcttagagtcacattaagcagctagacagacaatgagttggaaagttacattttctaaatttgattggtacattccatttgtcacatttgacattagaagttctggattcaccctctatggtgagcttcactaatggagaatgtaatttgcaatgctcaaacacaagtcctaaacagaaaacattgtatgttacattccagtgctaccaaaatagtggttttgaaagtccttattttctaatactactatgtgtaattttgagtcatttagatagcaacagttaaatgttttatagattgtttggaagtattaaaatgtgaaggatttttgttatatagtgtctttcctatcttgcttaataaaatataagtttagaattgtgtatagaattaacatgcaaaaatatcaagtctcaactttatacagttaatctacatttgtgtatacccttcaattatttcaagagagggatactattcttatgcaggataaatacaataagatattttaaatgaattttaactacatctctggcagtttcatctcaatagtagttgtaattttatctcccagaccttattatagactagcagctctctatgaaaattagtgacagtgtgagtgtattttaattcaaagttaatcaagaatgactgagtcaagagttagctacccctgaaagtaactcataattcagaatttaaaatattacatgtggaacaatcatgactatatgccttttactttctctatcattatttaggttgtgggctttgggtccttttcacatccgttaacagtgggcttgacttcaaaggattattttcttgaatcttgaataattgctgaagacaatttgaagatattttcaagatgaaggaaactgaagcacagaatcactagagtgaaaaaagaacttcacaaacagtgcaggcttgatcaatggcatgggaaaacaggcaatacagttagaattgctaagatggaattttaacgttcaattaaggatctatctctaaactcctctgctttatccaccaatcattccatattaaagatgaagaattgttcccatttcaccttttgataaggaaaaatagaaataacagaagcaaatacacttttgcccacatttttttccaaaaagaataatttttgaagtctaaacgtttggtgtaaataagatgatgtgttaatattgtaaaggaaagctagttaagtttttgactgaataaagccagcatcaataattactagtaagactaaaaataagagcagtaaaattgtgtctaatcagctactaatatctgggaaggattgagccacaggatcaaagatggtatcttttaaaaatagaagttgagtgaattcggtcttcaaattctttctttttattcatttatatttatttactcattagtatattcattcctttattcatgtattgttcaaatatatattgggtacttattatatgccaagttgtttttaaaatcacattccaaattcccgtaagtcataattattcagagatgtatgttttttttaaaaaaaattgaacacctttaaaaattatcaagtccttttatttctgtatgcattaaagataaactttactaaatgttacatgaatagatttataaagcagataaatatttaatttcaaatataacccttatatgcaattatattttccttagcactaaaaatgaatatttaagtaatttatattaaaagtgtaattatttaactgcagatgtatgccaatgacttaaattgtttaaagattatagcaaagttgtttaaaattgtctaatcatgaagagttcacttaaccacctggttgacacataaaattatagttagttactaaggtagttcgagagaaagagaagaatcttcagtagtggttttgaggtgtggtacattttattataatataccggttatacagcattgtgcagtgctgctcatagtagaaataaattttctctttgatgtcatctattcccttgtgtggcttacataactgagaattaggtgatcacaaaaataaacaggcctatacagagcccatttatataagtcctggttatttctcttcagttaaacttttaattatatccaattatttcctgttagttcattgaaaagcccgacaaataaccaagtgacaaatagcaagtgttgcattttacaagttattttttaggaagcatcaaactaattgtgaaattgtctgccattcttaaaaacaaaaatgttgttatttttatttcagatgcgatctgtgagccgagtctttaagttcattgacatgccaacagaaggtaaacctaccaagtcaaccaaaccatacaagaatggccaactctcgaaagttatgattattgagaattcacacgtgaagaaagatgacatctggccctcagggggccaaatgactgtcaaagatctcacagcaaaatacacagaaggtggaaatgccatattagagaacatttccttctcaataagtcctggccagagggtgagatttgaacactgcttgctttgttagactgtgttcagtaagtgaatcccagtagcctgaagcaatgtgttagcagaatctatttgtaacattattattgtacagtagaatcaatattaaacacacatgttttattatatggagtcattatttttaatatgaaatttaatttgcagagtcctgaacctatataatgggtttattttaaatgtgattgtacttgcagaatatctaattaattgctaggttaataactaaagaagccattaaataaatcaaaattgtaacatgttttagatttcccatcttgaaaatgtcttccaaaaatatcttattgctgactccatctattgtcttaaattttatctaagttccattctgccaaacaagtgatactttttttctagcttttttcagtttgtttgttttgtttttctttgaagttttaattcagacatagattattttttcccagttatttactatatttattaagcatgagtaattgacattattttgaaatccttcttatggatcccagcactgggctgaacacatagaaggaacttaatatatactgatttctggaattgattcttggagacagggatggtcattatccatatacttcaggctccataaacatatttcttaattgccttcaaatccctattctggactgctctataaatctagacaagagtattatatattttgattgatattttttagataaaataaaagggagctgaaaactgaattgcaaactgaattttaaaactttatctctctgtggttaattgcaaacacagatacaaaaatatagagagagatacagttagtaaagatgttaggtcaccgttactaacactgacatagaaacagttttgctcatgagtttcagaatatatgagtttgattttgcccatggattttagaatatttgataaacatttaatgcattgtacaaattctgtgaaaacatatatataggatgtgcgaaaagtccctgtgtatcatgtgaaatggcttaaaacagaacaccataggtattcatatcagtgaataccataggtagctgaaagtgttttttcctggggtcgccaagatgaatgccaaaagtgatatcattattataaacaatagccagaataggttggtataaacctggtagaaagccttgataaattgactttctctcctcctgacatcctgccacccctttgctttgctgatgctcatttgtccactaaattaaactcaagcaagccctagtaaagtaatagaatttgtggagtcctcattagtataggaagtttccctgatgtgagattagtaattagagatgtagcaaaatgagaaagaagtaatatgcttagatatttcattttctctgaacctgtatatacaaaataggccatgcgtgttcagtaactattcactgcaaggcactctctaggtactttgggggaattggaaattactcacataaggctatggattgtgccatttgtcaaaagacaaaatgacaacaaatttagtttaaagacctcagtcagctttattttctattctagatttggacagtccttcatttcacaaattggagtaagtgttccaataagttgagcaaaggagcttggctttatagacccaaaaaaagggccaaaggaagcagaaacaaagaacaataagagaattggtcatttcaaagttacttttcttgaaaggtggggacaaggagacagaataatagaaaagtcactgattggttaacattggattaagaattaaaacagaggaaactttaagattgaagtttgaaactgacttgtttgggaaatcaggctgtcttctttcttgatttcttagaaggccggataacaactgagttttgctttggtgaacatgggtgactccatttttacttttagtctggtctgttgaggcctcgtgagagagcttaatctaaaacaatgacttcctataatttttgtttgacacatccaaagagggactctaatatttattgagagcttatcatatcttaagtactgtttaaacacttttatttgctattacatttgatcttattataactctaaaggcagaaatgattgcttttattttccacaatggaggaaactgaggttcaattaagtgagtaaggaagcagggatcttaaacccagataccattgctcctctttaaaggtggaagaacagaaaacatggggcaggggaagagagaaagtttctgtcccaggacatgataatctaaaagggaaaacgtaagatccactgaaacctgaggcagatttattgtggcaataacaaagcttaagtttcacagaccttcatttgcctgagccaactttgaaggccatgtatctaattttgtttttataattctataatctttattcttgaaaagagccctccctccaaatttacaagctttgggcccccaaaatccttgaaatgcccttgaataagagatatccaggtaaatgctatgggaattcagaggaggaagcagttagtatcagttggcggagagttaggctattaagagaaggttttatataggaagtggcatttagaatgaagctttgagaactgagctgtgtatttgaacaagtaaaggtggtgttgcagaattttgctccttagttctattaaaaacccgggttcttgtcacatgatccggaaaatttaggcacacagatacattgaagcatgagtagagcaggattttattgggcaaaaaggaaaaaaagaaaactcagcaaatcgagatggagtcttgctcacagattgaatcccaggccaccacaaaggaactgaagagatcgggcttctcccctgcataaggtgcaaattccccatggctccacccacttccccttagtgtgcatgtggggctccagtccacggtgggcatgcccagacaagccttgggcaggttccctcatctgtgcaaaagcatctgatgtaaacacttgaggggtggttcggagattctctgggacccttttattttcttatctgcctaggcatttggctgtctcagtgggtgggaaagggtgctccaggcaaagggcataacatgaggcaaagggcatgcacagaaaacagtgactggttcagtcaggttgggggatgccaaaggaagtaatgggagacaagattggagcaagatagataagagattgtggattttttttcttttttatctatataaatacagagacagggtctcactatgttgcccaggctggtctcaaactcctggcctcaagtgatcctcccacctcatcctcccaaagtgctaggattacaggcatgaggcactgtgcccaacctccaattttggattttgagagctaaagcaatatagtcgaaaactcagataatccaggtagattttgctattaggtgctatttggttcctggtacagagctaaaacccttggaatttcctaagtgataagagctacaggagcatcttttgttatatgtttccccccctagttcctgaaatagctctagagaaatacaggtgaataacatcctttgttattcatatcaagcccctatcaaccataccccagtttctatttatgaagtggcttttgggaagtccctaaagacaggagtggggaaaggctggttgtcagggggatgggttgaaactttcatcttccccccttgacctccagggagggatgagtggctgaaaattgtgtaaaatcaacaatggccagtgatttaatcaaccatgcctatgtaatgaagccacccgataagccttaactggaactttttggagagcctccaggctggtgaagacattgaggtgctcagaaggtggtattccagagagagcacagaatctctgttccccttcccacattcattttgctatgcatctctcccatctggctgttcttgagaggtatccgtttataataaactggtaacctagtaagtaaactgttaccctgagttctgtgagccattctagcaaattatcaaacctaaagagttcatggatacgtgcaatttacagatgcacagtcagaagcacagatgacaatctgggcttgccattggcatttgaagtgtgttgggaggcagtcttacaggaatgagcccttatcctgtggggtctatgctaataacagacagttgtcagcattgcttggtgtcgaaaacccacattgttggtgtcagaagtattgtcagtaggatagggaaaacagtttgttttctttttttagtggtctttggtcatctttaagagcagggcttctcaaagtgtggtccttgaaccagcatcacctgtaccacgtaagaacttatgagaaatgttcattcttgggccccaacaaagaattaaaaattctgagggtgtgaacggggtctgagtttcagcacaacttcccgaccatgctgatgcattcttgcccaagcatgaaagccctcccttgtttaagaaggccattagggccgggtgtggtggctcatgcttgtaatcgagcactttgagaggacatagtgggaggatcacttgagccctggagttctagacaagcctgggcaacatggcaaaatgctgtctccacaaaaatcacaaaaattaggtgggcgtgtgttgtgtgcctataggcccagctacttaggagactgaggcaggaggatcgcttgagcccaggagattaaggctgcagcgagctgtgatggcaccactacagcctggatgacagagtgagacactgtctcaaaaaaaaaaaagaaaaagaaaaagaaaaaagaaaggaaaatgaaaaagaacgccattaggtataaaggagcaatggtaaaagaccagttgcaaaaggttagggaatgggtggttactgaaataagaagctatgtagaacactagtgttggtggcaggaagtagaaagcaagagcactgctctgtgggggatggtcatagcaaatgcaatatggaggcatttgcctctgcactgaggagaaaactatcttttccaagataggaggaaaggagataagtggaattaaagagaacctttgagcacagagttgggaaactgaaggtatttgtgttgtgctccctcaatcttttaattcaactataagctaaacccatgaaacttgagtagtttcagttatctgacttttttcttctcttttgatacagtgttggctattctgggtcttttgcctctctttatgtacttaagaatcagtttgccaatgtatgcaaaataactggctgggattttgattgtgattggcttgaatctatagatggagttgggaaggactgacatcttgacaatgttgaagcttcctattcatcattatgaaatatttctccatttgtttgattctttgatttcttttatcagaatttagttttcctcatatagtcttttaaaatattttgttatattttgttcaagtattttgtttttgaggaatgccaatgtaaatggtattgtgattttaatttcaaattccaatttttcattgctgttatataggaaaatgattttttttgcatgttagccttatatctttcaactttgctataatcaattattgatagtttcaaggattttttggtcaattattttgaatcttctacatagattatcatcatctgaacttagttttatttcttccttcccaatctgtatacctttatctccttttcttatttcattagctaggacttccagtatgatgttgaaagtagtggtgagaggggatatcttggtcttgttcttgatcttagtgggaaaacttcaagtttcttatcattaagtatgattttagctggagggtttttgtagaagttttttttttttaagttgaagaagtctccttctatttttagtttgctgatttttaaaaagaatcaggaatgggtgttaaattttgtgaaatgcttttctgcaactattgatttgagcactttatttttcttctttggcttgttgatgtgaagtacattaattgatttttgaatgctgaatcaaccttttgtacctgagattaatcccgtttggttgtggtatataattatttgtatacatgttgagttcgatttgctaatactttttgagaatttttgcattggtgttcatgaaaaaatattggtgtgtagttttttgtgacatctttatctgcttatggttttaaggtaatgctggcctcatagcatgagttagggagtatttcctctacttttacatttgagaagagattgcagagaattagtaaaattcctactttaaatattttgtggaattcaccagtgaacccatctggacctggtgctttctgttttggaaggtcattaattattttaaaatagatataggcctattcagattacctattttttctcatgcgagttttagcagattgtctttcaaggaattggtctatttcatttaggttatcaaatatgtcaacgtagagttattcatagtattcttttattatccttttaatgtgcaagggatctgtagtgatgtccccttttttgttttattgatattagcaatttgtgtcacatcttttattttgctttgttagccaggctagagatatctctatttttgatgtttttgatgaaccaactttttgttttattgattttctctgttgatttcgtgatttcaatttcatgatttttaaattatgcttacatttgatttaatttgatcttcttttgctagttatccaaggtggaagcttatattgttaagatccttttgcattcttatgcattcaatgatgtaaatttccctctaagcactgctttttctgcatctcacaaatattcatgagttgtattttcatgttcatttagtttgaaatatttttaaatttctcttgatatttctcttttgacccatgtgttacttagaagtgtgttgtttaatcaccatttttaaaaattttctagctatctttctgttattgatttctagtttaattccattgtggtctgagagcatatattgtataattttaatttttataaaatttgttaaggtgtgatttatggcccagaatgtggtctatcttggtgaatgttccatgtaagctttggaagactgtgtattctgctatatttgaatgaggtagtctatagacatcaattatgtccagttgattgatggtgctgttgaattcaactatgtccttactgattttccacctgctagatctgtccattctttgcagagggacactgaagtctccaactctagtagtgaatattctatttcttgttacagttttatcaacttctgcttcatgtcttttgatgctttgttgctagaaacatacacatgaagaattggtatgtcttttggagcatgacccatttatcctcatataatgcccctcattatttcctcgccctgatgtctgttctctctgaaagaaatatagcctctccaggtctcttttggttggtgttaaaatgacttaactttctttatcccccttacttttagtttatatgtggttttaaatttaaagtgggtttcttgtagacagcaaatagttcagagttgtttttcgatccactttgacaatctttgtcttttaattggtatatttggactattgatattttaagtgattattgatatagttagataaacatctactatatttattactgttttctgtctgttacactacttgttctttgtttatatttttattgtctactctttttctttccattgtggttttaatcgagcattttatatgtttccattttcttttcttagcatagtaattcttctttaaaaaaacattttttagtggttgcccctagagtttgcaatatacatttacaactaatctaagtccattttcaaataatactaaataatttcatgtgtagtgcaagtaccttttaataataaaacactcccagttccaccttccagtctcttgtattatagctataatttagttcacttacatatatgggtatacctaagtatatacattatcatatttatgattgaatatattgatgaaattattttgaaaaaactgttatcgttaaatcaattaagagtaagaaaaatagttctaattttattataaaatgaaataccttcatttattcattctctaatacactttctttctttatgtagatccaagtttctgacctgtataattttccttttctctcttcagcttctttgaacatttcttaccagccagacctactgacaacaattttccccaatttttgtttgtctgatagagactttatttcttcttgacttttgaagaataattccacagggcacagaactctagattggtgatttcttcccctcaaacccttaaatatttcattccactgccttcttgcttgcattgtttctgagaagttagatataattcttatctttgcctttctataggtaagatgttttttcctctggcttctatcaagattttttctttatgaacatgatatgcctttctttttgaacatgatatgcctttctttttgaacatgatatgcctttgtgtcggattttttttggcattattctgcttggttttctctgagtttcttggatatgtggtatggtatctgacactaatttggaaaaattctcagtcattattgcttcaaatatttcttctgttcttttttttcctttattctccttctggtattcccattacatgtatgttacagtttttgtagtcatcccgctgttttggatattctgtttttttcagtttttttttccttcgcatttcagtgttggaagtttctattgacatattctcaacctcagagattctttcttcagctgtgttcagtctaccaatgagtccatcaaaggcattttacatttttattacagaatttttgacctatagaatttcttttgattccatctttgaatctccatttctcttctgcttttcatctgttcttgcatgttgcctactttttccatgaaaacctttagctttttttttttttctttttgaggtggagtctcactgttgcccaggctggagtgcagtggtgtgatcttggctcactgcaacctctgcctcctgggttcaagtgattctcctcctcagcctcccaagtagctgggattacaggtgcctgccaccatgcctgagtaatttttgtatttttagtagagatggggttttatcatgttggccaggcgggtcttgaactcctaacctcaagtgatctgcccaccttagcctcccaaattgctgggattataggtgtgagccaccatgccctgcctttagcatgttaatcatagttgttttaaattcctgatctgttaattccaacatccctgtcatatctgactgtggttctgatgcttgctctgtgttttcaaatggtgtttttttttttttgccttttagtaagccttgtaattttttattgaaaggtggacatgatgtgctgggtaaaaggaactgtagtaaataggcctttagtaatgtactggtaggtgtagcagagggtgagggaagtattctgtagtcctatgattaggttttagtcttttagtgagcctgtgcgcctgcagcttggaagcacttgtgaagtgttttttcaccccttttggtgggacatagtgactagtgtgagcgggagttgagtatttcccttcccctaggtcagttaggctctgaaaaaaccctgataggttaggcatggtaaaatagtctcttttgagggcaggcattgttataagaatagaatgctctggggccaggtgcggtggctcacgcctgtaatccccgcactttgggaggctaaggcaggtggatcacctgaggtcaggagttcgagaccagcctggccaacatggtgaaaccccgtctctactaaaaatacaaaaatcagccaggtgtggtggcacacacctataatcccagctactcaggaggctgaggcaggagaactgcttgaacccagtaagtggaggttacagtgacccaagattgtgccactgcagtctagtctgggtgacagagcaagactccgtctcaaaaaaaaaagaatgctctggcatatttgaaaatggttacttttccctttttttctctgatcttcactgtgagaacctggtaagcatcctataggcaaaattcataaaagtatagaagtcggccagtgacttggacccacttggaattttcttgctctcacatcatgcacactgaatctccagcaatttttcacttacagtttaggttttcctaccctactactggttctctcagaggtttctgcttattggtttctgttttgtaagttgtgattctctgtacctaactgcctgtctcccattttggggggcagtggtttgccctgtgacctcacttctctgacagatctaagaaaagttgtttatttttcagtgtgctctgctttttacttgttacgatgaagccaaccactttcagaatttctacaaaccagatcagaatctggaagtcctgtttttttattttttttatccctttgtttagcatgttacctatcttaacacattttaaataagtgaatgcatagcttatatctacttctaggttatatgcttccttagaataggaattgattcttaaaatgtcgttctgctcacgcctgtaattccagcactttgggaggccaaggcaggcggatcacttggggtcaggagttcaagaccagcctggtcaacatggtaaaaccctgtgcctgcaaaaaatacaaaaattagctgggcatggtggtggccatctgtaatcccagctactagggaagctaaggcatgagaatcacttgaacctgggaggtggaggttgcagtgagctgagatcgcgccactgcactccagcctgggtgacaagagcaaaactccatctcataaataaataaataaataaataaataaataataaaaataaaaaaataaaataaaacaaaaattttattctgagcagtctctgaagaatataaattctactgccttgcctttagaacttataacagcatctcgcaaactatcacaagatgctccaaacatacttcttatgtgctgaattaagaagtcaactcaaatttagtatactagtaatatttttggatatcccaaaacactgccagctcagctttaggctgcccttcttgggggggaaaaaagcagttgaaatttaggacttaagtgggcatctcgtttaatttttaatggatttctatgttgttggttatggtgaagaggtgaaaagaataaatattctgtgcagaaaaattattcagtcttcatgtgaaaacactttgtccatagcaattactttatgaaaaagatgtggtattactttctttgctcttaactgagacctttaatttaaagaacctatactttacaagtttttattttcaatgcatgaaaaatgtagcagctatttcacaacctttacttttaaaatccatttttctttttaatctcaaatagttttttcttaaaaccttttgactttttatctaaattgtaatagccagagcaccttcccacaactagaatatctcatcctttttgtcttttctttttcctctcaaaatgcctactgggaacttaatttggagtcagattcttcatgataaatctggacttaatcaaaattcctcatatggtatattgtatatatcacagtactggatagtcctctgattaaatagatatttgatagtactttaaggtctatacttttggatgaacttaactgctttctccatttgtagtctcttgaaaatacagaaatttcagaaataatttataagaatatcaaggattcaaatcatatcagcacaaacacctaaatacttgtttgctttgttaaacacatatcccattttctatcttgataaacattggtgtaaagtagttgaatcattcagtgggtataagcagcatattctcaatactatgtttcattaataattaatagagatatatgaacacataaaagattcaattataatcaccttgtggatctaaatttcagttgacttgtcatcttgatttctggagaccacaaggtaatgaaaaataattacaagagtcttccatctgttgcagtattaaaatggcgagtaagacaccctgaaaggaaatgttctattcatggtacaatgcaattacagctagcaccaaattcaacactgtttaactttcaacatattattttgatttatcttgatccaacattctcagggaggaggtgcattgaagttattagaaaacactgacttagatttagggtatgtcttaaaagcttatttgcgggaagtactctagccttattcaacagatcactgagaagcctggaaaaacaaatcccggaaactaattattatgtgccagttatataaacaagaagactttgttgggtacaaaccagtgattccttgcctttgaaaaatgtgtcagatatcatgcattaccagcagttcaatgatataaggaaaccagagtaatagctaaaacctttaaagctaaaccaaagatttacaaattgcctcttcatccagtctttcccaacctaaaaactgagttctctaaaaattttagtatttttttctgaagaaaagggaacatggacatttatctaatcctcattagaaatctgactaatgataacaaggatttagacctcaagcacttcttaccaaaattcttgatatgaccttatagcaaattactttcacctgttgaactttcctttcttttattcccctgtacctcacctgcactgggcatattcaagttgcttatacaacactttactattgtgttagaaaaatcatgacacatgatgaatgtgtttgtgcaacatgagctgattcataaatgaaaatgtgcattgaaattccacaatattttaaaattaggagtttatctagcaattgaacaaaattgattaaatccattatttgttagatcagctaaattacataagttcattcatctgctcataaatccatccattcttccatctggctatcccttagtcaattcaaataaatatttatggggcactttgggtaagccaggtgctaagaattcaatgcaaaacaagatagactcccctgtccttgttgaacttatatttttggtacaaacaaaagcaataatcaagaaaaaataaaaaaagtactgattgtgattaataatatgaagaaattcaacagagtattgtacttaacatttgattgatctgattttctcagttgtctgagaacaaacatttgtgaaaatctcattgtagagttcttacgatggatagggggtcaactgtgtcattattgcttatcagcttatcccaaagacctagtttattaccagattgcaaatagtgttcaataaattattcttattaagggttgttatgtactctaaaacatttattgtggtcccttcactggttctggtttacaaacttacttttctatgatgacatagtatagaaattgagagtgaatatttagaagttcatttttattatatatttttgaagtattgatatgtagtgaattagaaatttaaaaagaaaacaaaactgtccttcactacagattgaaaagcattatactaaaagaccatttgctcagttatagtatataaaggccaaatgacttaaaaacaaattatgtaaggagaaggaaacaaccatttattcagtgccactaactgtcagccagttttttcagtggtcagttaatgactgcagtagtgttctaccttgctcaaagcaccctcctcaagttctggcatctaagctgacatcagaacacagagttggggctctctgtgggtcacctctagcacttgatctcctcatgcagtgcatggtgctctcacgtctatgctatgttcttatggtctttaggtaacaagaataattttctttcttttccttactatacattttgctttctgaaattcccttctcgccaatccaggtgaatgtcagaatgtgatttgacaactgtccaaagtactcattcactgaggagtggtaaggccttcgcccaacctgccttctctgggaatatactgctgcctgaacatatcattgtttattgccaggcttgaacttcaccaaattaatttattagggtcaacatctaaatattagaactatttcagattaatttttaagtcgtatccactttgggtactagatcaaattgcaggtctctgcttctggcttgagcctatgtttagagatgatgtgcatgaagacactctttgcttttcctttatgcaaaatgggcattttcaatctttttgtcattagtaaaggtcagtgataaaggaagtctgcatcaggggtccaattccttatggccagtttctctattctgttccaaggttgtttgtctccatatatcaacattggtcaggattgaaagtgtgcaacaaggtttgaatgaataagtgaaaatcttccactggtgacaggataaaatattccaatggtttttattgaagtacaatactgaattatgtttatggcatggtacctatatgtcacagaagtgatcccatcacttttaccttataggtgggcctcttgggaagaactggatcagggaagagtactttgttatcagcttttttgagactactgaacactgaaggagaaatccagatcgatggtgtgtcttgggattcaataactttgcaacagtggaggaaagcctttggagtgataccacaggtgagcaaaaggacttagccagaaaaaaggcaactaaattatattttttactgctatttgatacttgtactcaagaaattcatattactctgcaaaatatatttgttatgcattgctgtcttttttctccagtgcagttttctcataggcagaaaagatgtctctaaaagtttggaattctcaaattctggttattgaaatgttcatagctttgatagtgtttttcagaagaccaaatttacagtgggagccttgggcttttgttttttaacagctcttttttgttcctgcttcagtggcctgacctccaagttagcaatcgccaggttgagaaatgctttgcgagacataacagatgctcctgaaataacaaacacttggaatcatgaggtagtggaattgaaaatagaaagtgtagtgattgttttttgttatttggatgggatgaacaatgtcagattagtctgtaactatttttttttaatgtcactctgatttggtcacaaaggatctctagtctcattgccttagtatcattctacgaattagaatgtgttactgtgtaagagcacttcttgtatatgagagaaatagcaacagttccagtttaaagtgatataaatggaaaccaagaaatgtctttactgggaccaaatctggacagcatttactgtatttttgctggtattttctctagtctttccgggtatattcacatttaatgatcacttttctccctttgtgctaatggacactgaatccattccactaccatagttcttgctaatactactctactttttacacaaaattaaaatgccaggagcacctccaggtagactgactataaatctagactgaaaaaaaagcttgtatttcttaacagattaccttgtggaacatttgctcctttcaactaatgaggcactaaatattgtaactgctcaactggtgcttttaatttatttgtctagactttgtcatgttgccagaagctttatcctggttggagttttgaaaacagtattgtttcttcagaaagaaaaaagggattgtcagatgatctaaaaataaagaaacactggaaatacaagtatcccaaggtgatagcattaggcaagataaaaatgttgaaaagcgaaaaagaactggttgatagagaagtgttgttattcagtagaacctaagtcttgtggtcccatttttaatgaaaaatggtgaattttttggtttttattgttcttgttcacacaaatctgcccattagaataagccaagccctaaaaattaatttcagtttcactgggaatcctttagtttatctactatgtagtagagaggttttgttttattgcatgtttgacgtaggaacgtatatatgcaagacatggaggaaaaccaagtgggccagagttttgaaaattctttatcttttctttctgccaaagtgagtctcccaagtttgtcttttttttttcatttccactcttctatggtttctagcattatataaaccaaacaaaaaaaatacgttcagagattccttcagaaatgctggatgatcttgatatcgatgcttttcatatatgtgtttatgatgctggtttctggggctggctctcagtatcacaaagatgtctgtaaacagaatatgctatttcttctttgtgacaaattttgaacattatgtgaatgtccaagaaagagcaaaagagggcaaacttctcatacatttttgatgtcgaaaccaagagacgcttttattttcctaacttttctttgaaagttcaaattaagtaattttatcctgtcctaaagtttaaaaagaaaaaaaaaaggaagaaggaattaaaaatccaaagaaaattatgtttgtttgcttttctgtttttttcttccttccaactccgagactttgcaagggcatagttctgaagatctctgacactgagacattagagatctctgtatcaatggatcatttgttttcagacatatgaaacaggaactttgaacaagaaatttcccctctttttctcatagtgatcctgagacatcagctgtggaatcacaacacgtcattagttttggcaggtccttgcaggtgttttgttttgttttattaatgttcttccctcctgtagctagacagcaatcttggagaatctgccagcttggaagactattgtgtaaatttcaaggtggagcctcctttaatttgttctgtgttacctgtgagctgtgaggtcatgaagaggagacaatgaggctaatcatgagagccccattggtttaggcaattagaacaacaagatctaaaatggtttattagccttgaattgtgttaagcacataattcataaaaaacagaaaaaatatttttaaatgtatgtctaaatcttcagttacaagtttgaaaggtgacaaactattctgaggaaatgattaggcctattcttgcaacgagtctttatgatctgaaaagaatctatgtccacacataactcccacctcaaagatggggcatcttttgctctgggagatatcaaatgcgaccaaaacaagtgtttgtagatttgaatgatgattcagcagtgtagcagttctcactcattttataataattaacaacttaataattaattattaaactcctacatgcttaacattataagtatgataacttctgtggttacataaaagatatacatagcacttgtccttgatctgtcacagtgaggtcccaatccaacctatgagcttcaaatgaaaagttcaaaattacactcattgtcataagtcagagatcaaaggaagaaaggatttaaccaaaatgataaattaaatataggtgattaaatatagtcatggttcaaggcatgggccagttagggagtgtgatgtgggtaattatgaaaggccagctcccaagccctgttgttgctactcccccacatcagtcatccttcctttttttctacttctactgcagtgccttcctcatcttttcccttgcatccctccattatatgagtcatacaaattagacttttcaaagcaacattaacattgtgtgaatttggggtttttgactaatcccaacattccacccccacattccagtcccacatgggatttggagccttgtttataaacctggcacttctaatatatcttatcttagagtaatccttgtatttgtttaatttccacttagcattgtaaatacttgcaggtatcctagttaagaaagcaaggtttaaacacaaaatcatcaccaattaaagcaggctagataaagaatgtaatagaaatgctagataaaacagattttttcttactaagttttctgtcccttatagagtgcataacacaataacttgcttgataagaattcaatgtacattgttttgtgctgaatcactaaatgcttgatttctgtaacaagagattgtggttccatcagtatctggattttagtctgtgtaatcttaggcaagttatttgatttctctgtgcctctgttttcttgtctgtaaaatgagtataatggtagtaactaattcattgtgtttttgtgaggattaaatgagttaataactagtactcctccctggcacatagtaagtacaatatgctgtgctgtggtggttgttattattttttatagttccttgagcaaaagaaataatgtccccatcttagtataatattggaggtatataccatagaagtgaacaaaagaatatagtttcacaaagaaagtgataattaaggcggttcataaagggtcataaagcttgtagattttagaaatgtgggggcatgaggatgtggagagggtattccaggatgccagacagggagattatggataagtactaagatgagaactagaaaaagctgaggggcaaaaggtcagaggaggccacaagttagggagtattaggaaaaagaagttaatacttgacaagtgccaacatggcttcacgaggaatgggttgggcctttttgagtgaggaagaggctggtgaaagggtggtggaggacactgctgctgctgatggcatggggtgtaggtggcaggagaggcagggacatgagctaggaaactctccagctatgaagtgatgagtctggagtaatataaggacagtaggggtggagtgctgaacttaagggaggagagaaaaataattggtatggaagtaggtacaatgcaattttattatttctgagcctaaaaatgtgaaatttttgattatttggtcagaccagggaagtattttcttttatgctatctctgaaaatgtatacactaaaaagttgtagtataaaaaggttgtaaagcattaagtaattttagaggaaacaataatttggatattttacatgcaatcatttatatgcaaatatatgtaaatattacaaaattattctctatttgttacaaaccttaaatatttttgactgaggaatattttattcatctaattatagctactttgttctaactaatagatattcttgaaaacaaagcaacacttttttggagacagagtcttgcactgtcacctagacttgagtgtgttaccttgaactccagggctccagtgatcctcccacctcagtctcttgggtaggtggattacaggcccacactaccatgcccagctgtattagtccatcctttcattgctataaagaaataccggaaactgggtaatttataaagaaaataaatgtaactggctcacggttcttcaggctgtacgggaagcatagcagcatctgcttctgaggaggcctcaggaagttttcaatcatggcggaaggcaaataagaagcaggcatgttacacgacgaatcaggagcaagacaaagtgagggaggaggtgccacacactttgaaatgagcagatctcatgagaacagcgccaagaggatggtgctataccgttcatgagaaatccacccccatgatccagttacctcccaccaggccccgcctccaacactgggaattacaattcaacatgagatttgggcagagacacagatccaaaccataccaccagctaataccaaaaaaaaaaaaaattttttttttaagacatggtcttactatgttctacaggctggtcttaaactcctggcctcaagtgatcctcccaccttggcctcccaaagcactgggaattcagacatgagtaacagtgcctggccaatacttatttttaaacattctctaccataaacttaggatcttgatttgttcacattgaacagatttttattatacagattgaatttataagaaaatgttgcagacattgtcaaaaagggacgtccaaaccactgtgatatttataagcatttgggccacattttgatagaactatacacggagtgtgtgtgtgtgtgtgtgtgtatatatatatacacacacacattatttatatatatgtatatatgtatatatatatatgtatttatatatatatgtgtatatgtatgtacacattatttacctacctactgtgtgagtgtgtgcatatatacacgcacacacacacacacaaatatatatatttcccttctgagacaaagccaaacagcactgtatgcttaaagaaaaacagtcacacttcccacttatgtaatttatattacatccagtcaccacaccagccaaactgctttattgttttttgtttgacatccaatgctaaagcataatgcctgttgcagtgaaatatacatgagcaaccctgagaactcaatatagcctcacgtgttgccactgagttgagttgaggagtcaagctgtagcaaaaaggtttgtcaccgggtgagtaatggtgctcttatttttctctgggtctcaagaagtgctctttatgacatatatggcattaaataaatatcagatatttgcacatcctaactttcctattggtgaagtttcttaaaagagagataaagggccattgtgtgattgatagtttcaggtatatttttgctgcacagtcagtccgagtgtaccacgtagggcaaaccacgtaacttctcagggccttgactgtttcatttgtaaaccagagaaaaggacttgggtgacctccaaagacctttcaaatttggagatgagtttgtggaaagttcaaacagtttagaaaacagaactaagacacccactggcacccctggaagcaagagagtgccaggtactatttgtaatacaggaatgaaatacctaattgtatgaaattgaattctaactgaaccagtttgttcagttaaattttttttttcaattagagtgcttacttcagtatctaacactagacagtaaactgtagacaaaagacctacagaatttctgaatggtatcaaattcaccacacttaaaactttgggatgtctaatttcaaccaacagctttctttcttcataatgttgaatatatgtgtatctattttagctaaatttaatatatatcaatatactttgatagatattttatataaactattagactatagtattatgagtaaaagacccaccatttcccaagcaattataaagaacgatcaaaattttaatgggttgttagtattatttctttaaagattgtgatactgataaatatttggccacattttaatagaattatacatgggatgtgtgtgtgtgtgtgtgtgtgtgtatatgtgtgtgtgtatatatatatggcagtagagatatatatatctacacacatctagatatatatatacatgtatatctatatatacacacatatatctgtgtgtatatatacatatgtatatatacctacatacatatgtacatatacatacatgcatatatctgtacatatatatatagtgtgtgtgtgtgtatatatatatatatatatatattttttttttcctgagccaaaacaaaatactaggttgtaatagctgttctttcagaaggaagaaaaacaacatgtgctgaactctgagtttgatgtttttgtattttacttcctattttcatatcagtccatttatttattcaggaagaatttattgagcatatattatgaacacagcttttgctaaggacagggtatgcagcagttatggcctagtaggagatatggatgttaaaaacaaaatgctcacaaatgcacatataatcttaatactcattgtaagctatgaaagcagagtgtgagtattatgagaccatatgttgggagattttatttggtattgaggatcaggaaagatacccctgaggaagtgatatttaatttgaaacctaaagaaagcagttggccatgggaagaaggtagggaatgagattcccaagcaataggaatccaatgtgtgaagaagctgagggagtgaaagaaagctagtgtggtggcaggaagaaagagaagagaatggagaagggcactaaatgagtcagagaagtaggaggggctaaaccatgtagggtcgtgtaggccatcttaaaggcctgagtgtagtggaaaacctttgaaggtttgttaaaaggtcaatgaaatgttctaatttctgttgtagtgaattgctttgattgctgaatgcgaatggatgggtagagatgcaagagtgaaagggaagaaatcaattaggaggctcttgccctgctccagataggactgataattaattttatttgggaagatcagggagaaagataagtcatgaatgactcccaagtttctggattgaagaaatgaaggtaccatacactgagatgggaaagcctaggggtagagtagctttgagaagaaaggtagcatttccccatttcataaaacatggaagaacaaagaggctggattcctgtttgtagacataccttccaggccagaactgcattactacaacatctttgcaagccacattgcctttcataactctgtgtcagtgttgatgccgtaacatctttggccttccccctaccatcctcccgcagtcctccatgataatgccattattccgtttcaaattgtgtgcttccattggatgtgtgagtctccttgaaagttataatgaggctgtagcccatatgaaatgcttcaactcaggtcctgcataggaagaggaagctaatctctccaggaactgagcctgtggctagagggatggataattgtttaaataaagaatatgctgctgagtactgatgggctctttatgtacccatttggctgctgctgcccaacctttaatctttcctgagctttaaataggaaggaaaaaatggtccacaaaggatttgagccattttgctgtggtgatgaggagcacgggtttagagacaaacactcctgtgtttgaattccagctcctactatctcctagctaagtgaccttggacaagtcacttaccttctccaacctgctgtttcttcatgtacgtaataggatttacctcatgaggttgacatgaagattgaaagaggtaacatatagaatgagcctgtcccaggacatggttcatgataagtctgccataaatgggagctatgtgtcccacccttttggaggagataactgttctgtagcaggtaatatattgtttgatacttggttaacccttacaattatcatttcctgttcttctcaataatgctagaaaccttttatttaaagaaccacaatataaaatgaaaaatatataaaaaaagcaaatggaaaaattctattggcaaggctttttaactttatatactaaataaatccaattgcttaaataatgaactgactcaagttctcagcactgcttcttgtttaattctctttagtttttcagaattctccaataatgacctttgtctactctcttcagtttattcagaaattacttttatttacatagaagtttggaagtggatacacaaacatatccctcacatatcttatgatcctatgagtcatatactcatctcttatattccctctgtaaagcaatgtaggtacctttcaggaaggtgatttttatgtaggttgagaaatatcagcatggaggtcctagctgacctctctagagagtttctgagacatttgacaacaactttttctttaagtcatcagttatgccccggggtatgaaatttctaacatgatcctcagtaaacttggctgccttgctgaggatactctccatctgcctgagagacacagacaccattaattgggaattgacttgacttgtgtggttccttgtggaccagatggccactaaatattctcatttcaaggcaattggtaaaaactacacttcaagaaatttcattcttaattccccttagtggatgttattaaccaaaggcaaaagaaaaaaagggtaaaaaaaatattctaaatgttaatatcaaaaatattattttcaattcaccccaggcacagagaactaagtattattattgctattgcaccggcattccccaatgagacagtgattttcttttaagacatttttaaataatataggcagaattaagtagacggtgatctggtaagtagatgtttcagggtaacagctgtgcaatgctccatgcagggaattagattgtcattttattccttaccaggaacatacattcagttaaacaattatttgacttctgctcttccactgatttctaagttgaggctctctcttgtgcctgtctgatcagataagtagagttgtgccttggtttatagatgagataaatgtgtatttgaataagcataagttaaagaaattttaaaatcccttaggaagctaggcttatcagagaaatccaaggaaatacattaacaaactaggaatttgttctaacaggttaattataactcataaacttattgggtttttttaccttttaattttatattacatttgcttataataaggaatattgctaggaataaaattttttaatattctacaattaacaattatctcaatttctttattctaaagacattgggattagaaaaatgttcacaagggactccaaatattgctgtagtatttgtttcttaaaagaatgatacaaagcagacatgataaaatattaaaatttgagagaacttgatggtaagtacatgggtgtttcttattttaaaataatttttctacttgaaatattttacaatacaataagggaaaaataaaaagttatttaagttattcatactttcttcttcttttcttttttgctatagaaagtatttattttttctggaacatttagaaaaaacttggatccctatgaacagtggagtgatcaagaaatatggaaagttgcagatgaggtaaggctgctaactgaaatgattttgaaaggggtaactcataccaacacaaatggctgatatagctgacatcattctacacactttgtgtgcatgtatgtgtgtgcacaactttaaaatggagtaccctaacatacctggagcaacaggtacttttgactggacctacccctaactgaaatgattttgaaagaggtaactcataccaacacaaatggttgatatggctaagatcattctacacactttgtgtgcatgtatttctgtgcacaacttcaaaatggagtaccctaaaatacctggcgcgacaagtacttttgactgagcctacttctctcctcactggtatggctccaaccatcaggccctatcttggtccatttaggctgctaaaataaaataccaaagactgagctgcttataagcaatctttggaggctgagaagtcaaagatcaaggtgccagcaggtttgctgtctcgtgagagcatacttcctggttcattgatggtgctttcttgctgtgtcctcacataatggaaagggcaagacctctctggtgtctcttttacaatggcactaatcccatcatgagggctttgttctcatgacctaatcacctcccacatgtcctacattctaatactatcaccttgggggttaggattttaacatatgaatttgaggaggtggcgggggggacacaaatatttagaccatagcatttcactcctgacctccaaagttcatgtcttcttcacatgcaaaatacattcattccatcccaatagcccccaaagtcttaacttgttccagcatcaacttacaaggctaaagtccaaggtttcatctaaatatcagctaaatcagcacaaacagctaaatcaggtagagtgggacttaaggtgtgattcctctttaggcagattgctctccaactatgaaattgtgaaatcaaacctattatgtactttcaaaataaaatggtgaaacaggcacaggctagacagtcccatttcaaaaaagagaaatagaaaagaaaaaaggagtgacaggtctctataagtctaaaactttaaggcttgagaataatttgctttgctttgcctccaggctcactggggtggtgtcttacctctggacacactggggtggaggctctatcctcatggatttgagtgtctcattctttgtggcaggtctgtgctccaatcccacacctatggctccctgagtgtgcaattgcatgcctggtggttctactggtctgggattgcataggtggcccagccttcatagctccactgggcattgccctaatgtgggctctatgtggtgacctcacccctgggcctctacctgggccctgtgactccctgggttcttgaaatctaggtggaggcagccatccccctacagttgtgctgagtgtagtgcatgagtgctggggtctgctagagctatacctagggtggtggagatgtatggcaatggagtatggggagctgatatggtttgggtgtgtccccacccaaatcttgtcttgaattataatttccataatctccatgtgttgagggagggacctggtgagaggtgactggatcatgggcatggttttcccatgctgttcatgtgatagtgagtgagttctcacgagatccaatggtttcataaggcagttttccctgctcttgcaccctctttcttgcctgtcaccatgtaagacataactctttcccttccgccatgattgtaagtttcctgaggccttcccagccatgtggaactgtgagtcaattaaacctcttttctttataaattacccagtctctttacagcaatgtgaaaatgtgctaatacaggagcaaagactgcagtgtgaggtggcaatgtgaagtctgcaatgtgaggtggcacggggcagttgtagcccctcctttgaaatctttcttccctaccccaggcctctgcactctgaactatgatgggaaaggcagcttggaagatctccaaatggctttggagtcattcttccattgtcttggactataaattctggcttctgtttaggtggctgactaatatccccactgtctgaatgcatagcacctagtttctgttgagatggctagtccatagtaatttacttatcaaatttggccacaccctttgtattctctcctgagcaggctttctcatctttcacaatatggataggctgagaattttccaaattttgaagttctgcttcccttttgatcaataattccattttaaagtcatttctcatcttgaattttactatgagcagtcaagagtaactaagctgctccttcaactttgcttggatatttcctcagtcaaacattcaatttcattgctttcaagttctgccttccacaaaacactaggacacaaacagctcagccaagttctttgacattttataagaaggatagcttttcctccattgtccaataacatgttcctcatttccatctgaaaacccatcagattggcctttaccgtccatatttctgggaacattctgctcatgaccacttaggtattcggtaagaagatagtagctttctctatagctctcctcctctctggagccctcaccagaatggcctttaattgtccattcacagcaatgtaggctttttctagcatgtacctgaaaactcttccagcctctactcattaccttgttccaaagctgcttccacattgagtatttgttacagcagtacccagatcccagtaccaatattctgtcttagtccattggggctactacacgatgtcttataaacaacagtaaaatttatttttcacagttgtggaggctgggaagttcaaaatctggtgccagcagattttgtgtctggtgaaggccttcttcctcacagatggctgtgttctcactgtgttgttacatggcagaagagtgggcaggctagctctctgggatgtcttttataagggcagtaatccaaatcatgggtttagggtagagccctcatgacctaaatcacctcccaaaggccccacctcctaataccagcatctttgaagttaggatttcaacatatgactttggcagggggacagaagctttcagtttatagcaaaccctataggtagcactactttgtcctttcctaatcaatttgcgtcaatgaaacatgaattagaagagacctaggcgactccactatactgggattattcccagtataaattatcatctctccacaccttctcatctactccctatctgagttctgaagctctccactacaagaaggaggctttggtttgacttgatatacttctctgggaaacaggtttagcataaaacagtgatgctcattctagaacacctgcaaatgacaatagttttctttcgaagtcgccaggaatcgtctgcctttgggtatgtggctgtgagcactgccgggcaaaatgccatatgacctagatgaggcatatgccatcctttgaagccattaggacattatataggaaatatattaactaaaatggaataaaattttctaaataacaccttatgtttatccaacaggtggttcattatacttgagagcattatacagaggaatttgatggggaggagagctggagaaattctcgaaattctgggtttctttaacagaatactctagctataaacttataattttaaaaaataagcattatattaaagaaaagggaacataaattattttgttttattaaacttaagtccaaaggtctggattgtggcagaataggatcaggggacctaaaatgttgagcctcaaaggtcttcttagagaacaactgtattccactattagcgcttttggtccttttagcccaatttctgtttatcccaaatgttcttcccttttctgccttccttcacagtggaccctgccaggagctttgaaatgcctgtgagtgttaaacacttacccattgagtgcccaaccttaacatgcccctaataaaatgtacttagattaaccgttttcattatcaaagtttccttattacccaacaaacacaggcgctttaaagaaaacattaactaaattgcaagtgacacattttaagatctttgatatgacttcagagaatgcactataggaacacaatgcaatgggagggaaacttgggagggaagacattagcctttataaaatctgcaagtattgccaaatcaaaataaaatttacaggaaagcaggatcataaatataatctaaaatcttagaacctgtggttatgattttaaatactaatacaatgcaaaatttttacctgtttaggtttttatttcatcagttcatatttaggtatatacttttactgttctccttttttataatttaccattcacaaagatgatgatgttagtctaactttaatgtcatgagtgctttgagtagtagtgctaagtttttgttgagtagtagtgtgcttttttgattagtagtgataggtttttgatgagtaagcctgctagcagcatacaaacaaacaagcaagtatcagcctagagaagcagaaaaggcatttgggtttcaaagtcacaaggcctaggctttagtctaatacagctgataatacaatttgtccaaacaggacatttttgggtgtgtcaaacactaaactggacaggacattatgacaaaagtgcaaagcaggactttccggggcaaaccaggatgtatgtcatctcactgagtcctctctttgtccttgccatgactagtatctctagaggtaaatgaacagagtaatgacaaatagccagacacctgaatcttatcccaacagcacctcctacataattccccattatcccaaatggaaattaaaaatatatacagtgataattccaggccaagaaatgctttatttctagcttggacttggcttccatgtccagtgtagaatcttatccttgctgatctggactgtatctcatgaagccatgacttgtacctagttactagctggaaggcttagaacaaaagctggtccagagagcctcctttttccttatttcctgggtccacacctttaccatggcagtctgcctatcatttgatggaggaatttaaagcaagtccaagggaagggaagagagtttctaaaatctagaacttggatagtttaatttacctatcccaaaacagcttaggcccagacagcttctctccaagattggtgccaaactgaaattaccagctgtgtagaccaaagagaatttcaaaagaaactgaatcccaagagaaaaaaaaaagacttctggcattgtggcccaataaattggtaggattgttgtgacttttcaagtttacatgtaaaatgggcccagcgcagtgcctggcaaatatgggtactaagtaaaagtaactataatcatgtttttttaatctggacttcacttggtcatcctttaaatggtgtctgacagaatcctagttcttgtctcactttacttagtttccctgggaaatttcatgtgtccttttggctttaattaatatctctattttgatgacctccattatctgcctattcccagagctttccacctgatatctcagcacatgaaaagcaccttatgtcaataagtgagttccttccctgccccaccacatacctgtcctgtgttcctaattccactgaatggcatcccatcctccagtttcccaaggccaagacctgggactcatctttcactctcaagttcctccacgggtacccacatgtcacatcctgtcaatgctgtccctggggagtatctgaaatatattcacttttcttcatttccacctgacaccactattaacacttgcacaaatttctgaggttcctggctcatttccctcattgacccccaatagttcattctgctctttgcagctctggtgatctttccaaaccccacatctgatcacttgtttcttcccttcatatggctccttaatgccttctggactaagtccacactgcttaaggtggcttaccaggtccttcatgattttgtctttgtttggctttctacactcactgcccaacttccccttacttcccatgattcagttatactgaatttctttggttctctaaagcacatgtgctttctgttctgcagaggcttttttgttcacttgctattctctacctgggaaactcccccagcccttcactgcctccttctaccatctttcaggcctctccttacacatcacttctttccaaaaatctgccttgacactccaggtctcggtttcctaggtgtaccctataactccacccctttcatagcatttctcactctggctggagatttaccttttaacttgtccatgtcccccactggagtggaagttcctggaggtcagggattatatcctattaattgttgtatttccagtgcctagagtagtcttgcatacatggatggtattcaataaatattggttgaatgaataaggagttctttcatttcatatgtaatagatcatggaaatagccttgtgattgatacacagcaggtattaccatcctcactttagaatgaggactcagagccttgagatgtctgagggccttgactgggacagctggcagatgcaggagcagagctgcatcacccctgtgggctatctcagggttgtctgtaatctaagtacaatgtctgttgattttggactgaaggctttttgggtaattgtttgctttttcaatacttataaaatagtttccatccttactcattgatagtaaggttagttattttagaaaacaagctaaatagcagaaatagtggccttttaagttgaaaatttaccctgaaaaatctacagagtagcaaacagagtatcaaaaggagttgactgtatctatttttataactgccacttatggattattcagtaaaaccacaattcacttttatgattttttttcatgtttctctgtcacaagagcaaactcttgctccataataacattccagaatacagcaatagcaaaagtcaacattttgaatcctttacaaactcttagacatttttttttttttagtttaacatgttacaaaacaaaatttcttcttttttcacagcagtttgggaagtacatactatttattagctcatcagcatgaagctggaaaattctttttcctaaagttctttatatctacaaactgttgatgttttcatttatttatttttaatgctacgttgtaatgaaaatcattggaaaactttagattctagtaattttgaagtcttcttagtttggacaggactgagctaaagtttgtactttttttaatttattgaaaaatggtttctaatgatagtattaacaagattatattgggggcaggacgcagtggctcacacttgtaatcctagcactttgggaggccgaggcggttggatcacctgaggtcaggagttcaagaccagcctggccaacatgtagaaatcccctctccactaaaatacaaaaattagctgggcatggtggcaggcactgtaatcccagctacttgggaggctgaggcaggagaattgtttgaacctgggagtcggaggttgcagtgagcccagatcgcaccactgcactccagcctgggcaatagagcaagattctgtctcaaaaaggaagaaagaaagattatattggggatatatatgtgtgtgtgtgtgtgtgtgtgtatatacacacacatatatatatacatatatacatatatatacatatttaaaggataaaggattctgctgccacagatcactaaatcagatgatctctagcaatttcctgtttgtttgttttttgcccatagtgcttatctctttgaacagtaattttccacttactatttttctccccttttggaccataatttcctttaaggcagagcctcctgttactcatctttgaatctggggtctgtcagagtacctagaatttaataaactctcattaagagccagttgaaagaatatatgactaagcagtcatttacatccaaaagatccgtaggagaattcttatcagcacatgtgattggtaacaataactttgtacttttcaaaaacaattactaatctatcttgctttccattatctcaccaaaacctattagcatgtctggcagaaaatagatacttaataaatttcttaaatgtttactgacttcaattttaagttttattaactatgttgacttttctctaatgaagatgattctaaaaagctttttactatacttcacagtgaataaaacagtgagataggaatattgcaaaatgtcccctgtgttggtcagtcttagtgtcattcattttaaaaattctgttctctaaatattgacagttatatataaatttatgtaattgtttacttctaataaagaatttcatctggggaaaaacatactttgctcagctctttgccacaagtgcaaagtctaagacagtcaaatagctttcctagtacggccttaggaacttagtatatgactggtgtgaatctagagggagcatactgcattctgaccaaaatctccaccctgttactatggccatcactaacttcgcagtattgcagtacttcctgctagcttagttcccaaggcaacttgtgaaggaaaatttttacaaagctgttgtcacacaaaggtagtgtttcagttcctgagcccatgtccttggagttgcccaggctccaataatactaataattactgtacattaggtacttaccatgtgccatattctgtgggagccgctttccacaaattatctctggtaatccttgtaacaaccctttgacatcaatattattattttctccatttttttacatatgagataaatgagacttaaaataatgtgcctgatatcatcagcaaatgagctgaggagggcagattcaaagctgattgtgtttgactctagagctgcagtcttaagccagaccttttcttgctggttaattttactgaaaaaaaaaaaaaaaaaaaaaccctcaaatactgctgattgatctaaagtactaacatttctatcagtgttagggaaattttaattttataatttgattttgtgagaaatttatagcatcttgaatactcacatgcaaagtgatatgtcttagataacattttacaatggcagagcttaagccagtgctcagtcattcattcatcctcaagttttgattcatttatcattcatcaaaactctgttttgtttggccacccacattctaggagctcagtacatatttgataaatgaatgaattgttgaggttgacagttacccaggactggcattaggaacacagagctgaagagcacgtttttaccctcaagaagcttacagtctaacgagggaacttgcacaaatactactatcactaggtgcctggttgaatggcttaagagatgatcagggatattcagaaggatatgtcaggctcagcaatggcatcacttgagagcatcaaggtgtttagggaactacaagatgtttggttctgctgggaataagagtgaagggggctccatttggatgcctcatacaccaggtgagagatcttagattttattccaccaggaggagaactaccataggatttaaaacagaaatgatatggtcaaacctacatcttaggaagatccctggggtgtttgtatggtggacttgcaatttgactaattgagatttgtaggatgattcttaagagatgatgatgacccagactgggatcactataatagagttggtaaggaggagaatgatttaaaaagtagttggaagaattctagggatggagataaacatttgaaaattattaacttataggtggtcatcaataccctgaaaatgactgggatctcagaggagagtctggagagttggaaatgacaaagactaatattcaagggggcaggaagagggagagttgttcacacatgacaataggaagaaatggccatagagtgtgtggtttctctcaagccaaggaatagatgttttaagaaaggaaaattcttgtggtgggaagcagtagagatgacagatacacattaatttcttgagatttctagatgactaaatgggcagatgttgaatgatagctaaaggagaacccagaaacaagggagggattttgtttttgttttttaaaaaagatagaccatagcagcttcatagactgaaacaataaaaaagttgaaggcacaaagaaagacacaggtcctctaactccctgcccagtgccctttattcatattctcagcacttgtatttctaagttttatgtttgagtcttcggggatacatcagagtagtcccccttgtctaataaatgtgtttacatttcctgccataccagaaacccttctcaaactttaatgaatttctacaaggtgagattactttaatgagaaaccaaccaaggaaaggagtatcatctgcaatatactttcaaatgttttttgcttgtttgtttcttgtccagctaaaaaaaaaaaaaaaaaacaagccattggtcctaacacaactttcatattctaccccaatatcaaagaggcttaaaatctcctggtcgtgtgatgggcacacagttaattttttgtgaacaaacacagtgttatgggccatttctgaatttatctctgaaatcataagattctttctgagccattatctcattctatattacagtcaggtggagcccatcttacctcctcatactaaattctagacttctcaagggcaggagacaatcatctgtatatctctttggccttcatacactcaggagtacttgccaaaaataaacatttaatgcacatttatttgaataattgataagatccaatacttcaataactttgtcatatttttatagaatgggtttctatatctcatttgcattttcaaactttacttttactgtctagctttaaaaaaaaagcctttgactctaatacagccctcatattctaccccaatatctaagaggctttatatctcctagtgttgtaccactattttaactccagtattttttacttcatagttttacctatttgttacagttagtttttatgaattcaagagatgaatagcaattttccatatgtaatttaaaaaaccccacagttgactattttatgctatcttttgtcctcagtcatgacagagtagaagatgggaggtagcaccaaggatgatgtcatacctccatcctttatgctacattctatcttctgtctacataagatgtcatactagagggcatatctgcaatgtatacatattatcttttccagcatgcattcagttgtgttggaataatttatgtacacctttataaacgctgagcctcacaagagccatgtgccacgtattgttttcttactactttttgggatacctggcacgtaatagacactcattgaaagtttcctaatgaatgaagtacaaagataaaacaagttatagactgattcttttgagctgtcaaggttgtaaatagacttttgctcaatcaattcaaatggtggcaggtagtgggggtagagggattggtatgaaaaacataagctttcagaactcctgtgtttatttttagaatgtcaactgcttgagtgtttttaactctgtggtatctgaactatcttctctaactgcaggttgggctcagatctgtgatagaacagtttcctgggaagcttgactttgtccttgtggatgggggctgtgtcctaagccatggccacaagcagttgatgtgcttggctagatctgttctcagtaaggcgaagatcttgctgcttgatgaacccagtgctcatttggatccagtgtgagtttcagatgttctgttacttaatagcacagtgggaacagaatcattatgcctgcttcatggtgacacatatttctattaggctgtcatgtctgcgtgtgggggtctcccccaagatatgaaataattgcccagtggaaatgagcataaatgcatatttccttgctaagagtcttgtgttttcttccgaagatagtttttagtttcatacaaactcttcccccttgtcaacacatgatgaagcttttaaatacatgggcctaatctgatccttatgatttgcctttgtatcccatttataccataagcatgtttatagccccaaataaagaagtactggtgattctacataatgaaaaatgtactcatttattaaagtttctttgaaatatttgtcctgtttatttatggatacttagagtctaccccatggttgaaaagctgattgtggctaacgctatatcaacattatgtgaaaagaacttaaagaaataagtaatttaaagagataatagaacaatagacatattatcaaggtaaatacagatcattactgttctgtgatattatgtgtggtattttctttcttttctagaacataccaaataattagaagaactctaaaacaagcatttgctgattgcacagtaattctctgtgaacacaggatagaagcaatgctggaatgccaacaatttttggtgagtctttataactttacttaagatctcattgcccttgtaattcttgataacaatctcacatgtgatagttcctgcaaattgcaacaatgtacaagttcttttcaaaaatatgtatcatacagccatccagctttactcaaaatagctgcacaagtttttcactttgatctgagccatgtggtgaggttgaaatatagtaaatctaaaatggcagcatattactaagttatgtttataaataggatatatatactttttgagccctttatttggggaccaagtcatacaaaatactctactgtttaagattttaaaaaaggtccctgtgattctttcaataactaaatgtcccatggatgtggtctgggacaggcctagttgtcttacagtctgatttatggtattaatgacaaagttgagaggcacatttcatttttctagccatgatttgggttcaggtagtacctttctcaaccaccttctcactgttcttaaaaaaactgtcacatggccaggcacagtggcttacatctgtaatcccaatactttgggaggctgaggtggggggattacttgaggccaggaattcaagaccagcccaggcaacatagtgaggccccatctgtctttattaaaacaaaacaaaactgtcacagcttctttcaagtgatgtttacaaattccctatggtttagtcacaaggaagttctgaggatgatgtatcacgtcatttctgttcaggcttttgagcctcctggaggtaaatggtttccttactgaaggcttgttattaccatgattatcactaagcttgaagtaacaaattaggggggcagactcacaacctcttgccctgccatggacaagttcaagaatctaagtaaagtcctctattgtctgatcttggatttgctcaacctgaacaagccaaggaggtgtattaaactcaggcacatcctgaccaatttggaattcttaagcttcagatcactgtggaagaggctcaactctttatggtgctgtagacttacgctcattttctaggtaatttataagggacctaatattttgttttcaaagcaacttcagttctactaaacctccctgaagaatcttccagctgctgagtagaaaatcacaactaatttcacagatggtagaacctccttagagcaaaaggacacagcagttaaatgtgacatacctgattgttcaaaatgcaaggctctggacattgcattctttgacttttattttcctttgagcctgtgccagtttctgtccctgctctggtctgacctgccttctgtcccagatctcactaacagccatttccctaggtcatagaagagaacaaagtgcggcagtacgattccatccagaaactgctgaacgagaggagcctcttccggcaagccatcagcccctccgacagggtgaagctctttccccaccggaactcaagcaagtgcaagtctaagccccagattgctgctctgaaagaggagacagaagaagaggtgcaagatacaaggctttagagagcagcataaatgttgacatgggacatttgctcatggaattggagctcgtgggacagtcacctcatggaattggagctcgtggaacagttacctctgcctcagaaaacaaggatgaattaagtttttttttaaaaaagaaacatttggtaaggggaattgaggacactgatatgggtcttgataaatggcttcctggcaatagtcaaattgtgtgaaaggtacttcaaatccttgaagatttaccacttgtgttttgcaagccagattttcctgaaaacccttgccatgtgctagtaattggaaaggcagctctaaatgtcaatcagcctagttgatcagcttattgtctagtgaaactcgttaatttgtagtgttggagaagaactgaaatcatacttcttagggttatgattaagtaatgataactggaaacttcagcggtttatataagcttgtattcctttttctctcctctccccatgatgtttagaaacacaactatattgtttgctaagcattccaactatctcatttccaagcaagtattagaataccacaggaaccacaagactgcacatcaaaatatgccccattcaacatctagtgagcagtcaggaaagagaacttccagatcctggaaatcagggttagtattgtccaggtctaccaaaaatctcaatatttcagataatcacaatacatcccttacctgggaaagggctgttataatctttcacaggggacaggatggttcccttgatgaagaagttgatatgccttttcccaactccagaaagtgacaagctcacagacctttgaactagagtttagctggaaaagtatgttagtgcaaattgtcacaggacagcccttctttccacagaagctccaggtagagggtgtgtaagtagataggccatgggcactgtgggtagacacacatgaagtccaagcatttagatgtataggttgatggtggtatgttttcaggctagatgtatgtacttcatgctgtctacactaagagagaatgagagacacactgaagaagcaccaatcatgaattagttttatatgcttctgttttataattttgtgaagcaaaattttttctctaggaaatatttattttaataatgtttcaaacatatataacaatgctgtattttaaaagaatgattatgaattacatttgtataaaataatttttatatttgaaatattgactttttatggcactagtatttctatgaaatattatgttaaaactgggacaggggagaacctagggtgatattaaccaggggccatgaatcaccttttggtctggagggaagccttggggctgatgcagttgttgcccacagctgtatgattcccagccagcacagcctcttagatgcagttctgaagaagatggtaccaccagtctgactgtttccatcaagggtacactgccttctcaactccaaactgactcttaagaagactgcattatatttattactgtaagaaaatatcacttgtcaataaaatccatacatttgtgtgaaactttgttgttttcagatgcgttcacttgtcatgtttcatcagtctctcactccaatttctaagcttcatggaacatgaaacacgaatctgtcttttagatatagcctcttttgagaattcacatgaattagaacacacatttttagttatctgtttaaactatggtaaaatatacataacataaaattttccattttaaccattttaaagttcagttcagtgtcattaggtacattcacatggttgtgcaaatatcaccatcatccttccacagaatttttttcttgcaaaactgaaactctttttacccgttagtcaataatcccgcatttatctttcctctaatgcctggcaaccaccattttactttctgtctctgattttgactactcgaaggacctaggagtgggatcatacagtatttgtatttttgtgcttatttcatctagcataatgtcttcaagcctcatccatgttgcaacatgggtcaattttcttccttcttaaggttgaataatattcattatagagtagtccccccttatccttggggaatatgttccaagacccccaatggatgcctgaaatcactgatagcactgaacctgattactgtgtttattcctatacatacacacatacatatgataacatttaatttataaattaagcacagtaatagattaacaacaataatcataaaatagaacaattataacaatatattatgacacgagcgatacaaatgtggtctctctctttctcaaaatatctcattatactgtgccacaggtaactgaaaccacagagagcaaaaccttggatagggggaccactctataaatatgtaccacatttttcctcacccattcatccatcactggctacttggtttgcttccactttttggatatagtgaataatgcttctataaatatgggtgtacaaatgtttcttcatgtccctgctttcattacttaggatatgtttgaagttatttttatttttaaatggaggcttatagaacacaaaagatttatattctgcaagtgtccatctatttcttttaaagcttattcaaaaagtggtagctatctcatagctcttggtaagttaaaaatcttcatcaacgaaaatactatttctgcgttggcacctgcatggattttctttgtccaaatccctctttttaattgatgaggcttctttagttcctttttttcttccttgttgagcttcttcatgaaatgtgcagttgctagcatgtggtggacggactgcagatccctactgaatgccaggccctccggccctgtgttctctttcttggagaggtttgttttcacacgtaaccccaagagggcagtctcagagcgtgttctagtctagttctttttttaaaattactaaactttattttttttagggcagttttaggttcccatcaaaattgaacaaaaagtatggagagttcacatataacttctccatacatgatagcctcccccattcaacatcccacactaaagtagtacatttgttacaactgtgaaagcaaatagaatttcaagaccccaagctcactatgccaaagggcaagttaagcttcagagctgaattactcaatattgccttccttttgttccctaacagccgtaacttcacaatcttgtgtgatagcctcatccataaaccaggttcccacaatgatagaaggccacatatctccccaaatgacctccctcacaattgtgcccaaggaaaatccttgtgagaccctatcttttaggatacatatccctcctataaaatagccctaaaactgagttatgttgaatttcaccctgatgatgtcaattaccagcttgtcttcataggcacaggacgcgggcaagaccagaaatcatcgtgctgtctaccctgcaatgaacacataattgacttttcctttactccctctttttacctataaaatttggatttactgaacactaaccaaagcctcccctgaatagaaccatttgcctcactgcctaccctctatcctcttttccttctccgtgtttgcactttactctttaaatattaaagttcccaaaccctctttggaaaagcacaggtcacagatgctcctctggcttgtgttcttcctgggtgcatctgcaaactttggctaaacaaacctctatcgattaagacacctgcctcagtcactttttccttaacacaaccaatgaacctacattgacacattattattgcccaaacacaatagtttatattagggttcattattggtattttacatttcatgggtttggacaaatgtgtaatgacaagttaactaccattacagtatcttacagggtagtttcactgcccaaaaaatactttgtgctctgcatattcattcccctttctcccctaacttttggcaaccactgacctttttattgtctccatagttttgcctttaccagaatgtcatctacttagaattacgcagtatgtggccttttcagattggcttctttcacttagtaatatgcatttaagtttcctccgtatcttttcatggcttgatagctcatttctttttagtgctgaattatattctattgtcagatgtaccacagtttattcattgacctactaaaggacatcttggttgcttcaacgttttggcaattttcaataaagctgctgaaacatctgtgtgtgggtttttgtgtaaatataagttttaatttctttgggtaagtaccaaggagttcaattgttggatcatatagtaaaagatgtttcgttttgtaagaaactgccaaactgtcttcaaagtggctgtaccattttgcagtcccaccagtaacgaatgggagttgtggttgctccttatcattgccagcatttggtgtcctcggcgttttagaatttggccattctaatagttttgtggtggtatctcattgttatttcaatttgcatttccctgatgacatgatgtggagtatgttttcatatgcttatttgccagctgtgtatcttttttggcaaggcatctgttaaggtctttggcccgtgttttgatcaggttgtgtcttgttgttgagttcctttactggatttcttttgttagcatggtataactttatccatccctttattaatctacctggggctttaaatttaactaggtttcttatagacatcatgtaagtcttgctttttgattcactctcacaatctttgttttttagcccttgacatttaaaatgattattgatataattggattaatatctaccatatttattcctgttttctgtttgtttcctttgttctttattcctatttttactttccccatttttttgcctttttaaattttattgagcattttacaggattctattttctcaccttcttaacatagcaattcttctttttttaaacttttttagtggttgccctacagtttgcaataaacatttacaagtgacctatgtgcctttaaataacaatattccatttcatatcagtgcaagtaccttaaattacaaatttctagcttctgtcccttttaccatttcaggtattcatttcatttatatattagcttatatatatccctacacttgatttttcctcatatgagattttctttcctctttcccatttaaaaaaataaaataaactattatagccacagactttctatttttatttgttttctgtattgaagtcttgattttggggctttacttgtccctgtctatgcccactcctatctgacacacactttcttaatttatttcctagttgtttcactttgtttatcttcattatgaggaaaaaaagccaaaacctgaaatgaatatgcttccttccagtaaccagggaccttccatggttgggaaattgttacctattcgagtgaaaggctaataaaacccccaaggtaaatattttagtacttcactaaagaaagaacctcaaatactatgtggaagacaatttaaaatgaggtttaaagagctcaatataaaaacctgtttgacctgttaaaacaggtgtggacaatcacaattccctatttaaaaatacagtgaaaaaacctacaaatgcaagacaaatacattggagcatgagaactccaaattgttaggttaggaattagaagctgttcccagtgtgtagagctaagagacccaagtcattgtcagttgacagggagccgggactcaatacctgtgtactttctcagagaaaggagaggtcttggcaaaattttgggtttatccttaattccatacaatgggaatattcaattgctctttaatcactcagtattgatagggacagggggcagagaaattctaggcagaaaagggcgggaccctggtgaaaccccaccctcaatccgaaaaacctgaaactgccaccgaaagtgagaacttctatccctgttttcccactcgaatgttgcctttttctaaactacccgtggcctgctccacccccatcctttgcctataaaaaccccagactcagttggtagatgggactataactggacattggagagaagtggcttgacttcagagcgacagcttgacagcatactttggagaagaatctgagaggagaaggcaagacttcaggggaagattacctatctgccctgtcccctgttcagctctatttcccactgaaagccactttcatcagcaataaaatccctcatttaccatccttcaattcgttcatgtgacctcattttttctggacgccagacaagagcttggaggccacgagtatggatacaaaaggctgtcacactggctgtttgcccttgctggtggagggcagctgcctcacatgaaaaggcaaagagctcactgagctgttaacacttaagccttccgcagacggcagagctgaaagagcactgcaacacaccctctgggcctcaggctctcaggcactcctacctggttgcgccgctgggcccgcacagagtttgctactgccggcacctgaaagcggttggctggttcctgcactcgctcgttctggttcctgcacttattcattcgcacgctccctcccacaaggggtagacggggcgggatgggtaaatgaggcacccctgtctcaagtcccgtgaaggcgtcagggaaataatctgcttcagtttctctagttgtaaaatggttaagaacattatgaaaggtggtcaacaactttataagtgaatatgctaatgctggccttaattctaaaatgctacttggatcaaaagttatgattcagttccaatacatcttctattcattgaagtacagaatctgtacacaaagtacaattgtatcttcaaaaactgccaccttgtggagatttggttttattgttaagacagccagtgccaacaacagaaatgagtacagagcctcacatactaatgtaagtgaatctcaaagacattttatctttaagccattttgaaaagtagaaattaagcctgaatagttttggggcacaaattgctctttaactctcttctttcccattcacctttgtcactgatggaataatagaaggagcaatctttatcagcaatggcagatgtgctgataaatgaaaccaaaactgaattgacaaatattgacacaaatacttatagaagcaatttaaaaatctaccttgcaattaatccttatgaaatttaagtcataatttactaaaaattataatataaagaaataaactttctctgttttattaaaagaaaggatcaatacatttggccacaattgattggccataatttttgtcaatgttctataagctaattgaaaataagactattttaaatataattatctcccttctcctttgccttttcattggcagcaggtgccatgggcttattcatattctaaaagagaagttgtgtgagcaaatttgtcatcataggcaatcctcttgtaaggaaaaaattatgatttgatttttattttctcttatctcctaattgggtcagatactccagtgtcctcggggagccaaaccaggagccagtgtgtccttacacaaacacagcttccttcctgcttggagctcacaccaagcatttgcatttgaaccaagcaatgttgacaggctattgagccacagaagttaaacattccaagtgagcctgagacgaccattacattcttttacattttctggtcgattaaaattttaattgtttaaaatttcaaatagatacaaaaatagacatagagtataataaacttcacacccctgtcactgaacttcaatagttatcagctcacagtcaatcttatttcatctatgctccctcatgcttccctcctatattattttgtgcaaatccaaacagcatataactttagctctatgtgtctctaaaagacacggctttctctatcattctttttcttttgaaactgatccatattacctttaccagaactagaaaaacagtcatctttaatatcctcaaatattcactccatgtataaacgtcattgtcagttttttcccaaatataggtagtcctcatgttgcacattaatatggcactatgaaaatcaccatgcaagataatttaaataattaatgggggaaaaattgttccatgacctttaaaaatattaaaaatttaaaactttcttactgttggttataaacaatagggacacaaaaatagtgaaacatttagtaagtaatttaaaacattagaaacactgagaattaaaatgtttcttttaaactacttatcaagagtagtttgagcaatacttggtttcttttggttatgtaacttgcaatatgaagaaagcatcttttctatgcctgggcaagttgtcatactcctttctaatttaggaccagcttccaacattgtatccttcgtgacttcaatgttgtaaaatatctccaagagtttgtttaaggtaatgatttttgctgatgtcacctcctctggggcatctgacaggcattcctgctaggtcaacctatagcagagggtggaagggcccagagatggcaagagagaaaaggggggaaccttttagaggtgattaggctatgagggctctgctttcatgaatggattaatgccattacggcagtgagttcattataaaaggacaagtttggcccccttctctctctttcttgctctcttttggcccttttgccttctgccatgggatgacacagcacaaaaaccctcaccagatgctgaccccttgatactggacttcccagcctccagaactgtaagccaacaaatgtgtgttctttataaattaccccagctgtggcattctgttatagcagtacaaaatagatcaagacaaagggggattgcaggcaggaagggagcccctgacctcttagtttcactcatctggaatttagccactacaacacagagctggggcttgaggggataagaaatgctattgacctgcacttcccagggtgatagtacagttacaggctgtaaactcaagggagagggaatgccatcatcttggccacatcagcctggagtagagcttctatcacaccaagttgggggagggaagagggagcagcttgtgactgaagtgccataaacttttgttcttactgagattagtatattttctggaataaacgctgctgcttttgctgtatgtgcttagggccattttcagagactttaaatgattgataattgttaccagtaatggttattttgatgggtagttggtccacagagctcctcaccttgctgttctagaaattgtcttttagcttagtattaattcctgaatttttcagtttttctgatcttttacctccaggatgactctttgaaacaactctaaattattgactgaaacttttatgtataattctcattttgttcttcacacaatctctgtgaaggaggttctaagaactaagaggcttagagagggtaaggatcttcccagaaattacacagcactcccagatttggaacctttagaaagtttatatacttattggaaaacttagctcatttttaatcagagggaagtcattttacagtgccccatacagggagtcagataactacttcctagttaggttttcctctctatagagagtcaaccagccctgctgtactttcccgtgggatctgaaactgcagaaatctactgagaaaaacagaatgctcacagcaggataaagctcatgttttctagagctactaagattcaggcttatgcctctgtgtttgattttttaatagtcttgctaatgtcaaagtgattctatcttacacaccccaaagtctgtaaaggtataataacaaggggtgagattgtcttaaatctgcagtttcttgatctgtttagtgggctactataggttactgcaggacctctcaaggtttctagtatgcaaaggtgcattttgactctgtaagagtggaatatcatatgtaatgtttctcaattgatttgtctacataaccgtattttcttgtgccatttatatcctgtgttttggggaaggttggcctagaacatttattctaaaaggaaagggcatgggaaattcttaccattggcagtgtcggggaggaaaaaatgcatacttcttacccatttagtttattttgctagtttacaaattaaattgagataagacagattaataggagaaaatcaactttaattatgtgtgtatacatgggagtcccacaaaaatgtaagactcaaggaagcagccagatgattgagacctatatattatcctgagctacagaaagggataagggtttggggcttttgcggggttgtggaggcaaattttgggaaggcgaggagaggaaatgtatgatcaataaacgttgccttgttgtgcagataaaagtgtcttaggtgataaagatgtttccaaagagtagttctcttcatggtacagatattttactcatgatcatttcctttatagatataaatttcctttacgaaagggggaattttattttatgtagttagtggagaagtcggtaaagagcttttcctgtattggctgattctcagttttttttagctcaaaatgatcaatatgccgaagtggcatgttctgaaatgacatattctgaatcctttcagctggaatatatttgtatatcaacagtgtttccatctgtcagcccttagggtctgcttatggaagatataagcacctggatgaccatgacgaaaatctggagattttgagaaaacactggtgcaaggctccatccaaaatcaattaaagaagaatcttggaagatggggttaggtcactgatagcttgaaaggcatcccaggtgattctaatacgcagccagttgagaagcacggatttttttattgggtttttcaggctggctgaaagaactgcgatgctcaggaaaccaggggtgcctggcaggagtttgaccggggagactgaagcctgtcaacagggacaagaacggtaggctggtgcctggcacctgagggtacttcagaggtgctcattaaaaaagaggaggggacatcaagcgagaattcttaatcagacattcaacaaattgagggtcgtctatgtgttctaggtgctaagaactcggcagcaaacaaggcaaagttctcagtgtcatggagtttacattctagtggatgaggacaaaagtaagtaaatgttaaaaatatatagcagatggtaactaaagagacaaagcagagaattaggttatttgctgtaacatcatcaaaaagtcattagtatggtggcaattgagcagaaacatgaaggaagtgaggaagtcagctgtgtgggtgtcttgaacagtgtttgaagcaaagggaagagcaaatgtaaaggcagaatcatggctgggatgttggaggagcagcaaggaagtgctgtgaatcttggggaaaaagaggtt

SEQ ID NO: 5 - DNA, 5974 bp, Homo sapiens
aattggaagcaaatgacatcacagcaggtcagagaaaaagggttgagcggcaggcacccagagtagtaggtctttggcattaggagcttgagcccagacggccctagcagggaccccagcgcccgagagaccatgcagaggtcgcctctggaaaaggccagcgttgtctccaaactttttttcagctggaccagaccaattttgaggaaaggatacagacagcgcctggaattgtcagacatataccaaatcccttctgttgattctgctgacaatctatctgaaaaattggaaagagaatgggatagagagctggcttcaaagaaaaatcctaaactcattaatgcccttcggcgatgttttttctggagatttatgttctatggaatctttttatatttaggggaagtcaccaaagcagtacagcctctcttactgggaagaatcatagcttcctatgacccggataacaaggaggaacgctctatcgcgatttatctaggcataggcttatgccttctctttattgtgaggacactgctcctacacccagccatttttggccttcatcacattggaatgcagatgagaatagctatgtttagtttgatttataagaagactttaaagctgtcaagccgtgttctagataaaataagtattggacaacttgttagtctcctttccaacaacctgaacaaatttgatgaaggacttgcattggcacatttcgtgtggatcgctcctttgcaagtggcactcctcatggggctaatctgggagttgttacaggcgtctgccttctgtggacttggtttcctgatagtccttgccctttttcaggctgggctagggagaatgatgatgaagtacagagatcagagagctgggaagatcagtgaaagacttgtgattacctcagaaatgattgaaaatatccaatctgttaaggcatactgctgggaagaagcaatggaaaaaatgattgaaaacttaagacaaacagaactgaaactgactcggaaggcagcctatgtgagatacttcaatagctcagccttcttcttctcagggttctttgtggtgtttttatctgtgcttccctatgcactaatcaaaggaatcatcctccggaaaatattcaccaccatctcattctgcattgttctgcgcatggcggtcactcggcaatttccctgggctgtacaaacatggtatgactctcttggagcaataaacaaaatacaggatttcttacaaaagcaagaatataagacattggaatataacttaacgactacagaagtagtgatggagaatgtaacagccttctgggaggagggatttggggaattatttgagaaagcaaaacaaaacaataacaatagaaaaacttctaatggtgatgacagcctcttcttcagtaatttctcacttcttggtactcctgtcctgaaagatattaatttcaagatagaaagaggacagttgttggcggttgctggatccactggagcaggcaagacttcacttctaatggtgattatgggagaactggagccttcagagggtaaaattaagcacagtggaagaatttcattctgttctcagttttcctggattatgcctggcaccattaaagaaaatatcatctttggtgtttcctatgatgaatatagatacagaagcgtcatcaaagcatgccaactagaagaggacatctccaagtttgcagagaaagacaatatagttcttggagaaggtggaatcacactgagtggaggtcaacgagcaagaatttctttagcaagagcagtatacaaagatgctgatttgtatttattagactctccttttggatacctagatgttttaacagaaaaagaaatatttgaaagctgtgtctgtaaactgatggctaacaaaactaggattttggtcacttctaaaatggaacatttaaagaaagctgacaaaatattaattttgcatgaaggtagcagctatttttatgggacattttcagaactccaaaatctacagccagactttagctcaaaactcatgggatgtgattctttcgaccaatttagtgcagaaagaagaaattcaatcctaactgagaccttacaccgtttctcattagaaggagatgctcctgtctcctggacagaaacaaaaaaacaatcttttaaacagactggagagtttggggaaaaaaggaagaattctattctcaatccaatcaactctatacgaaaattttccattgtgcaaaagactcccttacaaatgaatggcatcgaagaggattctgatgagcctttagagagaaggctgtccttagtaccagattctgagcagggagaggcgatactgcctcgcatcagcgtgatcagcactggccccacgcttcaggcacgaaggaggcagtctgtcctgaacctgatgacacactcagttaaccaaggtcagaacattcaccgaaagacaacagcatccacacgaaaagtgtcactggcccctcaggcaaacttgactgaactggatatatattcaagaaggttatctcaagaaactggcttggaaataagtgaagaaattaacgaagaagacttaaaggagtgcttttttgatgatatggagagcataccagcagtgactacatggaacacataccttcgatatattactgtccacaagagcttaatttttgtgctaatttggtgcttagtaatttttctggcagaggtggctgcttctttggttgtgctgtggctccttggaaacactcctcttcaagacaaagggaatagtactcatagtagaaataacagctatgcagtgattatcaccagcaccagttcgtattatgtgttttacatttacgtgggagtagccgacactttgcttgctatgggattcttcagaggtctaccactggtgcatactctaatcacagtgtcgaaaattttacaccacaaaatgttacattctgttcttcaagcacctatgtcaaccctcaacacgttgaaagcaggtgggattcttaatagattctccaaagatatagcaattttggatgaccttctgcctcttaccatatttgacttcatccagttgttattaattgtgattggagctatagcagttgtcgcagttttacaaccctacatctttgttgcaacagtgccagtgatagtggcttttattatgttgagagcatatttcctccaaacctcacagcaactcaaacaactggaatctgaaggcaggagtccaattttcactcatcttgttacaagcttaaaaggactatggacacttcgtgccttcggacggcagccttactttgaaactctgttccacaaagctctgaatttacatactgccaactggttcttgtacctgtcaacactgcgctggttccaaatgagaatagaaatgatttttgtcatcttcttcattgctgttaccttcatttccattttaacaacaggagaaggagaaggaagagttggtattatcctgactttagccatgaatatcatgagtacattgcagtgggctgtaaactccagcatagatgtggatagcttgatgcgatctgtgagccgagtctttaagttcattgacatgccaacagaaggtaaacctaccaagtcaaccaaaccatacaagaatggccaactctcgaaagttatgattattgagaattcacacgtgaagaaagatgacatctggccctcagggggccaaatgactgtcaaagatctcacagcaaaatacacagaaggtggaaatgccatattagagaacatttccttctcaataagtcctggccagagggtgggcctcttgggaagaactggatcagggaagagtactttgttatcagcttttttgagactactgaacactgaaggagaaatccagatcgatggtgtgtcttgggattcaataactttgcaacagtggaggaaagcctttggagtgataccacagaaagtatttattttttctggaacatttagaaaaaacttggatccctatgaacagtggagtgatcaagaaatatggaaagttgcagatgaggttgggctcagatctgtgatagaacagtttcctgggaagcttgactttgtccttgtggatgggggctgtgtcctaagccatggccacaagcagttgatgtgcttggctagatctgttctcagtaaggcgaagatcttgctgcttgatgaacccagtgctcatttggatccagtaacataccaaataattagaagaactctaaaacaagcatttgctgattgcacagtaattctctgtgaacacaggatagaagcaatgctggaatgccaacaatttttggtcatagaagagaacaaagtgcggcagtacgattccatccagaaactgctgaacgagaggagcctcttccggcaagccatcagcccctccgacagggtgaagctctttccccaccggaactcaagcaagtgcaagtctaagccccagattgctgctctgaaagaggagacagaagaagaggtgcaagatacaaggctttagagagcagcataaatgttgacatgggacatttgctcatggaattggagctcgtgggacagtcacctcatggaattggagctcgtggaacagttacctctgcctcagaaaacaaggatgaattaagtttttttttaaaaaagaaacatttggtaaggggaattgaggacactgatatgggtcttgataaatggcttcctggcaatagtcaaattgtgtgaaaggtacttcaaatccttgaagatttaccacttgtgttttgttaagtaatgataactggaaacttcagcggtttatataagcttgtattcctttttctctcctctccccatgatgtttagaaacacaactatattgtttgctaagcattccaactatctcatttccaagcaagtattagaataccacaggaaccacaagactgcacatcaaaatatgccccattcaacatctagtgagcagtcaggaaagagaacttccagatcctggaaatcagggttagtattgtccaggtctaccaaaaatctcaatatttcagataatcacaatacatcccttacctgggaaagggctgttataatctttcacaggggacaggatggttcccttgatgaagaagttgatatgccttttcccaactccagaaagtgacaagctcacagacctttgaactagagtttagctggaaaagtatgttagtgcaaattgtcacaggacagcccttctttccacagaagctccaggtagagggtgtgtaagtagataggccatgggcactgtgggtagacacacatgaagtccaagcatttagatgtataggttgatggtggtatgttttcaggctagatgtatgtacttcatgctgtctacactaagagagaatgagagacacactgaagaagcaccaatcatgaattagttttatatgcttctgttttataattttgtgaagcaaaattttttctctaggaaatatttattttaataatgtttcaaacatatataacaatgctgtattttaaaagaatgattatgaattacatttgtataaaataatttttatatttgaaatattgactttttatggcactagtatttctatgaaatattatgttaaaactgggacaggggagaacctagggtgatattaaccaggggccatgaatcaccttttggtctggagggaagccttggggctgatgcagttgttgcccacagctgtatgattcccagccagcacagcctcttagatgcagttctgaagaagatggtaccaccagtctgactgtttccatcaagggtacactgccttctcaactccaaactgactcttaagaagactgcattatatttattactgtaagaaaatatcacttgtcaataaaatccatacatttgtgtg

SEQ ID NO: 6 - protein, 1470 aa, Homo sapiens
MQRSPLEKASVVSKLFFSWWILRKGYRQRLELSDIYQIPSVDSADNLSEKLEREWDRELASKKNPKLINALRRCFFWRFMFYGIFLYLGEVTKAVQPLLLGRIIASYDPDNKEERSIAIYLGIGLCLLFIVRTLLLHPAIFGLHHIGMQMRIAMFSLIYKKTLKLSSRVLDKISIGQLVSLLSNNLNKFDEGLAHFVWIAPLQVLMGLIWELLQASAFCGLGFLIVLALFQAGLGRMMMKYRDQRAGKISLVITSEMIENIQSVKAYCWEEAMEKMIENLRQTELKLTRKAAYVRYFNSSAFFFSGFFVVFLSVLPYALIKGIILRKIFTTISFCIVLRMAVTRQFPWAVQTWYDSLGAINKIQDFLQKQEYKTLEYNLTTTEVVMENVTAFWEEGFGELFEKAKQNNNNRKTSNGDDSLFFSNFSLLGTPVLKDINFKIERGQLLAVAGSTGAGKTSLLMVIMGELEPSEGKIKHSGRISFCSQFSWIMPGTIKENIIFGVSYDEYRYRSVIKACQLEEDISKFAEKDNIVLGEGGITLSGGQRARISLARAVYKDADLYLLDSPFGYLDVLTEKEIFESCVCKLMANKTRILVTSKMEHLKKADKILILHEGSSYFYGTFSELQNLQPDFSSKLMGCDSFDQFSAERRNSILTETLHRFSLEGDAPVSWTETKKQSFKQTGEFGEKRKNSILNPINSIRKFSIVQKTPLQMNGIEEDSDEPLERRLSLVPDSEQGEAILPRISVISTGPTLQARRRQSVLNLMTHSVNQGQNIHRKTTASTRKVSLAPQANLTELDIYSRRLSQETGLEISEEINEEDLKECFFDDMESIPAVTTWNTYLRYITVHKSLIFVLIWCLVIFLAEVAASLVVLWLLGNTPLQDKGNSTHSRNNSYAVIITSTSSYYVFYIYVGVADTLLAMGFFRGLPLVHTLITVSKILHHKMLHSVLQAPMSTLNTLKAGGILNRFSKDIAILDDLLPLTIFDFIQLLLIVIGAIAVVAVLQPYIFVATVPVIVAFIMLRAYFLQTSQQLKQLESEGRSPIFTHLVTSLKGLWTLRAFGRQPYFETLFHKALNLHTANWFLYLSTLRWFQMRIEMIFVIFFIAVTFISILTTGEGEGRVGIILTLAMNIMSTLQWAVNSSIDVDSLMRSVSRVFKFIDMPTEGKPTKSTKPYKNGQLSKVMIIENSHVKKDDIWPSGGQMTVKDLTAKYTEGGNAINISFSISPGQRVGLLGRTGSGKSTLLSAFLRLLNTEGEIQIDGVSWDSITLQQWRKAFGVIPQKVFIFSGTFRKNLDPYEQWSDQEIWKVADEVGLRSVIEQFPGKLDFVLVDGGCVLSHGHKQLMCLARSVLSKAKILLLDEPSAHLDPVTYQIIRRTLKQAFADCTVILCEHRIEAMLECQQFLVIEENKVRQYDSIQKLLNERSLFRQAISPSDRVKLFPHRNSSKCKSKPQIAALKEETEEEVQDTRL

SEQ ID NO: 7 - DNA, 4143 bp, Homo sapiens
aattggaagcaaatgacatcacagcaggtcagagaaaaagggttgagcggcaggcacccagagtagtaggtctttggcattaggagcttgagcccagacggccctagcagggaccccagcgcccgagagaccatgcagaggtcgcctctggaaaaggccagcgttgtctccaaactttttttcagctggaccagaccaattttgaggaaaggatacagacagcgcctggaattgtcagacatataccaaatcccttctgttgattctgctgacaatctatctgaaaaattggaaagagaatgggatagagagctggcttcaaagaaaaatcctaaactcattaatgcccttcggcgatgttttttctggagatttatgttctatggaatctttttatatttaggggaagtcaccaaagcagtacagcctctcttactgggaagaatcatagcttcctatgacccggataacaaggaggaacgctctatcgcgatttatctaggcataggcttatgccttctctttattgtgaggacactgctcctacacccagccatttttggccttcatcacattggaatgcagatgagaatagctatgtttagtttgatttataagaagactttaaagctgtcaagccgtgttctagataaaataagtattggacaacttgttagtctcctttccaacaacctgaacaaatttgatgaaggacttgcattggcacatttcgtgtggatcgctcctttgcaagtggcactcctcatggggctaatctgggagttgttacaggcgtctgccttctgtggacttggtttcctgatagtccttgccctttttcaggctgggctagggagaatgatgatgaagtacagagatcagagagctgggaagatcagtgaaagacttgtgattacctcagaaatgattgaaaatatccaatctgttaaggcatactgctgggaagaagcaatggaaaaaatgattgaaaacttaagacaaacagaactgaaactgactcggaaggcagcctatgtgagatacttcaatagctcagccttcttcttctcagggttctttgtggtgtttttatctgtgcttccctatgcactaatcaaaggaatcatcctccggaaaatattcaccaccatctcattctgcattgttctgcgcatggcggtcactcggcaatttccctgggctgtacaaacatggtatgactctcttggagcaataaacaaaatacaggatttcttacaaaagcaagaatataagacattggaatataacttaacgactacagaagtagtgatggagaatgtaacagccttctgggaggagggatttggggaattatttgagaaagcaaaacaaaacaataacaatagaaaaacttctaatggtgatgacagcctcttcttcagtaatttctcacttcttggtactcctgtcctgaaagatattaatttcaagatagaaagaggacagttgttggcggttgctggatccactggagcaggcaagacttcacttctaatggtgattatgggagaactggagccttcagagggtaaaattaagcacagtggaagaatttcattctgttctcagttttcctggattatgcctggcaccattaaagaaaatatcatctttggtgtttcctatgatgaatatagatacagaagcgtcatcaaagcatgccaactagaagaggacatctccaagtttgcagagaaagacaatatagttcttggagaaggtggaatcacactgagtggaggtcaacgagcaagaatttctttagcaagagcagtatacaaagatgctgatttgtatttattagactctccttttggatacctagatgttttaacagaaaaagaaatatttgaaagctgtgtctgtaaactgatggctaacaaaactaggattttggtcacttctaaaatggaacatttaaagaaagctgacaaaatattaattttgcatgaaggtagcagctatttttatgggacattttcagaactccaaaatctacagccagactttagctcaaaactcatgggatgtgattctttcgaccaatttagtgcagaaagaagaaattcaatcctaactgagaccttacaccgtttctcattagaaggagatgctcctgtctcctggacagaaacaaaaaaacaatcttttaaacagactggagagtttggggaaaaaaggaagaattctattctcaatccaatcaactctatacgaaaattttccattgtgcaaaagactcccttacaaatgaatggcatcgaagaggattctgatgagcctttagagagaaggctgtccttagtaccagattctgagcagggagaggcgatactgcctcgcatcagcgtgatcagcactggccccacgcttcaggcacgaaggaggcagtctgtcctgaacctgatgacacactcagttaaccaaggtcagaacattcaccgaaagacaacagcatccacacgaaaagtgtcactggcccctcaggcaaacttgactgaactggatatatattcaagaaggttatctcaagaaactggcttggaaataagtgaagaaattaacgaagaagacttaaaggagtgcttttttgatgatatggagagcataccagcagtgactacatggaacacataccttcgatatattactgtccacaagagcttaatttttgtgctaatttggtgcttagtaatttttctggcagaggtggctgcttctttggttgtgctgtggctccttggaaacactcctcttcaagacaaagggaatagtactcatagtagaaataacagctatgcagtgattatcaccagcaccagttcgtattatgtgttttacatttacgtgggagtagccgacactttgcttgctatgggattcttcagaggtctaccactggtgcatactctaatcacagtgtcgaaaattttacaccacaaaatgttacattctgttcttcaagcacctatgtcaaccctcaacacgttgaaagcaggtgggattcttaatagattctccaaagatatagcaattttggatgaccttctgcctcttaccatatttgacttcatccagttgttattaattgtgattggagctatagcagttgtcgcagttttacaaccctacatctttgttgcaacagtgccagtgatagtggcttttattatgttgagagcatatttcctccaaacctcacagcaactcaaacaactggaatctgaaggcaggagtccaattttcactcatcttgttacaagcttaaaaggactatggacacttcgtgccttcggacggcagccttactttgaaactctgttccacaaagctctgaatttacatactgccaactggttcttgtacctgtcaacactgcgctggttccaaatgagaatagaaatgatttttgtcatcttcttcattgctgttaccttcatttccattttaacaacaggagaaggagaaggaagagttggtattatcctgactttagccatgaatatcatgagtacattgcagtgggctgtaaactccagcatagatgtggatagcttgatgcgatctgtgagccgagtctttaagttcattgacatgccaacagaaggtaaacctaccaagtcaaccaaaccatacaagaatggccaactctcgaaagttatgattattgagaattcacacgtgaagaaagatgacatctggccctcagggggccaaatgactgtcaaagatctcacagcaaaatacacagaaggtggaaatgccatattagagaacatttccttctcaataagtcctggccagagggtgagatttgaacactgcttgctttgttagactgtgttcagtaagtgaatcccagtagcctgaagcaatgtgttagcagaatctatttgtaacattattattgtacagtagaatcaatattaaacacacatgttttattatatggagtcattatttttaatatgaaatttaatttgcagagtcctgaacctatataatgggtttattttaaatgtgattgtacttgcagaatatctaattaattgctaggttaataactaaagaagccattaaataaatcaaaattgtaacatg

SEQ ID NO: 8 - protein, 1238 aa, Homo sapiens
MQRSPLEKASVVSKLFFSWWILRKGYRQRLELSDIYQIPSVDSADNLSEKLEREWDRELASKKNPKLINALRRCFFWRFMFYGIFLYLGEVTKAVQPLLLGRIIASYDPDNKEERSIAIYLGIGLCLLFIVRTLLLHPAIFGLHHIGMQMRIAMFSLIYKKTLKLSSRVLDKISIGQLVSLLSNNLNKFDEGLAHFVWIAPLQVLMGLIWELLQASAFCGLGFLIVLALFQAGLGRMMMKYRDQRAGKISLVITSEMIENIQSVKAYCWEEAMEKMIENLRQTELKLTRKAAYVRYFNSSAFFFSGFFVVFLSVLPYALIKGIILRKIFTTISFCIVLRMAVTRQFPWAVQTWYDSLGAINKIQDFLQKQEYKTLEYNLTTTEVVMENVTAFWEEGFGELFEKAKQNNNNRKTSNGDDSLFFSNFSLLGTPVLKDINFKIERGQLLAVAGSTGAGKTSLLMVIMGELEPSEGKIKHSGRISFCSQFSWIMPGTIKENIIFGVSYDEYRYRSVIKACQLEEDISKFAEKDNIVLGEGGITLSGGQRARISLARAVYKDADLYLLDSPFGYLDVLTEKEIFESCVCKLMANKTRILVTSKMEHLKKADKILILHEGSSYFYGTFSELQNLQPDFSSKLMGCDSFDQFSAERRNSILTETLHRFSLEGDAPVSWTETKKQSFKQTGEFGEKRKNSILNPINSIRKFSIVQKTPLQMNGIEEDSDEPLERRLSLVPDSEQGEAILPRISVISTGPTLQARRRQSVLNLMTHSVNQGQNIHRKTTASTRKVSLAPQANLTELDIYSRRLSQETGLEISEEINEEDLKECFFDDMESIPAVTTWNTYLRYITVHKSLIFVLIWCLVIFLAEVAASLVVLWLLGNTPLQDKGNSTHSRNNSYAVIITSTSSYYVFYIYVGVADTLLAMGFFRGLPLVHTLITVSKILHHKMLHSVLQAPMSTLNTLKAGGILNRFSKDIAILDDLLPLTIFDFIQLLLIVIGAIAVVAVLQPYIFVATVPVIVAFIMLRAYFLQTSQQLKQLESEGRSPIFTHLVTSLKGLWTLRAFGRQPYFETLFHKALNLHTANWFLYLSTLRWFQMRIEMIFVIFFIAVTFISILTTGEGEGRVGIILTLAMNIMSTLQWAVNSSIDVDSLMRSVSRVFKFIDMPTEGKPTKSTKPYKNGQLSKVMIIENSHVKKDDIWPSGGQMTVKDLTAKYTEGGNAINISFSISPGQRVRFEHCLLC

SEQ ID NO: 9 - DNA, 6132 bp, Homo sapiens
aattggaagcaaatgacatcacagcaggtcagagaaaaagggttgagcggcaggcacccagagtagtaggtctttggcattaggagcttgagcccagacggccctagcagggaccccagcgcccgagagaccatgcagaggtcgcctctggaaaaggccagcgttgtctccaaactttttttcagctggaccagaccaattttgaggaaaggatacagacagcgcctggaattgtcagacatataccaaatcccttctgttgattctgctgacaatctatctgaaaaattggaaagagaatgggatagagagctggcttcaaagaaaaatcctaaactcattaatgcccttcggcgatgttttttctggagatttatgttctatggaatctttttatatttaggggaagtcaccaaagcagtacagcctctcttactgggaagaatcatagcttcctatgacccggataacaaggaggaacgctctatcgcgatttatctaggcataggcttatgccttctctttattgtgaggacactgctcctacacccagccatttttggccttcatcacattggaatgcagatgagaatagctatgtttagtttgatttataagaagactttaaagctgtcaagccgtgttctagataaaataagtattggacaacttgttagtctcctttccaacaacctgaacaaatttgatgaaggacttgcattggcacatttcgtgtggatcgctcctttgcaagtggcactcctcatggggctaatctgggagttgttacaggcgtctgccttctgtggacttggtttcctgatagtccttgccctttttcaggctgggctagggagaatgatgatgaagtacagagatcagagagctgggaagatcagtgaaagacttgtgattacctcagaaatgattgaaaatatccaatctgttaaggcatactgctgggaagaagcaatggaaaaaatgattgaaaacttaagacaaacagaactgaaactgactcggaaggcagcctatgtgagatacttcaatagctcagccttcttcttctcagggttctttgtggtgtttttatctgtgcttccctatgcactaatcaaaggaatcatcctccggaaaatattcaccaccatctcattctgcattgttctgcgcatggcggtcactcggcaatttccctgggctgtacaaacatggtatgactctcttggagcaataaacaaaatacaggatttcttacaaaagcaagaatataagacattggaatataacttaacgactacagaagtagtgatggagaatgtaacagccttctgggaggagggatttggggaattatttgagaaagcaaaacaaaacaataacaatagaaaaacttctaatggtgatgacagcctcttcttcagtaatttctcacttcttggtactcctgtcctgaaagatattaatttcaagatagaaagaggacagttgttggcggttgctggatccactggagcaggcaagacttcacttctaatggtgattatgggagaactggagccttcagagggtaaaattaagcacagtggaagaatttcattctgttctcagttttcctggattatgcctggcaccattaaagaaaatatcatctttggtgtttcctatgatgaatatagatacagaagcgtcatcaaagcatgccaactagaagaggacatctccaagtttgcagagaaagacaatatagttcttggagaaggtggaatcacactgagtggaggtcaacgagcaagaatttctttagcaagagcagtatacaaagatgctgatttgtatttattagactctccttttggatacctagatgttttaacagaaaaagaaatatttgaaagctgtgtctgtaaactgatggctaacaaaactaggattttggtcacttctaaaatggaacatttaaagaaagctgacaaaatattaattttgcatgaaggtagcagctatttttatgggacattttcagaactccaaaatctacagccagactttagctcaaaactcatgggatgtgattctttcgaccaatttagtgcagaaagaagaaattcaatcctaactgagaccttacaccgtttctcattagaaggagatgctcctgtctcctggacagaaacaaaaaaacaatcttttaaacagactggagagtttggggaaaaaaggaagaattctattctcaatccaatcaactctatacgaaaattttccattgtgcaaaagactcccttacaaatgaatggcatcgaagaggattctgatgagcctttagagagaaggctgtccttagtaccagattctgagcagggagaggcgatactgcctcgcatcagcgtgatcagcactggccccacgcttcaggcacgaaggaggcagtctgtcctgaacctgatgacacactcagttaaccaaggtcagaacattcaccgaaagacaacagcatccacacgaaaagtgtcactggcccctcaggcaaacttgactgaactggatatatattcaagaaggttatctcaagaaactggcttggaaataagtgaagaaattaacgaagaagacttaaaggagtgcttttttgatgatatggagagcataccagcagtgactacatggaacacataccttcgatatattactgtccacaagagcttaatttttgtgctaatttggtgcttagtaatttttctggcagaggtggctgcttctttggttgtgctgtggctccttggaaacactcctcttcaagacaaagggaatagtactcatagtagaaataacagctatgcagtgattatcaccagcaccagttcgtattatgtgttttacatttacgtgggagtagccgacactttgcttgctatgggattcttcagaggtctaccactggtgcatactctaatcacagtgtcgaaaattttacaccacaaaatgttacattctgttcttcaagcacctatgtcaaccctcaacacgttgaaagcaggtgggattcttaatagattctccaaagatatagcaattttggatgaccttctgcctcttaccatatttgacttcatccagttgttattaattgtgattggagctatagcagttgtcgcagttttacaaccctacatctttgttgcaacagtgccagtgatagtggcttttattatgttgagagcatatttcctccaaacctcacagcaactcaaacaactggaatctgaaggcaggagtccaattttcactcatcttgttacaagcttaaaaggactatggacacttcgtgccttcggacggcagccttactttgaaactctgttccacaaagctctgaatttacatactgccaactggttcttgtacctgtcaacactgcgctggttccaaatgagaatagaaatgatttttgtcatcttcttcattgctgttaccttcatttccattttaacaacaggagaaggagaaggaagagttggtattatcctgactttagccatgaatatcatgagtacattgcagtgggctgtaaactccagcatagatgtggatagcttgatgcgatctgtgagccgagtctttaagttcattgacatgccaacagaaggtaaacctaccaagtcaaccaaaccatacaagaatggccaactctcgaaagttatgattattgagaattcacacgtgaagaaagatgacatctggccctcagggggccaaatgactgtcaaagatctcacagcaaaatacacagaaggtggaaatgccatattagagaacatttccttctcaataagtcctggccagagggtgggcctcttgggaagaactggatcagggaagagtactttgttatcagcttttttgagactactgaacactgaaggagaaatccagatcgatggtgtgtcttgggattcaataactttgcaacagtggaggaaagcctttggagtgataccacagaaagtatttattttttctggaacatttagaaaaaacttggatccctatgaacagtggagtgatcaagaaatatggaaagttgcagatgaggttgggctcagatctgtgatagaacagtttcctgggaagcttgactttgtccttgtggatgggggctgtgtcctaagccatggccacaagcagttgatgtgcttggctagatctgttctcagtaaggcgaagatcttgctgcttgatgaacccagtgctcatttggatccagtaacataccaaataattagaagaactctaaaacaagcatttgctgattgcacagtaattctctgtgaacacaggatagaagcaatgctggaatgccaacaatttttggtcatagaagagaacaaagtgcggcagtacgattccatccagaaactgctgaacgagaggagcctcttccggcaagccatcagcccctccgacagggtgaagctctttccccaccggaactcaagcaagtgcaagtctaagccccagattgctgctctgaaagaggagacagaagaagaggtgcaagatacaaggctttagagagcagcataaatgttgacatgggacatttgctcatggaattggagctcgtgggacagtcacctcatggaattggagctcgtggaacagttacctctgcctcagaaaacaaggatgaattaagtttttttttaaaaaagaaacatttggtaaggggaattgaggacactgatatgggtcttgataaatggcttcctggcaatagtcaaattgtgtgaaaggtacttcaaatccttgaagatttaccacttgtgttttgcaagccagattttcctgaaaacccttgccatgtgctagtaattggaaaggcagctctaaatgtcaatcagcctagttgatcagcttattgtctagtgaaactcgttaatttgtagtgttggagaagaactgaaatcatacttcttagggttatgattaagtaatgataactggaaacttcagcggtttatataagcttgtattcctttttctctcctctccccatgatgtttagaaacacaactatattgtttgctaagcattccaactatctcatttccaagcaagtattagaataccacaggaaccacaagactgcacatcaaaatatgccccattcaacatctagtgagcagtcaggaaagagaacttccagatcctggaaatcagggttagtattgtccaggtctaccaaaaatctcaatatttcagataatcacaatacatcccttacctgggaaagggctgttataatctttcacaggggacaggatggttcccttgatgaagaagttgatatgccttttcccaactccagaaagtgacaagctcacagacctttgaactagagtttagctggaaaagtatgttagtgcaaattgtcacaggacagcccttctttccacagaagctccaggtagagggtgtgtaagtagataggccatgggcactgtgggtagacacacatgaagtccaagcatttagatgtataggttgatggtggtatgttttcaggctagatgtatgtacttcatgctgtctacactaagagagaatgagagacacactgaagaagcaccaatcatgaattagttttatatgcttctgttttataattttgtgaagcaaaattttttctctaggaaatatttattttaataatgtttcaaacatatataacaatgctgtattttaaaagaatgattatgaattacatttgtataaaataatttttatatttgaaatattgactttttatggcactagtatttctatgaaatattatgttaaaactgggacaggggagaacctagggtgatattaaccaggggccatgaatcaccttttggtctggagggaagccttggggctgatgcagttgttgcccacagctgtatgattcccagccagcacagcctcttagatgcagttctgaagaagatggtaccaccagtctgactgtttccatcaagggtacactgccttctcaactccaaactgactcttaagaagactgcattatatttattactgtaagaaaatatcacttgtcaataaaatccatacatttgtgtgaaa

SEQ ID NO: 10 - protein, 1470 aa, Homo sapiens; identical to SEQ ID NO: 6

SEQ ID NO: 11 - DNA, 75164 bp, Mus musculus
  misc_feature (1)...(75164): n = A,T,C or G
gggattacttggagatacactttgctgtggattagtgttgcttctttggttggtctgtaagcttaaggcccaaactaggagagacaaggaggttattgcccaggcgcttgcagcactagaacatggtgcttcccctgatatatggttatctatgcttaagcaataggttgctggccattcagctcttgcaccccacgaggctagtctcattgcacgggatagaatgagtgcacttcagcagcccgagagagttgcacagctaagcactgcagtagaagagctctgcggcatatatgagcctattctagggagacatgtcatctttcaagaaggttgagtgtccaagtgtccttctccccaggaaaaacgacacgggaccagaccaggacccctctgggtgatgagcctggaaggaggttatgtgtacggctcctttacctgcacactggggatttgacctctatctccactctcattaatatgggtggcctattgctcttattaaaaggaaagggggatatgtgggaagccgccctcacatttgccgttgcaagatggcgctgacatcctgtgttctaagtggtaaacaataatctgcgcatgtgccaagggtagttctccaccccatgtgctctgccttccccgtgacgacaactcggctgatgggctgcagccaatcagggagtgacacgtcctaggcggaggataattctccttaaaagggatggggttttgccattctctctcttgctctcttgctctcttgcttgcttactctcttgctcctgaagatgtaagcaataaagcttttgccgcagaagattccagtttgttgcgttcttcctggccggtcgcgaacgcgtgtaaggggatgataaatattgttatccatatcatgagtttataactacttcttgttgtattttaggtatggcaccggacagactgaagaaggtgactacctcagtaataaaggaatcagaagtgccaggatcaccacagagaagaaatggatttgtaggaagctgtaatggcagcccttgttaaattacttagcttttttgattatgaaattaattttttatttaaaaatacttatttatttttttcatgtttatattttgagatagagtctctgtatatattcctgcctgttctggaatttactatgtagaccaggtttcccttgaaatcacagaaatctgcctgcctctgcctctacatctgagtgctgttatattaaatgtttatcatggtattcctaatgaaaggggttgtcttataaacagttttaaggggaggttctgattctaaggtctagttgcctaattggttcttgatttgtcaataaagaaggcctggtgccaattgttctgcagaaggtacaagtgggatttccgggtcctaggaagtaaaggcagacacaaaggagagggcctttttctgccaggctttgaaacgaggaggagcatgcagaaatcatgtaagatctcagggcagccagggcctgcagctccactgtgtctgggttgccagagatatttggcaggggctaattggaacagcccacttagtttggagcagaaggaaggatggagtggtggtttggtaagggcatacatttccaggcaggaaatatttgtgcccaccaattgggataagcagcaggttaaggcaacaaagctgtcagagtgtctcttttctgcagattcaaggctctcaggagtgagctgctcctcctggagcagaagttggtagagagagaggccaagttggggctggcagccactgatccaggagccaagccaggtagagtggaagggccccaggaggggctgatagcaatggtcctgggcaaggccatagtgtgattacacaactacagagaacacatggtaaataaggtgtagcagctactttgggattgagactgaaggtttcacaaaccactagatgtaaaactaccatgtcaccaaggtgtatcatccctggtttatactcagcaattttatattttactacacagaaacctgtatactcgatttacaagcttttccattcataatagttaggaatggaaccagctttgatgttctttaagaggtgaatggataacggaaacttggtacacatacaaatggaataccattcacctgtaaagaaaaatgaagtcttggaattttcaagtaaattgatggaactagaaagccttgtagttagtgttgtgacctaggtcctgaaagacaaacactgtatattctttcatgcagaacctagcttgaaatctcttgttttatgtgcttaacttggggcacaagtaggagccaagcaaactagaaagggcatgggctcttttaattcattaaaagttaaatcaggaccagataaagtatctaaacagtcccataaaacctaagtaaacagatgtaatcattaaaagtattccccctccctcaaaaaaaaaaaaaaaaaaaaaaaaaaagcccagggccaggtggttttagcacagatttttaaagaagacgtaataccaatacttctcaaatcattccataaaatagaaatagacagaacactacctacttagttctgtgaagccaaaggtattaagctaatagctaaaccccactaagaccaaacaaagaaagagaacttcagatgtgccagaagagggcatcagatctcattatgggtggttgtgagccaccatgtggttgctgggatttgaactcaggacctttggaagagcggtcaagtgctcctatctgctgagccatctcaccagcccgaaagagaacttcagaccaagtttggatatgaatatctatgcaaaaatactcaataaaattcttgccaaataatttgcagattcatctggaataacaaaaaacctaggatagcaaaaactcttctcaatgataaaaaaacctctggtggaatcaccatgcctgacctaaagctgtactacagagcaattgtgataaaaactgcatggtactggtacagcaacagacaggtagaccactggaagagaattgaagacccagaaatgatcccacacacctatggtcacttgatctttgacaaaggaacaaaaaccatccagtccaaaaaaacaaaacaaaaacaaaacaaaacaaaaaaccccagcattttcaacaaatggtgctggctcaactggcagttatcatgtagaggaatgtgaattgatccattcttatctccttgtagtaaggtgaagtgtatgtggatcaaagaactccacataaaaccagaaacactgaaacatatagaggagaaagtagggaaaatcctcgaagcacaggggaaaaaattcctgaacagaacaacaatggcttgtgctataagatccagaattgacaaatgggacttcatgaaattgcaaagcttctgtaaggcaaaagacactgtcacaaaaaccaaaaggccaccaacacaccaacagattgggaaaggatctttaccaatcctaaatcagataggggactaatatccaatgtatatatatatatatatatatatatatatatatatatatatatatatataacgaactcaagaagatggactccagaaaaccaaatagtcccattaaaaaatggggcatagagctaaacaaggaaatctcaagtgaggaatatcgaatggctgagaagcacctgaaaaaatgttcaagatccttaatcatcaggaaaatgcaaatcaaaacaaccctgagattccacttcacacaagtcagaatggctaagatcaaaaattcaggtgacagcagatgctggccaggatgtggagaaagagggacattcctccattgctggtgggattgcaagctggtacaaccactgtggaaatcagtctggtggttcctcagaaaattggacatagtactactgaaagatccagcaatacctctcctgggcatataccctgacgatgttccaacatgtaataaggacacatgctccactatgttcgtagcagccttatttataagagacagaagctgaaaagaacccagatgtccctcaacaaaggaatggatacagaaaatgtggtaaatttacacaatggagtactacacagcacgtaaaaacaatgaattcatgaaattcttaggcaaatggatgcatctggaggatatcatcctgagtgaggtaacaaaatcacaaaagaacacacatggtatacactcactgataagtggatactagcccagaaacttagaatatccaagatacaatttgcaaaacacatgaaactcacgaagaaggtagaccaaaatatggatacttcattccttcttagaatgaggaacaaaatactcatggaaggagttacagagacaaagttctgagctaagatggaaggaaagaccatacagagactgctctacccggggatccatcccatatacaaccaccaaacccagacactattgcatatgccagaaagattttactgacaggaccctgacatagccctctctttggagactatgccaatgcctggcaaatacagaagtggatgctcacagtcttctataggatggaacacagggcccctaatgaaggagctagagaaagtaccaaaggatctaaaggggtctgcaaccctataggaggaacaatgatatgaactaaccagtacccctgagagctgtgtctccagttgcatatgtagaagaggatggcctagtaggccatcaatgggaggagaagcccttcgtattgatcatataccccagtacaggaacatgccagggccaggaagcaggagtgggtaggttggggagtagggaggcgggagggtgtagggggcattgggatagcatttgaaatgtaaatgaagaaaatatctaataaaaatttaaaaaaaaaaaaaccttgccaaataattccaagtgggttgtcctggtgctctttgtattctgttgttatttctgcttcctcaagaggggatttcctaagtctgaagtgtataatttactcagttgagttcatgtgaaccatctcctcattttaactggtaaaatgaaggctgggtggggcttgtgattaggcagtggaagggaaaggtggggctggaggttttagaggatagaggaagaagaatggaggagaggagcggggaggaagatggagaagcaccacatgtcctggagaagtcgcaagtcagaagaaatctcatagctgaacaaggaatctcatagctggggagtagattaatgtagtggtaatctaaccaatctaggcatacagtttatgaatatcgtaactgagttgtgtgttattttcacaggctttttggggttggagatttactgcaacagactggcacccattgtattgcttagaacccatctaacctgagataaaattccaatttcctctcccctgaataaatagctggggcagccatctaaggctgcaacagcgtgtggattgaaagctgagtgggtctgagtggtctacagagacctgcagagaggctcccttcccaagtcccaggtagacagctacagccaggggcagcaccccagcctggagcctagccagggacaaggaactttggatgtcagccgcctgcgaggtagttttctggcagacacagtgagctttcttggcatctatgcctgagggtgcctttctgtgcttgcttcccagtatctcttgggtcacaggacatgggacagccagaactgttcttccaactgcttgttctccaggctgcctgagatcagcacacaagttggctgctgcaacccaaacaaagagagcctactcagaagcatagaagctgagagtatttctacagtcagccccttcctaccaataaaaagaattggagaggactgcaatgtcatatatacatatacatacatatatatatatatatatatatatatatatatatatatatatatttgattgataatacatatacatagatatacatgtgtatatgtatatatatatatatatatatatatatatatatatatatatatatatttgatacttaaattgagagagataataaatcttttgggcttatatggaatgatattttgaatatcgtaactgagttgtgtgttattttcacaggctttttggggttggagatttactgcaacagactggcacccattgtattgcacattacagggatagatttaaaggaaagagacacctagtcacttactgttattacaatttttattctcttgatttattatgtcttcccataataaatggagccctagattaaaaaaaacttatgtagcttagaaaagggtttcaaggaaacactaaaacgaaaagttcaggattttataactcaagataagcaccagaaagtggagaataaaggttggagaaagaagctggaaaagatgctagaaaaaaaggatgcagaatttcatagatcagactgaacagcaaagagatagagataaaatttggaagcagagtctcgaggataatttatgaatgctactacgtcaaaataaggctgattctacaacatcagaactacaacattaaaattatggaagcagggcctagaacagaagatacagaaatttatagagcagcataaagagcagaaagacacctctcaaatccgttgtctggagggtgatcctatctcgtgccccacgtcgggtgccacttgacccgtccagcaggtccagttattcgagggtctcgaggggaccttctcctaagaaccaaatggagggagggaaagatggaaaccaagtgcaagaacaacacagaagcagtctgagtagcatcaaggtctctctgaattcagcaaggctcaaggcttaaatgcacaagcaaaaggggaagtacttctcagcaggaggaatggggcaggggaaatgcacaagcaaaggaggaagtacttctcagcaggaggaatagggcagtggaaatgcataagcaaaggaggaagtacttctcagcaggaggaatagggcagtggaaatgcacaagcaaaggaggaagtacttctcagcaggaggaatagggcagtggaaatgcataagcaaaggaggaagtacttctcagcaggaggaatagggcagtggaaatgcacaagcaaaggaggaagtacttctcagcaggaggaatagggtagtggaaatgcataagcaaaggaggaagtacttctcagcagtactgagaaatttttcttttggcaactacatggggaagcaggaacttggtggtatcagggtacatcttgtggtcaggacatctggtgctgatttagggctggaacattctgtggttgttcttggaacggtgcgtcggtggcctgctttgaccccctttactattcggggggagaggcccaattcggagatcaagacaatagagttgctttaatagctcccaacaaccatttattgctcttgcagaagactggggtttcattctgagcacccatacggtggcttacacacccatccctaattccaattccagggatccaatatacttttctaaattcttctaaaactaatcatgcatgtagtatacatacatacatgcatacatatatacatacattctagcatacaggccaacaaagcactgttacatgtaagataaataagactgaaacagtcattttaaaagtatatacacatcgcttctcagccttttggctaagtcaagtgtaaaagtatatacagaccccataccctatctcagtttccccattgtctgctgcagactctccctgctcctctatctcagctgtgagtactcacctttccagatgccataaaatgtgtccatgaagcagagaggtcccacctgagttctttcagcttgtcacagcaatgccctctgctcatcactactcacactgcagtgcttatcagtagcatgtcagaaacaagcagtgctggagagatgctgagagaccatgtctacagcactgctgacacagaaccatgctctgagttcagaattttgcatgagtctcaccagcaaatattatacaaagatgttgtgacaggctgtcaggaaacttctagagaagtgagaggaggaggttagtagtggcagttgggtgtctcctctcaaatgaaactgccactccttgtagttctctgacttggtttgcataagcttactgccaggcttagtttagggacgttttgggtaagaagcccttgggatattttgcctgttaaagtggcatgagatagggcaagccgaggcttgtgctctgagttgtttcttgtgttgagagaaggtttaccttgtcatcagcttggggatatttaaatggttgcaaatatgtcattttcacagggatccttaaaggtgctgaaaatattcacataaagatatcttgccacttaaatgcaggctgtcctttccagcatggggatatctgggtggataggagcatattacattttacacttaaatacagctttgtagtcgctgtacaatttagcctaaaaaggtgttagttctacatcaacatcgtcatctgcatcaatgtataaccatcctgttatggagacagtgattttgctcttaaatctaagatgatttttgcccaagacaagttcacaaacactctcccttatttttctaaaaattcaaatgactttatgatattaagttttgtgcttgggtctgtttgtctacaaatggactgtagtagtttgtgtttattttattttgttttgttttcttttcttttattttttaaataaaaatacatctttatgtgtaaaaaaaacaaagaacaaaacccaccatttttccattataaaaatccataaaaagaatcgtatgaattagaggctgcatttgcaaggtgaaaggctgaaaaggttgaatgatgattaaaactgtacaaattctttttaaactaagtggaacctaaattaagtaaacactgttagtcagtgctatgtaacgtggctataaaattcagcaagtaaccacaaaattctttccttccctttttctacttctctgacccagagcttttctctgtactcagactggtcttaaacttttgatccctcttttttggggcagaggggtcaaattaccctttcacaggggtctcatatttgacatcctgcatatcaaatatttacattataattcataatcgtaccagaattacagttatgaagtaacaacaaagtaatttcatggtcgagaatcatcacaatgtgcagaactgtattaaagtgtcacagcatgggcaaggttgagaaacactggtctagaggcattccttgtggtgataaaggtggcagtgggcattatctttctgtctccacaccactagcaaaatgtctccatatgtaaacatgtaatattagacagcctgagtctgtagtcctgaggcaggatctggctccagaacaaagcatctcttattccctgagaggcaagaagtgtgtttagctctgactgtgatccccaactctctcctttctgactctgtctcctagagattctgtctctgggcttttcaacacacagactcctctgaccttgctctgggtgtccctgtaaataatgccctcaaaactcagagttgtaacaccatggggctcacctaccctgaggatcactgtctgatgtgtggtgttcagggcaagaaagaattggtaatattttctttttgttgtttttgtagttgttgtgtgtgtgtgtttgtgtgtttttttgttgtcatcttttatttccaaattgattcccgctggacagtaaaactggtctcatcatccagccccttttggctttgttaaaatctctttgtctacagcattagtttcacttcattacagtctaaagaaatgcctttcttacaatgcttcagtttgagtcaaagaaatttgcacaggaaggaggagctcaagctaccggattggccggttgggttgagttggctaaatcccatatatttgtgcttgtcagctttcaagtttcaatcctatagtggtaactcagcttctcagctctgagatgaacattacaagggcttccctacctatgctcagcaccacttgcagctgcaggagggagaagtgggtatgtattcaagagtatttgaaccaaactataagagcagagaggaacttcaccagggacaggaaggcaaaagagctgaaccttgaacaaaagagtaacagaagggcttctgtgagcctgtcactgtgggcctgcagagcaggagaatgcagttgggattagctatgaggttgttacattagttattctattggagcatacaatagttctcaggcaagagaaatgaacagtgagtcaccttctaagagccagagctgtagctacagctttctttctttgtacttatcttgctagtccactcttctcagagatctggtaaattacagtctggtggattacaccaaattgctgtagtaaaaatttgctttacatgtccctgagtgaagaaaactcagacaacagctttgcaatgtgcatagtgacagaagttgcctgggaagcttggagcttgtgttttgcaaatccattgtaattaaaattgaattgtaaggaggtggcatggggtgggggtgggggtgggggggctgaaaacttccctggaccaattccttcccattttgagttcttgataagttacagaaaaagaatattcccgaaacacagactgttgagaaggattcaactgcatgaattcagaactcttcagctggggaacagggtacccgtaagtatagctttacaaggtaagtctggtcttgaactttctaacgaaattcaagacagtctatcagaagtaaagtggggaatagctttataaggttcgtctggccttgaactttcttatgaaattcaagatagtctatcagaagtaagtgggaaatagctttacaaggtacgtctggccttgaactttctaacgaaattcaagacagtctatcagaagtaaagtgggaaatagctttacaaggtatgtttggccttgaactttctccagtgttaggagcctttttgttccttttcacatgttatcaagtggttaaggcagggctgaaaattctggatgaaattcagggcaatctatcagaagtaaagcggggagagagagtaggagcaaagaggaaatatggtacacaaaataagtatacaggcctttccacgggtcttgaacccgaggaaaagtttaggtcaggtaagaatacatggggagagattagaaggaaggaaaagaaaaaagaaaagaaaaaagatcaattagcggaggtttctaggagaaggagcctatactcatcactagatgagctcaaggagccagctcttagtagctctgaatcagatgaagaattctcctctgaagaaacagacttggaggaggaagcagctcattatgagagaaaagggtaccagccagataaaatgctagttaatcagttaaggaaaaagccaaaagtggctggtgaaggccagcatgctgctcggcctcatggtagtctgcttcaaggtcatagtgcacttctgccctattcggagcccccgccctgggtaaggcgtcagcccggcgcagagaggcaatggacagagaggcaatgtgaagactcattcattcaaaaggaggaacaaaggaaaatgcaacaggcatttcctgtctttgaaggagccaagcagtgttggtgcatgccattaatcccagcacttgggaaacagaggcaggctcttgcagcctacaaggtcttattgtccacactggagttgtagatcaagattataaagggggaacttcaggttctctgttcttgtcctcaagttgtcttttctatatcacaaggggacagaatagctcaactaataattttgccaagcctacatggctgttttccttcctctggtattcctcgagctgccagcgggattggttctactgaaaatgattctgattacttaataatgcctttagattgttgtcaaattttatctacgcctcatgtaggggtaaaccctcgtggcgtcaggccattacaggtctggcaaatggatgtcacgcgtatttcctcctttgggagaaatcaatatttacatgtctctattgacacctgctctggcatcatgtttgcttctcctttaactggagaaaatgcctcacatgtgattcaacattgccttgaggcatggagtgcttgggggaaacccaaactccttaagaatgataatggaccagcttatacatctcaaaaattccagcagttctgccatcagatggacgtgacccacctgactggacttccatacaaccctcaaggacagggtattgttgagcgtgcgcattgcaccctcaaattctatctattaaaacagaaagagggagtcgaggctctaccccgagtaccaagagtgtctatgtctatggcactctttacactcaattttttaaatcttgatgctcatggccatactgcggctgaacgtcattgttcagagccagataggcccaatgagatggttaaatggaaaaatgtccttgataataaatggtatggccctgatcctattttgataagatccaggggagctgtttgtgtttttccacagaatgaagaaaacccattttggataccagaaagactcaccggaaaaatccagactgaccaagggaatactgatgtccctcgtcttggtgatgtccagggcgacaataacaaagagagagcagcgttgggggataatgtcgacatttccactcccaatgccggtgatgtataatgctcaagtattcccctgcttttttaccactaacaaggaactgggtttggccttgttcagacagccttggctctgtctggacaggcccagacgactgacaccattaacacattgtcagcctcggtgaccacagtcatagataaacaggcctcagctaatgtcaagatacagggaggtctcatgctggttaatcaacacatagatcttgtccaggaacaactagatgtattatggcaaatagctcagctgggatatgaacaaaagtttccgggattgtctgttacttccattcagtatgagaaatttactagggcagctaatttgtcaaaaagtctttctcagtatatgttacagaattggacgactgaatttgaacagacccttcgggaattgagacttgccatcattcaggtcaactccacgcgcttggacctgtccctgatcaaaggatttcccaattggatctcctcagcattttccttctttaaagaatgggtgggcgtgggattacttggagatacactttgctgtggattagtgttgcttctttggttggtctgtaagcttaaggctcaaactaggagagacaaggaggttattgcccagacgcttgcagcactagaacatggtgcttcccctgatatatggttatctatgcttaagcaataggttgctggccattcagctcttgcaccccacgaggctagtctcattgcacgggatagagtgagtgcgcttcagcagcccgagagagttgcacagctaagcactgcagtagaagggctctgcggcatatatgagcctattctagggagacatgtcatctttcaagaaggttgagtgtccaagtgtccttctccccaggaaaaacgacacgggaccagaccaggacccctctgggtgatgagcctggaaggaggttatgtgtacggctcctttacctgcacactggggatttgacctctatctccactctcattaatatgggtggcctattgctcttattaaaaggaaagggggatatgtgggaagccgccctcacatttgccgttgcaagatggcgctgacatcctgtgttctaagtggtaaacaaataatctgcgcatgtgccaagggtagttctccaccccatgtgctctgctttccccgtgacgacaactcggccgatgggctgcagccaatcagggagtgacacgtcctaggcggaggataattctccttaaaagggatggggttttgccattctctctcttgctctcttgctctcttgctctcttgcttgcttgctctcttgctcctgaagatgtaagcaataaagcttttgccgcagaagattccagtttgttgcgttcttcgtggctggtcgtgaacccgtgtaagtgaatataatggggttttctacttcagccttcagaaagtaagcaaaattatgtttcttgtgtttcaaactgtatatgcttcattatattgtgttcctttattttcctttttctctcatttctgtttcttcatctctttttgtcatttattgaagaatactggattttgagaaacaagattgatatttatcaaaatacaaaattcacagcaaatgttaatgcttatcacttaagccaagtattctgactgaaactattattattattactgataatgatgatgacaattgattgattcttcagcatttccaataatgttaggacaatgacatctcaagaagaggaaatatgaagcatttagtcaatagaaactgagtttagataaagaagcaacaggttaaatctttgaaagcttgaacttgcatattgtttttgtgaggtcattaagaaatctggcagttgtgagggtggtggtggtgcttgcctttaatcctagcacttgggaggcagaggcaggcggatttttcagttcgaggccagcctggtctacaaagtgagtttcaggacagccaggactatacagagaaaccctgtcttgaaaaacccaaaaaaaaaaaaaaaaaaaaaaaggaaagaaataaagaattctggcaggcagccttagctagttaacgaatatattaatgcatgcgtatcatggtggattatcttagggtaaggagctaggtctgttttctagctgtcaagctacaatagccaatggtgtcagaatcctggggaagaataaattttaatctttgagttatatattaattaaaaaatgacagagtttatctatagtccaaacagttcccaggtccctatgatctgcatggcaacttgggtggagtcactagggctttcaagcccagaagaaggaaggccttgccctccttggaacaggtaatgcctggaatgagaaattattgaccttcactcaggcaatataagtcacttgactcttagaatatccagttttgtccacagtgtttctcagtggttgtcataccacaatctaggcagtctcttgcagctgtgtctatatctcccgagtccttggggatatgctgttaggctttgggagattctgtctgtcataaacgtattaattattagcagacttgtgagaagattgaaggctatatcgattggtcatatctgagtcagaaaacttatgtttgttaaattatttgtttgagaatgtatatagtaaatatagcacaatataatttgctggagctggggaattttgacccgttctgttgctggtccacagagcgagacaggcatgcatgcatattttgttaaggcaccaggcaagtgcctagtccaggggcgtggcatgtgcatgcagcctgaatagcacagattgtaaggagtcacaataacagcttgcatgccccaggtagctcaggtggtgatggtgtcatggggttggggtggtcctggggtgtgcagggctcatacacaagtaggtggggtggggcttcctcctagcagccagaagctctggcacagtgcttccagctgcaggctggtgctgccctatctcacctagtgggtaagggaagggaagtacctgagttagctttcagtctcctagcaaattgtgcaatatcccaacagcaggcagctcatgctcatttcatgagtaatgagcagagtgtgtgggaggagagtgagagagaagagagagaaggcagagagagagagagagagagagagagagagagagagagagagagagagagagagagacccatgcacaggcacgtgtgcatgggaatgagcacaaatagcagggcagacagagttcctggcaggaagcaaggggcagggccagacctgcttttcacttggtgaaccaggaacagaccaaatagcaagagaatgagggtattcccagctggcagcagccaccaccgcaggggggctgttagcaagcaaactatggaggggtgggggtgggggtgggggtggggatggatcactatctagagagttgttttaaagtgccagtttagtggccatgtagagatagtccaggaaatcccagtaaatagggacaaggcagcgaagaccaacccatggatgagaatattatcctacacctaccagcattttaaggatactattaataaccagagaggctgacagccaggccagacaaccaggtcatcacatgatgggctgggcctaagctctgggcaggtgccttgagcaacagagagcatttcaccagtcctgggatttctcaacagagagaaaggaaccttcccagaggagagggggaaatctcaccaaagggaaagtgtcctagggaaggaccagggtagctccaagctcaagaactctccccggggaccgtggggacatttacactggccagtgtgggcagggtgcttaccagttctcacaggtttgggctagtgagcattggctctccatgtggttgcaggaaggatgcagggaggatgtaaacctgttgagtttctaaatctgagtctcagtaccaaatgttgtgcttataaaaagataaggagggaaggaatttgattggtggatgtgtagcaaggtatggtggaaggggctgcctctgtgggcccatggataggcatcccttccccctgaggaacaagccacatgcatatagtatattcagggcatggggaggggagttgagagggtaggagagagagaggagaaagagagagagagagagagagagagagagagagagagagagagagagagaagactagagtagaggctgaccatgaatgcatagagaaaggggggaggggaagggggagagaaggggaaagggccccagagaacatggtgagagcaagaaggcaagagagcaagagagcaagagaacagaggaggggagcagccccttttacaatgagtcaggcacaccaggctgttgccaggtaactgtggggcagagcttagacaaaaggtgaacaccactgatctaagaatagttatgtattcagaaacttgaaagcagctcaaaataaaatatctgcctatattttgcagaaggtttttaaaaaagccaatggtaaacttgtagattagattagctcaagcagaaatcagttggtgacaattgagctatcagtaaaaaacaaaccaaaatactacaactgtgtgatcagactcttaagctcctaaaataagctggactacagctggttttatggcttactctagagcttgctgagagcccaaagctgaacaacatttggacagagtgacagatgatcaggggcaagtatatggtcaaatttttcctttgtaatgcccctgcctcagtgctcagtcatattgattaacactgtcaacattggtggatatttgtgttgtgaatttaacaaacattggtaattaaaaaatatttttttattattctttaatcttcttttacaatccagtagttatcccattcccagtctgccctccaactgttcctcatcccattcctactcccttgagttcaaaaggatagccccacccctcaacccccacaccaccaaacctccccacattctggggcctcaagtctctagagggttaggtgcatctcctctcactgaggccataccaggcagtcctatgctatatgtgtgtcggggcctcatatcagctagtctatgctgcctggttggtagctcagtgtctgagagattttgggggtccaggttatttgagactgctggtctcctatggggtagtccttctcagctccttccagcctttccttaattcagtcacaggggtcagcagcttctgtccattgcttgggtctaagtgtatgcatcaggctctttcaggtgttatttgagggcagtcgtgctaggctcctgtctgtaacacaccatagcttcagtaatattgtgtcaggccttggagcctcctctagagctggatcccaatttgggctggtcactgaatctcctttacctcagtctcttctccatgtttgtctctgcagttcttttagacaagaataattctgggtcataggtttcgaccccatccacttgatgccctgtctttctactggaggtagagtctacaagttccctctccccactgttaggcattttgtctagggtccctcccttttagtcctgattgtctcttaactcccaggtctgtggtaattctagaagtccccaacccccacccctggctaacctcctgcatacccagattccctgtttctattctttctgcctgccctcagggctttgaccctgttaactcactaatacctgatcatgctccccttttcccctccctgtcccctctccaaccaaggtgcctcctccctctgcctcttgtggttgctttcttcttcctcccaagtggtattgaggcatccacacttgggcccctcagtttgttaaccttgacttctatcctgggcattctgtactttttttggctaatataaacttattagtgagtacatagcattaagaatctctaaagtcactgccaatactcataatgatggaaacacagattttcatgtcttcttgtatgaatatgtgggtaggagggccagagcatataatatgtatattctcatttgcagaaagtagtgatgtgttttcaactgcctttttccaatcccagtagcaatgaacatatataatgccattgcatgttcaaatatttggcccattcttattctttttttctctttaagtaaatgaaatctccaaactatcagaatgctctagatacaacttcttgttgatctatatcttacaaaaattgcaaattaactttgtcgaactcggaaaagaaggatttctttttttgtttttgttttttgttttttgtttgatttttgaattagagcaaagtaggcatatttcagtttaagctaatgtggataaggattttgatattacacatgagatatttttattcaaggcaagttcacagagatttttctttttaattttcctcagatagttttatagccctaggcttcatgtttgagtttccttttgtaggaggaggtgggagagagtgagacacagtacagtgtgcgcagcaaggccagggtcaacctcctgggataactaactataagttaggcccacatgtcagacttacttctcaagttattttattattttttttgtatttttcttttattattattatgattatcattattactattaattaggttcatgtatctatgatttcaccaaagccacacttatatctttgtttctgtcactctgatttggtggtatcacttctgcaaatttggcctcattttctaaattgttcagctagactgattctattcccttttcatgaaatttaaaatttactttgtgctagagagatagcatgtggctaaaagcactgactactcttttggggaacctaggttcggttcccagtgtcctcatggcccctcacaaccgtaatctcagctccagggaactcaacatcctttcttgtctcctcaggcagcaggcatgcatacagcacatacacagacacacatgcaggcaaattacccatatgcattatatacaaatacattttaaatgaataaaattacctttctgattttttgaaatgcccaatatccacaaatgtgttccttcaattaatttctcacttgctaatagattttgttattttagactaatattcgtttttcacatgattttggtaggcttgttaaaacatccccatatttcatccaatagttatgccagtgtgctctattacacttatgtgcctttattaattaatgtatttattgactagtttctttgaggttgatccttacatagtccaggttgagttcaaacttccaatgtagccaaggctagccttgtcctcctgactccagcttctgcctccctagcactggaaatataaaagtgtaccaacctgtttgtttcattgactggaacaggagttacacaggtggttatgagctgcccctttaagagctgggatttggaaatcaacaagggtcctctagaagagcatcaactgttcttaacccctcagtcctaaccagtatattctgatggaacaaaatctatggatagcttggttgttgtttgctttcaacctgatctttactccttctgtttcttgcctcttcatttacccttagttcaatgactggacgactccatgttttcttttcctctagtcttctgtgagtgatgacatcatttatagaccaggaccttctgtaaaggggtttgcagtgggtgaatacaagcaaaatctacacataattgttaaatgtttcttgagattgatattctcatattaatattttttaagtaaaatggttcaagaaaaatgtctcagaatcgtctcccccaagtattctgctctgctttactgcctctgtggagtgatcatggtcctcactgtagctgtagttgctcatttttttgctttcagaggcaagtgacttattgtacaaattctgtggtattctgtccaccttaacattgtcagttatgttcaatgaccactgtgaaacaggcattgtgggaaggactctaaagaaaacacagtggaagttcctgttctttggaaacttaggtttgatcaggaagatgctgagaaggaatagcacaggctgtgatgggcacaggaggcccggctcatcatccctgggaagataacacccagcaggctctacacagagatgcagaggacataggtacacttggggaaactgtctaaggtagagaacaaggaaagaaaaactccaccgaggaacctcaaggaagggtaaagacagagaagagtaatgtggtcaggaaggtacagtgccatgatccatgatccatgagtttagttaccaggctcaactgtactttgaatgtattaaaagcagtttctgaagtcataaatttataggttttagtacctcactgttcagaatagtgtaataaaatcttacactgtcctcttaattttgtgaatcatcctttagtgcaacatgtctattctgtatacagtacctacccaatagttctcactactgtctcaattattaggatggctgtcaataggtgtccctacagagtgatgacatcatttacagaccaggaccttctgtaaaggggtttgcagtgagtcaatacaagcaaaatctacacataattgttaaatgtttcttgagattgatattctcatattaatattttttaagtaaaatggttcaagaaaaatgtctctattagtaacccctattgtagtaactgttgacccaaatctcagatagtgatgctagtatagaaatgcacttcctggaagcctactgaaagccagcatctgagactgagtgggacataggcccaccatgctcgggggaggattcctacagatcacctgggaaagctacaatcacattcacagctcacagctgagctcaggagggtattccaaaaagagccaaagcatgtgtgctttaattcattgtattgtctaaattttagtgagaatgacagaacagatctcaatcaaaaatacctatgctgcttgcccgagaaactggattggatttggaaataaatgattttacttttctgaatactcaagaaaggggacattcagccagaccttttgcatggcacacgaggtccaactagatcagtttgacaacaaggaggagctgtaagaaatagtcagggattggtttgtctgttgaaaattatattaccttgagatagagataaagcatgaggaagaatcccatcccaagcatgtggagacatggggaatgtgtgagtgtgtaccaattgctgatgctagacttctgagtggagtcctgagacattcaagaaatattctctcacatagtgctcataatcatctagaaggtcagatatgccattttactgggatacctggtggtcatgagtgttttcctgttaaatgacacatgttgcatactgttaataactgcaatagaaagttagcccagaactattctggccacagaagaatgtatcattacatttgatactttaattaaaatggcatactttacaatgactgatgtcaagtggatccactgagatcgggagactaatatacctccaaattctgtgaccctcagttacaccctcctgttacctctataggtagctgtggagtagagagactccaggattatatgaaacaaagacacccatgtattttggctttttgtgttttatgacagaatttcctagggagatacgaggggacttttgactactggatcggcctgcacagagcgtcgtctaagcacccttggatgtggacagacaacactgagtataacaacatgtatgttttcacaatgtcttcccttctgtgttcatgcattgtgacatgcatgagttgtggctatgagggttgaatggttccatgaagccaactgtactggaatggaagaaaaccaactcttggactggaaggtgtgccgtgggcttaggttctgtgcctcataaaatagcctatccctaaaaaattccacattctaacaattttttttttaatttttcaagacagagtttctctggatagccctggctgtcctgaaactcactttgtagaccaggctggcctcaatctcagaaatccacctgcctctgcctcccaagtgctgggattaaaggcatgagccaccacaccaggcacatcctaacaaatttaaatcaattggatactctcccatctactagccatcttcttcaaagcatttacatagtgttatttccctcctaatatttagcaccatgttggcatctgaggtagatgttgtctgctatcatctctttaaaatctttccttgatgataactgccctggcatgatgtagtcagaactgatggccaagggctctaaaaccataggaaagtactacagaactgcaagcctgagaattatcagtcttctgtttgcaaggttgtacctgttcacagaagcagagactccaggggcattgagagtgtctcctaaggccttgtcatcaatgatcactggggacagctcttgaatgtgagcatagccattttgaacagacccatttcattggaagggtaaaacaaagaacctttcatattcataattaaatactttctagcaatttattaagtggtatattttctctcacttttttagatgttcaaaaatacttctagagggcattgaaaattacccttgtgaagctacccagtgcttcatatcatttgaacatggcagcaaacattgtgcacacattccagggtgaaacacagatatgtgacagaggtatggtgatcaaaatcaaatcctgaggatgtgcaagtctctaggtgcaaaagtagtgcatgggattctggtggacgctgctgatccatatcataaatatgtggtgaagatgagtgagataggagtgaatgcaatggcagactctgcagaaatctatttatttatttatttttggctttagggtttccatccaaggagttgaaaaacatggttttctgagtgacaatgggatcagcagtagcagggactacataaataggaagtggatttgtagcaagtccagcaactaaactttatagtaccagcagttttgtacctgggtagagagcacgtcatagcaatcatgaggaacacataacaagttttctactgttgctgcttcattaatgatctgctaaatttatcatcacaagtagtgggtaatacatggtgacatcaaagatgaaaactctctctgaggactgttgatgtgtgtacttgggagatcatgaagagttctacattaaataggtattcagctgatgtggggcattggtctctgcacagacaggctggtctccaggtgagctgaggtctgaaccctgatggtcataattcactttcatgacatggtaggtgttccttcatgctccttgaactctggcctctgcctaagttactgccccccacaccctccacaannnnnnnnnnnnnnnnnnnntctgctccatcaagatctactgcgcaatctggtcagtgttgggaacctcttcctttatccctctctcccataaccccggggatacagggtgtggccctggggcccccaaggtcaggggctgccccttgaccacccctcaacgagtgggtcagaggcttggatgcccatccgaggctgagtggaaagtgtgtggcagctgtcctgcctccacctgcccagagcataggaggaactctggctggacataggccattttccactccctgtgtaccagggtccccttttttagttcccaacaagctggtactcatatctaaaatataaactaaatcacatcagtattagtaacatctactttttttctcttttcttattattttatttatttgcattccaaatgctgtctcctcatggttcgcctttccagagttcttcactccataccccctcccctttacttctgagggaatgttctcctcaccaccatcccctcacccatccccatcctaccccactcattctctggggaattagatctctacaggattagatgcatcctcttccactgagatcagacaaagaagtcctctgctacttatgtcctgggggccatggacaagcctatgtattctctttggttggtggcttagtctttggtcctaacgggccaggttacttgacactgttggtcttcctatggagttgctatccccttcatctcctttaatccttccctgaacccgtccataggtgtccctgacttcagtccaatggttggctgtatctgtatctgtctaagtcagctgctggtagagaatctcagaggatgcacaagtctgagtggtgtgaagtctaactgtcctctgaggggaccattacaggatgtaaagaaggaagatgctgttattccattatctaaactaaggcacacaagtgataaatgtattgcttgtcttgacttaattgactacatgcagcttgcccactccattgttcccttattgttgtaaaattctgggccaaagtcttacaggggacctggctgcaaagactgattcaaggtccctgaaaccaggtgtccctgacaagtcccagtcactaatgttaacttccttgtcttaagcccttgtgtataaatatgctttgtcaatgcaacagtctaccctgctccccctcactttgtgtttccattcaataaaatgtcgtataatcttccttcggagttgtagtttagaccctgaattagcagcctcctggagcattcagaaaactaagcttttatttttcatcttctttctctaaggtgagttttctcagcttctaccctgaaccctacaaaagttctaatattctgtgcctgttttgaatttgtttttattattggacaaacacaagcatatctcattcaggaaaatgtgtttcttagtgttctgtttctatttcatttcaccttgttattttttaaatccatttcattttagataaatggtgtgactctgttcctaatataaagaaatactttctcatatcgaaattacttttcatttagcagttttaattattgtatttctagcacatgttaatctcaaagatggaaggagaaaaatcactgacccaaatcattatggccaaacttattgaagcaagtaattaattgaaacaaaatcatggttactaagatgacataacaagatagtcatagcaactggtagtcataccaagttagtcatagatggtcatataacccgttgaaactaaggtagggttttttttttttattccctcccccccaaagttcggtttttattatggttataagccagttcttgaagcaaagacatgattgccatttctggaacatacagaaccacttgtagttaaagttccaggtgggataaagtccaatccttgagaaacaggtttgactataaacaggaatgaacctagtttgtctttactataagatggcttttaagcctaagatggagtcagggtgattcttcnnnnnnnnnnnnnnnnnnnnnnnnnnnnnnnnnnnnnnnnnnnnnnnnnnnnnnnnnnnnnnnnnnnnnnnnnnnnnnnnnnnnnnnnnnnnnnnnnnnnnnnnnnnnnnnnnnnnnnnnnnnnnnnnnnnnnnnnnnnnnnnnnnnnnnnnnnnnnnnnnnnnnnnnnnnnnnnnnnnnnnnnnnnnnnnnnnnnnnnnnnnnnnnnnnnnnnnnnnnnnnnnnnnnnnnnnnnnnnnnnnnnnnnnnnnnnnnnnnnnnnnnnnnnnnnnnnnnnnnnnnnnnnnnnnnnnnnnnnnnnnnnnnnnnnnnnnnnnnnnnnnnnnnnnnnnnnnnnnnnnnnnnnnnnnnnnnnnnnnnnnnnnnnnnnnnnnnnnnnnnnnnnnnnnnnnnnnnnnnnnnnnnnnnnnnnnnnnnnnnnnnnnnnnnnnnnnnnnnnnnnnnnnnnnnnnnnnnnnnnnnnnnnnnnnnnnnnnnnnnnnnnnnnnnnnnnnnnnnnnnnnnnnnnnnnnnnnnnnnnnnnnnnnnnnnnnnnnnnnnnnnnnnnnnnnnnnnnnnnnnnnnnnnnnnnnnnnnnnnnnnnnnnnnnnnnnnnnnnnnnnnnnnnnnnnnnnnnnnnnnnnnnnnnnnnnnnnnnnnnnnnnnnnnnnnnnnnnnnnnnnnnnnnnnnnnnnnnnnnnnnnnnnnnnnnnnnnnnnnnnntgaacaatgaattaattacaaggtctgagctataggttttgtttgttcggtgaataaagtgaagacaggacaattccaaggtatgcataagggggagactttttattgtagatatgtgagagagtacaggcagaggcatctagaagagtctacagcagggaaagaaactaacagactgagtgtggctagcctattcagcgtggccaagaaagatgagagaaggaaggagaatgagagaggaagacatgagacagagagagagagagagagggagagagagagagagagagagagagagagagagagagagagagagagagagagagagaatcactaaaatggcagtgttgtgtagggatgagatgctgacagaaacaaggctaatgagctggagaagtttgtgggaggggtcagggtaagaagagctgtgaggagccaaagaactaagtgagcctggaggccagcttgcattttgttatgatagtagacatgaaagtcagccatttgtcctgagtttgttttctacccgacagttggtttatttgagtttgggattttgttttctttttgatattttcttttttctttttctttttcttttgctttttggcttgtttttcgtgtgtgtgtgtgtgtgtgtgtgtgtgtgtgtgtgtgtgtgtgtgtgtttagcttgctaggacactctggtgaattagaggatgttgctgtagaacatgctccttatgtccctgagtgaagaaaactctaacagcacagctttcaatgtgcacagctaaggaagttacctgtggtactggggcttgtgtcttgaagatccacagtgcttgaaaagaaaggggagaggtgaggtgcagtgtgaggctgtagcctcccccagcctttagcaggctgattcagaccttgctgccactgtgaaggagaccacttggagtgacctagatggttctattgttctgtgctatggctgagtggctgaacctatcttcctgagctattcctgagagagctgacaacctgtggaattgaagacctaatgctaagagctctggcagactaagtgctagctacttagcaacaaagcatcaagaagcctggcaagtcaggggatgggcctacccctttgtaagcacagactcttagtaaacattgggccttgatcagaattttgtcttggtctcctttctattttttttattaggtattttccttgtttacattttcaatgnnnnnnnnnnnnnnnnnnnnnnnnnnnnnnnnnnnnnnnnnnnnnnnnnnnnnnnnnnnnnnnnnnnnnnnnnnnnnnnnnnnnnnnnnnnnnnnnnnnnnnnnnnnnnnnnnnnnnnnnnnnnnnnnnnnnnnnnnnnnnnnnnnnnnnnnnnnnnnnnnnnnnnnnnnnnnnnnnnnnnnnnnnnnnnnnnnnnnnnnnnnnnnnnnnnnnnnnnnnnnnnnnnnnnnnnnnnnnnnnnnnnnnnnnnnnnnnnnnnnnnnnnnnnnnnnnnnnnnnnnnnnnnnnnnnnnnnnnnnnnnnnnnnnnnnnnnnnnnnnnnnnnnnnnnnnnnnnnnnnnnnnnnnnnnnnnnnnnnnnnnnnnnnnnnnnnnnnnnnnnnnnnnnnnnnnnnnnnnnnnnnnnncccactccccctttttggccctggcgttcccctgtactggggcatataaagtttgcaagtccaatgggcctctctttgcagtgatggccgactaggccatcttttgatacatatgcagctaaagacaagagctcccggttactggttagttcatattgttgtttcacctatagggttgcagttccctttagctccttgggtaatttctctagctcctccattgggggccgtgtgacccatccaatagcttactgtgatcatccacttctgtgtttgctaggccctggcatagtctcacaagaaagagctatatctgggtcctttcagcatctgggttctttccagattctggctattataaacaaggctgctatgaacatagtggaacatgtgttcttcttaccagttgggacatcttctggatatatgcccaggagaggtattgcgggatcctctggtagtactatgtccaattttctgaggaaccatcagactgatttccagagtggttgtacaagcttgcaatcccaccaacaatggaggagtgttcccctttctccacatgctcgccagcatctgctgtcacctgagtttttgatcttagccattctgactggagtgaagtggaatctcagtgttgttttgatttgcatttctctgatgattaaggatgttgaacattttttcaggtgcttctctgccattcggtattcttcaggtgagaattctttgttcagctctgagccccatttttaatggggttatttgattttctggagtccaccttcttgagttctttatatatattggatattagtcccctatgcgatttgggataggtaaagatccttttccaatctgtcggtggcctttttgtcttattgactgtgtcttttgctttgcagaagctttgcaattttatgaggtcccatttatcgattcttgatcttacagcacaagccattgccgttctattcaggaattttccccctgtacccatatcttcgaggcttttccctactttctcctctataagtttcagtgtctctggttttatgtggagttccttaatccacttagatttgaccttagtacaaggagataggaatgtattaattcgaaatcttctacatgataacagccagttgtgccagcaccatttgttgaaaatgctgtcttttttccacttaatggttttagctcccttgtcaaagatcaagtgatcataggtgtgtggattcatctctgggtcttcaattctgttccattggtctacttgtctgtcactataccagtactatgcagttttgatcacaattgctctgtagtacagttttaggtccggcatggtgattccaccagaggttcttttatccttgggaagagtttttgttatcctcatttttgttattccagatgaatctgccgattgccctttctaattcgttgaagaattgagttggaattttgatggggattgcattgaatctgtttgattgcttttggcaagatagccatttttacaatgttgatcctgccaatccatgagcatgggagatctttccatcttctgagatcttctttaatttctttctttagagacttgaagttcttctcatacagatctttcacttccttagttagagtcacgccaaggtattttatattatttgtgactattgagaagggcgttgtttccctaatttctttctcagcctgtttatcctttgtgtagagaaaggccattgacttgtttgagttaattttatatccagctacttcactgaagctttttatcaggcttaggagttctctggtggaatttttagggtcacttatatatactatcatatcatctgcaaaaagtgatattttgactttttcctttccaatttgtatccccttgatctccttttgttgtctaattgctctggctaggacttcaagtacaatgttgaataggtagggggagagtggacagccttgtctagtccctgattttagtgggattgcttccagcttctcacaatttactttgatgttggctattggtttgctgtagattgcttttatcatgtttaggtatgggccttgaattcctgatcttcccaagacttttatcatgaatggatgttggattttgtcaaatgctttctcagcatctaacgagatgatcatgttgtttttgtctttgagtttgtttatatactggattacattgatggatttccatatttgaaccatccctgcatatctgggatgaaacctacttggtcaggatggatgattgttttgatgtgttcttggattcggttagcaagaactttattgaggatttttgcatcgatattcataagggaaattggtctgacgttctctttgttgggtctttttgtggtttaggtatcagagtaattgtggcttcatagaatgagttgggtagagtaccttctgtttctatttcgtggaatagtttgtgaagaactggaattaggtcttctttgaaggtctgctagaactctgcactaaacccgtctggtcctgggctttttttggctgggagactattaatgactgcttctatttctttaggggatataggactgttgagatcattaacctgatcttgatttagctttggtacctggtatctgtctagaaacttatccatttcatccaggttttccagttttgttgagtatagccttttgtagaaggatctgatggtgttttggatttcttcaggatctgttgttttgtctcccttttcatttctgattttattaattaggatgctttcccctgtgccctctagttggtctggctaagagtttatctatcttgttgattttctcaaagaaccacctccttgattggttgattctttgaatagttcttcttgtttccacttggttgatttcacccctgagtttgattatttcctgccttctannnnnnnnnnnnnnnnnnnnnnnnnnnnnnnnnnnnnnnnnnnnnnnnnnnnnnnnnnnnnnnnnnnnnnnnnnnnnnnnnnnnnnnnnnnnnnnnnnnnnnnnnnnnnnnnnnnnnnnnnnnnnnnnnnnnnnnnnnnnnnnnnnnnnnnnnnnnnnnnnnnnnnnnnnnnnnnnnnnnnnnnnnnnnnnnnnnnnnnnnnnnnnnnnnnnnnnnnnnnnnnnnnnnnnnnnnnnnnnnnnnnnnnnnnnnnnnnnnnnnnnnnnnnnnnnnnnnnnnnnnnnnnnnnnnnnnnnnnnnnnnnnnnnnnnnnnnnnnnnnnnnnnnnnnnnnnnnnnnnnnnnnnnnnnnnnnnnnnnnnnnnnnnnnnnnnnnnnnnnnnnnnnnnnnnnnnnnnnnnnnnnnnnnnnnnnnnnnnnnnnnnnnnnnnnnnnnnnnnnnnnnnnnnnnnnnnnnnnnnnnnnnnnnnnnnnnnnnnnnnnnnnnnnnnnnnnnnnnnnnnnnnnnnnnnnnnnnnnnnnnnnnnnnnnnnnnnnnnnnnnnnnnnnnnnnnnnnnnnnnnnnnnnnnnnnnnnnnnnnnnnnnnnnnnnnnnnnnnnnnnnnnnnnnnnnnnnnnnnnnnnnnnnnnnnnnnnnnnnnnnnnnnnnnnnnnnnnnnnnnnnnnnnnnnnnnnnnnnnnnnnnnnnnnnnnnnnnnnnnnnnnnnnnnnnnnnnnnnnnnnnnnnnnnnnnnnnnnnnnnnnnnnnnnnnnnnnnnnnnnnnnnnnnnnnnnnnnnnnnnnnnnnnnnnnnnnnnnnnnnnnnnnnnnnnnnnnnnnnnnnnnnnnnnnnnnnnnnnnnnnnnnnnnnnnnnnnnnnnnnnnnnnnnnnnnnnnnnnnnnnnnnnnnnnnnnnnnnnnnnnnnnnnnnnnnnnnnnnnnnnnnnnnnnnnnnnnnnnnnnnnnnnnnnnnnnnnnnnnnnnnnnnnnnnnnnnnnnnnnnnnnnnnnnnnnnnnnnnnnnnnnnnnnnnnnnnnnnnnnnnnnnnnnnnnnnnnnnnnnnnnnnnnnnnnnnnnnnnnnnnnnnnnnnnnnnnnnnnnnnnnnnnnnnnnnnnnnnnnnnnnnnnnnnnnnnnnnnnnnnnnnnnnnnnnnnnnnnnnnnnnnnnnnnncctgccctccgcggagtcccggaaccaagggtggctcccgccagagcctgaggaagaaacatctcccggccgggcggacccctgtgctctcaccaggaaggtggccggttgtctcttggtctcctttcttctctctcatacagctctggccttccactcaggaacctggttcctgtggcttcaggcagctacatgaggctgggtacccagaagcaccaacaaattctctgacgttttcggtttatggtaaatcaattcttggccttttggtgaagatcaagtgtaggattatggtaaattatggaaatgaagaatcctgtgcgagttctgtttcaatcttctgaaggaaatctgtcttctgtggtttgaaaaatgtctgtttcagagttttgttttattcatttcttccctctttccttactttaactcctgtttacttgcttgtttattttagcaaaattatattgggtatcctgggaaacaatgttcatacatcacaaaagagcacgtttgtgaggaatgtaggtttttttttaaaatttaagtcaaatatacccatacctgaaaaaattttctttcttttcccttgcaacaactccaagttttatgagagaatgtagcccagtccaggaattcatcttatcattctatctgggtttgtatatacttgacattttccatttcaaacacctagtgttcccatttcctctctgttccacagttacctggcaatggccaggtatgcctgactcattttaaaaggggctgcttgcccccttcactttttttttcctcttgcttcttgctcctgctctgtcctctcaccgcccttctctctccattcccctcctccctctctgcccacatactcatgaccagcttctactattctactctctctgtctctctctctttgtctctctgtctctgtctctccctttctgtctctaatatcctcccaaatctcctcctcatgccttaatgaactctattctatactaaactgttgtgtgtctagtcccttagggggaagggatgcctcagcatgggtttgtagaggcaccaccttcccacatacctgagtacacctctaccaaccatattccctcttaccttatctttttaataaaacacaacatttggtgctgagattcagatttagaaactctgcaagtttgcattctccctgctaccacatggagagccagtgcttgctctctagcccaaagttggacaactggtaagccctctccccctactggccagtgttaatgtccccatggtcccaggggaagagttcttgagctcaaatctatccctgtgctgcccttgaggatggagacattcagtcttttcactgaccttcattcttggacatttccccttgagtgagattttcctctttagtctgagatggttcctttctcactgctgagaaatcccaggcctgggtgaaccactctctgttgttcgtgacactggtgcagagcttagccctcagaccactatgtgataacctggtgatttggcctggctggaagtctctctggttattaatcgtatcctcaggtcgctgttaggtgtagttaataaccctactaccactcaatacattggtctttgcttccttgtcctgacttactgagatgtcccagtctaattcacaatatgcagcaagcaatatttctacatagtcactaaactggtactttaaaacaactctcttgctagttatgctctgctcccaattcaccctgtgaaaaatgggtctggctctgccccatgcaggggactttgctttcctgcacatgtaatcatctaccaaccatatacttgcactctctcatgtgtggggctcctgtactctgcctgccaatgctgccaccacctgtgcctggcctctcaacctctgccaaagccatgaggaaagcagttttcaccattcccccttgcacttcctgtgctctgcccaggactcatgaagtgagctggaggtccactgctgctgcagcaggaaaagcactcacacagccctgcactgctgttggtgctgctgtcccacatctgagggaatggcaggactgctgcaggcatacttttattcaggtgtctgctgccaggttctcccatctcagtccctcaccgcccctgccttttaaaatccaccttgagtggagttgttagaagatggacctctacttcatgtgcttcctttcccctgccccacacccaccacagactgtgacaggcagggtggggcagtgcctgcccacagccagaagtactgggctggtacttctggctgctaggaggaagtcccgccccacttgcttgcctacctgccttccctcgatcctggtgctgctgggcccacttcatccatgacccatagcaggctgggtgcccaagtgagccacagcacagtcctgattctttgactctgttgcctccaccattgtggctcctcaccatctgtgctcttcaggctgcatatgcacgtcccaagcctttgacacatgcaatgcgtgcctgtctctacctttgcttactggtcaattcccactgcctgcccatctgctcaatttgtgccacaggcctgaacccatttggacacactcacttttctcaccacagtctcaagccaccactgtcagctctctcatttctttacattctggtctacagctactctaagccaagtgtttctctactaatgcaaaatgtgtttttctatattatacaaagtgttaaacttacttaataattaagatgttcatttctatcctgccttgggaaataatgatttttactattactactaagttatgctctatttactatataccttcttaaacaaataatttaacaaacacaagttgtgtaactcaagtatcaccaatctatacagttctcagtcttctcagaagtatgctaattattaatacatttaagtttatgacagacagagactcccaagataatgggtttagctataagagagtgcctggattgtggtatgataactactgagagactgtgtggacaagactggatacctaagagtcaagtgactcatattgtctgaatcaaggtgagtcatttctcatttcacatgtatctattccacaggggnnnnnnnnnnnnnnnnnnnnccatctgtgctcttcaggctgcatatgcacgtcccaagtcctttgacacatgcaatgcgtgcctgtctctacctttgcttactggtcaattcccactgcctgcccatctgctcaatttgtgccacaggcctgaacccatttggacacactcacttttctcaccacagtctcaagccaccactgtcagctctctcatttctttacattctggtctacagctactctaagccaagtgtttctctactaatgcaaaatgtgtttttctatattatacaaagtgttaaacttacttaataattaagatgttcatttctatcctgccttgggaaataatgatttttactattactactaagttatgctctatttactatataccttcttaaacaaataatttaacaaacacaagttgtgtaactcaagtatcaccaatctatacagttctcagtcttctcagaagtatgctaattattaatacatttaagtttatgacagacagagactcccaagataatgggtttagctataagagagtgcctggattgtggtatgataactactgagagactgtgtggacaagactggatacccaagagtcaagtgactcatattgtctgaatcaaggtgagtcatttctcatttcacatgtttctattccacaggggaaaacaaaacaaaacaaacaaacagttctttgtaaaaggctcttggttttctgggcttaaaggccagactgattctgcctaagtttccttggatacctgttgcggatatccctgtggctaattatatttgatgttaattccattctcctgtgaggggctgtgaacaaggaatgagtcagcactgaggtgatttcctgtgaaccttcttcccaccttaatttataaataaaggctagagctggtgattgggcagaggggaaggtggagctgaaggatttgagagagaggggggtggagaaagacagagaaacagagagagagagagagagagacagagagagacagagagacagagacagagagacagagagaaagaagatgatggaggaagaggaagaagggaagaggagcagaagcacctagcctggaggaaactgcaagttattaggggtctctgatactgggatgatggtagtgtagtggtagatctgcccaatctcacagcatgtattcatattaactgagctgtgttttcattgcctgggcttatttgggttagagaattactgcaacagataccacagagaagtgtttagccagtggactatagatgaactctgtcattttaaaattattatgtgcctgctagattaaaatttcttacccagatttctgactacattgacagctaaggaaactgtaccttgacagctaaaaaacagacctagctccttaccctatggtaatccaccactatatttactcattagtaaattcgttagttagctaagactgccagatttcttatagacatcacgataaacgatacacaagttcagatataagctttaatagatgtaatgtattgctttttttttaacctaaaatcagtttccattgactaaatacttcatatttcctcttcttgctatgtcattgtcctaacactaatcaagagagttctttttttttgttttttgttttttcagacagaatttggtaaactgaaatatgtacatgtaatcaggatttcaatgggcaactgccttaacttcaggaaaggctgactctgtgattacacatttgttagaagttatagccattatgagaatactcatagaaactaaacctgacaatgtctggcataggtcactaataagataaagcagtttttattacatattataatataaaacacattccaggcctaccacataatcctaccggacaagcgattgtggagagatttaattgaactataaacaagatgcttaacaggcaaaggggtgggggggaataaaaaacccagagatagattacatagtgctttattaactttgaaatttttaaattctagtgaacaacaaaactatggctgcagaaggacattgggttgtggaaaaaaactgctgaactaaacaagcctatttattttaagcatattctgcattcaaaatggaaacaggaaatgtgttacagtactggaggtgttacacctatatttccacaggaagagaaaagctgtgggttccttccaaatggataaaaatcagatatgaccaagggagagccctgaagagctttgctgcagacaagaaggagactaacaagattaacaaaataggtgatgtatatgtggtgatgtatatatgtctctgtacacagagacagagctggaacctgctgagacctacatgtctatatccagccaataacacttattgagtacaaaattctcattacctgttattacatacactctataagatggcgtgaatggaaaattggattgtagtttgattttatgcgattaaactaatctatgaagaaagacagttgtcttcctttattgatctttactaacaaatctgtgaatcacgcaggctgcattcgaatgtttttacagagttatgcgttgcttgtgaggtttgtgtgttgcagaataatagaggagaaagatagctctgacaagactcacactctgggatgttgaaattctggggctttctattccagctccttatttgtttctatctcaattacattgaagatgtttcctctaaagacttgcttccaggatatttccagaacagctagctctcccatccagcctttcagactgttatagtcaggatatcaactaagccatgaactttcttagcacatagagactagaaggcaaatgatgccaactagccttcctgtgacaaaaccaattttcctatttccctttgggcacccagaagggaattctttaccccaattcagctaaaagaaagcaaaagaagattgttgtcccagtcctttaggttggggtggatggttctggttattttatgaattggagatatgttgtcattttaagggataatttgctaatgttgtagctttggacagggaggaaactagagagcttagactcagggatttctacctttcctttcctcttatctatccttccgtcttaggtaaagtaaagaggagtagaagagaaaaagccagatatagtagtatcatagaaattaaaggagtaggcaaatagggatatgtaatcaaatttagtcttagacaaaacaacgaatagccacatcttacattggttgaagtttttgtaattgatgcaaattaaagttatacatttacattggtacacaatttatagattgatatagatctaaggttttctttattgtgaattttttatattgatgcaaagtttgaaattaatgtgcttactctctgacaggcattgtgtctatgcaacttatgtcgactataatgcttagatgcagtccttctaataactgacattacaaactgcctaggatgattgagtaatgcaagttaaaggccaaatagtaaactcatagttacattatattctgatttgattatgagttactcaattagaaatgactaagaatagttaggatttaacagttcagctgtacttgacatagatagtcttcaaaagcatcagaagtccacagaatatgacatttaaggccatttcattattaaagatcatttgagtagagacatgtcttctcctgacaatagccccttcttcgttcaaagaagaaattgagcatcagtggggtttctccagttgtggccagatagactctggtaagatttgccccaattcatctatagacaaaaatactgtccaggaaaaggacacactatgtggaatttttgactgataacactgtcaagacagggtaagcagttctttataattctgctttacaaaggtctgtcagataatcctggccagaaggctgaagactgatgctataacattttgaggaatgagtgacggtccaggttagttagctgtctctacaaattggttaagttttggaagttattttttgtgatgtttaatttgttcatggattcttctgggggttgaagataagttatagtttcatagtacaggcaagttgttttgtattgagatagatgatatagatttgagaggatggttttcagatggtgaaagaagctaaaaccagaacacaattcaggtagagatttgcaagttctttaagttaggattggtggtagagtgctttatctaaattgacacatatgatggcctgggtgttaagtgtatcttatacttcataatttgcatgactgggatgattgagatcaatttatacctgagagaaaaaagtcttttaattggacaaaaacgaggaatgttgtgggttgccctggggcagtttgtactctgatgttaattctgctttcttaagaggggctaccttgaaaatgagtggatcacatactcaagtgatttcatgtgaccattctccccattttaacttgtaaaataaaggctaaagcctatgattgggcagtggaagggaaatgtgaggctggggcttttagagagtagaggaagaaggatggaggagaggcggttggaggaagatgaatcagaaccacatggcttggagaagccgctggtacaaggaatctcatagctgggaacaaattaatgtagctctgtatctacccaatctagccacacaccttataaatattgtaactgagttgtgtgggttttgcacaggcttattggggtagagatttattgcaacacaagaacacatcaaaaggatcattcaacacgaccaagtaggctttatcccatggatgcagggatggttcaatattccgaaatccaacaacataatccactatataaacaaactcaaaaaatatcatataatcatctgattagatgctgaaaaagcctttggcaaaatacaacaccccttcatgttaaaattattggaaagatcacgaattaaaggcacacacctaaacatcataaaagcattatacagcagaacaatggtcaacatcaggttaaatgtagagaaacatgaagcaatctcaattataatcagggacaagacaaggctgctcactctctccacatctattcaatacagcagttgaagttttagctagagcaattagacaacaaaaggatgtcaaagggttacaaatgagaaaggaagaagtcaaggtatcgctatttgctgatgatatgatagtatgcatagttgatcaccaaaattctaacagagaactcctacatctgataaacaacttcagctaagtgtctgaaataaaattaactcagacaaatcaatattcttcctctacagaatggataatctgttttttttctttctttctttttttggttttttggacagggtttctctttatagtcctggctgtcatggaactcatggtgtagaccagggtagactcgaactcagaaatctgcctccctctgcctcccgtgtgctgggatttaaggcttccaccaccatgcacagctaaaagtaagcattttcaacaaatggtcatggtctgtatgtagaggaattcaaattgatccatttttatnnnnnnnnnnnnnnnnnnnncataaaagcattatacagcagaacaatggtcaacatcaggttaaatgtagagaaacatgaagcaatctcaattataatcagggacaagacaaggctgctcactctctccacatctattcaatacagcagttgaagttttagctagagcaattagacaacaaaaggatgtcaaagggttacaaatgagaaaggaagaagtcaaggtatcgctatttgctgatgatatgatagtatgcatagttgatcaccaaaattctaacagagaactcctacatctgataaacaacttcagctaagtgtctgaaataaaattaactcagacaaatcaatattcttcctctacagaatggataatctgttttttttctttctttctttttttggttttttggacagggtttctctttatagtcctggctgtcatggaactcatggtgtagaccagggtagactcgaactcagaaatctgcctccctctgcctcccgtgtgctgggatttaaggcttccaccaccatgcacagctaaaagtaagcattttcaacaaatggtcatggtctgtatgtagaggaattcaaattgatccatttttatctccttgtacaaagctgaagtctaagcagatcaaggactgtggagagccggtacatgctgcgagcaatcgcatgcgtgctgccagtaatctctgaggagagccgtgtgtgccgcgagcaatcgccattataagatggcgcgggcctccgctgtgcctaactagtaaacaagtcctgtacgcaggtgcaagagtgaattcactcctagtcactcccattctcggggtgtaatagtggggtgatgggcaagcaacgaatcgggagctgtcacgccatatcaggtgctgaaacgtcacgctgcgggttataaaagcagtgccattttcccggtttgggatcttcctgagaagcaagcaataaagcttttgccgcggaagattctggtttgttgcgtctttcttgccggtcgagcgggacgcaataagtggcgccgaagaacccgggaactgtcatcacaccggcgcaagggaagatccctcgttcgcggggcagaatcagaaccgtgggacaaaaggctctacaaggtacgtacaatcttgaaatttctccagagttagaagcccttttggattgtttgnnnnnnnnnnnnnnnnnnnnatggaaaagtccggggaaggactgaaggagctgaagagtattgcaaccccttaggaagaacaacagactcaaacaactggatccccaagagctcctagggactaaacaaacaaccaaagagtatacatggatgggtccatgattccagctaatttgtagcagaagagtgagtgattcatcatgtgtcagtgggagtggaggcacttggtcctgtggcagcttgatgcctcagagaagaggaatgctagaggggcaaggaaggagtgggtatgtgggtggggagagaaccctcttataggcaaaggagaggtggaatgaggtgagaggttcatggagggggagatcaaaaaggggaacaacatttgaaatgtaaataaataaagtaattaataataaaaaaagaaattgttgacaacagtaaagttttggtgaggcaaaaagaaaggagtcaggcaaagtagagaaaggttgagtatggctagtgatcttctgaaatgaatagagttgtatttgagatgcccccacccccaaccccccatcccctgtttatatagaaccagcgtccaaaggcacagctgaatggtagacttcacacttctcacgtacaagtttgatctgaatttgatccctagcaccacacacaataaaagtgccttccacaaaaaaaaaaaaaaaagcatttttgtacctgcgaaatctaaaacatttctcagctctgtttctttcctttgcagtctagcatgtattcctgacttctctaatcccttcccagtgttttagttctaagggagggtgtggtctgacctacttagaaggtaggcacccaatcactggcagcttaccaagttagctgatttgaaaatctgaccacaagctcacacgctgtccgaaaagtttgttcattcatcagaagctcattgcttcagcaagaagatagtggtgcagagcctcccatgccagattgcttggaaacaggagaaaaactctaagtatttaatgaaatgctaactaaactaaagtgggggaggcttcctcaggggagctggatcttgctcctgttagcctgccacagtgggtctctatagatatgctgaggctagggtggggtggagggtagtatgggaggctgccctcacattcgccattgcaagatggcgctgacatcctgtgttctaagtggtaaacaaataatctgcgcatgtgccaagggtagttctccaccccatgtgctctgccttccccttgacgacaactcggcctatgggctgcagccaatcagggagtgacacgtcctaggcggaggataattctccttaaaaggggacgggttttcgccattctctctcttgcactcttgcgctctggctcctaaagatgtaagcaatagagctcttgctctctggctcctgaagatgtaaggaatcttttgccacagaagattccggtttgttgcgtctttcctggccggtcgcgaacgcgtgtaagagggtaggagctctgctgtggtaggaaagtaatcatgccactctgtgctttctggtatggcctgtgttacttaaatgtgttgggggaaagtgcaaccaacagagaatttgttagtacctctttccagggtttctccagtttggactccactaacttacagaaagtgctataaacaaatggctcccaacatgcctagaggctgggatttactgtgctcaattgctgtaagtaaactgtagcagaagtgggtgttgttggtgtcaagtttgaacaaggccccgtgccatcacccccaccaccagcagatttagagataccctcagatactcctttggggaaatgtctgtgtgtctcccattgacttgagggcctgcactcacacttgatcctgagatccctgctactgcagaaggatgtggtccttttgagtttgtaaatcaaagcaggtgcccagattcctggagggttgactagaggaccttgggcttgctctggcacaccttgccacccagcccacacctaaagtgcccctcctccacacctccctacaactttcctttcaggctcccataacacatggtgcactcccccttccccaaacctccaagctctcagaatttctctcttcctgaggacactggtatcaggcaatatactctttctggccttaaatgactcttgtggcatcagggaaggatcaggtgttttccagtagggtgggggtgggagatttatcccatccacaaatccatctacagttttagttcactgggtgctgggaatgaaccaagccctctctctctgcaagagcagcaagctcccttccctgttgagccataactttacccccactttaatacttttgtttaggaataaaatatcaaatttcttgaaaagcagagttcacaattgttgttagatcacgggcctagtggaagcctagggaaaccagacaagctccttcttaatggacagcttagctgctatgatgattggaaacaatgttctgggaggtgggggacaggccgaggaagagggagatctaaccatgcctcccttcaaccctagggccctactccatgccatcctgtgcacacctaaagtacccccctccacagctatcctggtcccttaaacagacccttaaacagagtgtagaatggggtctccttgaggtgtgatctgcttgctgcctctgactgtgaggttccaccaggttccaccaagtcccatagtcctcacagtaagccatagcgcctgctgtgttgggaaaacttagaaaagtaaagatttcctttgttcttcagacttttctatgggttaaaaatggtagccaggtcctcacagcacaggccaagggacataaagcaactgaatttggtgacagttactgtatctaatgttttcacctcctctgactgatacccaaagagaaaggtcatgagtaatactactgtttctcagataagccatgtgcttctgagggcaagtagtctagatgaacactagagcgccttaagagagtccatgactgagcaataagatggtgagggtctaaaatnnnnnnnnnnnnnnnnnnnnnnnnnnnnnnnnnnnnnnnnnnnngatggtgaggttctaaaatggcgacttttttcatcaccttccggacctgagaacaaatcttggctacttaaaacaggcctgtgcagccttttctcctctcattggtgcccctgccagtgagcaaatccaaatagttcaaggccagagcaggatgtggtttttgattgacacagtaagatgaacgaacttgctctttgtttcattatggtgaatatattcaaaatcacttgggctagctttagaaatatggtaccttgttgtgagcagtattcatcctactgtgtctttgaacaccaaatttgataccactttgaagaaattaatatctgttctgtctctacttccctccagcctctggcaagagatatttttacttgcttgtgtgttcacaatagccagcacatggaacacactaacaggcttctctgctgactgaataagccaatttgagctgaattaaaagtagaaaagcctatttgtttcagaacagttccagggcaagttcactggtctcaggggacaagacggaagtcctgtaggctatggcagagaaggcttttatagattgttggtgaaggaaaatgacctgcctgccacaagctgggcttgagccccagtgtggtcacctaggctggggacaaaggttgctacagctatcatgaatgcggaactggacttttggtgccagggctggggttgtgggaggtacgcagtgtgcgccaagtcaaaggctccaaccaaacagacatcagcatctatcagtggatgagtgtggaaaaactgtgatacttactcccatatatactggaatactatgcactagtaagataggatgtcttttgtgacaacatgggtggatctgggtgacatgctgagacaaattagtcaggcactgaaaggcaacattgttcatcagttgtagaggggtttgtcagctaaaagcagacaggagtttccactcttttcttggattggaaagatttttgaaatcacagtgcagaactagaaatcacaatgaaaccaaaccactccaatatgaaggggtttagaaatctcccaagatttactttctataggagtgtgaggagggctgaggagtgctcccaggggaagctcgattgctcacagcaacacatggctgagaggtgctgaggctcgaaatgagcacagtagaatttattatactatctttttatattctgtagaactagaaagaatgaagccagggagttctgtgtggatccaaaggaaacagttcagtgccttaaagctttctttctaatcctaaggattcttttcctgcttgttaatgtaatagaagcttcctggtatgttaggtgtgtgaaaatgagtgaaatgaaagggttaaagtcagtgaaaactctgtaaaaagtataatttacatccagtaaaattaattcaattctgtgaattttgaaaactatataatcttgcattcttcatcatgatatataggggctgaagatttggctcaaccattgagagcatttatnnnnnnnnnnnnnnnnnnnncttatctatgtttcgacaaaagagagattttggcattactgctgccgtgatcatagcaatttcagccagtgcagctgctgctacagctgcagggtacgctatggttagtgcggttcaatcaggcacaaaattaaatcagctttcagcagatctggctgatgccatcactgtccaaacttctgctagtaccaatttaaagggagggctgatgattttgaatcagcaccttgacctggcggaggaacagataggtgttctataccagatggcccagttgggttgtgaaagaaaactggaagctctgtgcattaccagtgtccaatatgaaaattttacttatgcagctaatctgtctagacagctttctttatatcttgcaggaaactggtctgaaagattcgatgagacccttgagcccctgagagcggccgttctaaagatcaactcgacacgagtggacctgtcattgacagagggcctctcctcctggatttcatctgccttttcttattttaaggaatgggtgggagtaggtttatttggcgttgccacctgctgtggacttgtggtcatgctctggttggtttgcaagctcagaacccaacaaacacgtgacaaggttgtgataactcaagcacttgctgccatcgagcaaggggcctcccctgaaatctggctatctatgctcaaaaattaattgacattggtggctggcctcttttatagagttcgccctaggtcatttagtaattaatgtcacaatgcactgcggtatccagggacgggcaactttcctcatgcacagatcaacctaagacacggggcccggtggcgatagggttaccctatgacaggaaaggctgtgacattggaggaacgacctaagacaggagccacagcggatgggcataattacacaggcctagaccagcctcaaattttaataaaataaaaagggggatatgtggagagccggtacatgctgcgagcaatcgcatgcgtgctgccagtaatctctgaggagagccgtnnnnnnnnnnnnnnnnnnnnattaagcaacccagtgaaaaaatggggtacagagctaaacaaagaattatcaactgaggaatcttgaatggctgagaattacctacaaaaatgttcaacatccttagttatcatggcaatgtaaatcaaaagaacactgagattctacttcataccagccaaaatggttaagataaaacaactcaggtgactgcagttgctggtgaggaagtgagaaagaggaactctcctccattgcttgtgggactgcaagctggtgcaaccattttggaaatcaatctgccagctactcagaaaattggaaataagtattcctgaataactagctacacaactcctggtcatatatccaagagatgctccattatcccacaaagacatttgctgagctatgttcataatagccttttttataataatcaaaagctggaaacaatgcagatctccctcaatggaagaatgaatacagaagatatgttacatttacacaatggaatactattcagttattaaaaacaagggctacatgaattttgcagcaaatggatagacctagaaaatatcccaagtgaggtaacccagacccaaaaggatatacatcatctctactccctgataagtgattatttgcccaaaagctcagaatacccatgatacaagtcagagaccatacgaagattaacaagaaggaggccaaagtgtggaaggttcaatctcacttaggaggggaaaaaaataatcatgtgaggtagagacagaaagggacctgggtgttagaggggagagaaacggaaaaagggggtggtcaggatcaagtgtgagaagagacaggagagaagtccaaaggactggcagaaggaatagaaatatgtggcacagggggtggggttggggaatggagggaggaggagaaaccactagaaagtgccagatccagggatgcaaggggctcctaggacccaatgggtatggcattaactgaaatgcccaacagtggggaggtagaacctgtagagaccacctccagtagatagatatggaccccccagttgagggatggggccactcaccctcaaaaattttaacccagaattgttcctatctaaaggaaatgcagagtcaaaaaatggagcagagactgaaggaaaggccacctagagaatgcccccccccccaacttagaatttattccatctgcagacaccaaatccctactatattactgatgttaaaatgtgcttgcagacaggagcctggtaaggctgtcctctgagaggctctgctagaacctgactaagacagatgcagatactcacagtcaacttttggactgagcccagagaccaagatggaagagtcagaggaaggactgaaggagctgaagagtattgcaaccccttaggaagaacaacagtaacaaacaactggattccccaagagctcctagggactaaacagacaaccaaagagtatacatggatgggtccatgattccagctacatttgtagcagaggagttcttcatcatgtgtcagtgggagtggaggcacttggtcctgtggcggcttgatgcctcagagaaggggaatgctagaggggcaaggaaggagtgcatatgtgggtggaagagaaccctcttataggcaaagggaaggtggaatgaggtgagaggttcatggaggggagatcaaaaaagggaacaacatttgaaatgtaaataaatgaagtaataaataataaaaaaagaaattgttgataacagtaaagttttggtgaggcaaaaagaaagaaaggagtcaggcaaagtagagaaaggttgagtatggctagtgatcttctgaaatgaatagagttgtatttgagatgcccccccaaccccccacccctgtttatatagaaccggagtccaaaggcacaactggatggtagacttcacacttctcatgtacaagtttgatctgaatttgatccctagcaccacacacaataaaagtgacttccacaaaaaaaaaaaaaaataaaaaaaaaaaaataaaagcatttttgtaccctcgaaatctaaaacatttctcagctctgtttctttcctttacagtctagcatgcattcctgtcttctctaatcccttcccagttttttagttctgggggagggtgtggtctgacctacttaggaggtaggtacccaatcactggcagtttatcaagttagctgatttgaaaatctgaccacaagctcacacgctgtccgaaaaatttgttcattcatcagaggttcattgcttcagcaagaagatagtggtgcagagcctcccatgccagattgcttgaaaacaggagaaaaaccgtatgtatttaatgaaatgctaactaaactaaagtaggggagtcttcctcaggggagctggatcttgctcctgttacctgccacagtgggtctctatagatcagcagaggctggggtggggtggagggttggagctctgctgtagtaggaaagtaaggatgccactctgtgctttctggtatggcctgtgttatttaaatgtgttggggtaaagtgcaaccaacagagaacttgttagtacctctttccagggtatctcgagtttgcactccactaacttacagaaagtgctataaacaaatggctcccaacatgcctagaggctgggatttactgtgctcaattgctgtaagtaaactgtagcagcagtgggtgttgttggtgtcaagtttgaacaaggcctggtgccatcacccccacccccagcagttttagagataccctcagatactcctttggggaaatgtctgtgtgtctcctattgacttgagggcctgcactcacacttgatcctgagatccctgctaccgcagaaggacatggtccttttgagtttgtaaatcaaagcaggtgcccagattcctggagggttgaccagaggaccttggcatgatctggcacaccctgccacccagcccacacctaaagtgcccctcctccacacctccctacaactttcctttcaggctcccacagcacatggtgcactcccccttccccaaacctccaagctctaggaatttctctctcttcctgaggacactggtatcaggcaatactctttctggccttaaatgactcttgtagcatcagggaaggatcaggttttttccagtagggtgggggtgggagatttatcccatccacaaatccatctacagttttagttcactgggtgctgggaatgaaccaagccctctctctctgcaagagtagcaagctcccttccctgttgagccatgactttacccccacgttaatacttttgtttaggaataaaatatcaaatttcttgaaaagcagannnnnnnnnnnnnnnnnnnnnnnnnnnnnnnnnnnnnnnnnnnnnnnnnnnnnnnnnnnnnnnnnnnnnnnnnnnnnnnnnnnnnnnnnnnnnnnnnnnnnnnnnnnnnnnnnnnnnnnnnnnnnnnnnnnnnnnnnnnnnnnnnnnnnnnnnnnnnnnnnnnnnnnnnnnnnnnnnnnnnnnnnnnnnnnnnnnnnnnnnnnnnnnnnnnnnnnnnnnnnnnnnnnnnnnnnnnnnnnnnnnnnnnnnnnnnnnnnnnnnnnnnnnnnnnnnnnnnnnnnnnnnnnnnnnnnnnnnnnnnnnnnnnnnnnnnnnnnnnnnnnnnnnnnnnnnnnnnnnnnnnnnnnnnnnnnnnnnnnnnnnnnnnnnnnnnnnnnnnnnnnnnnnnnnnnnnnnnnnnnnnnnnnnnnnnnnnnnnnnnnnnnnnnnnnnnnnnnnnnnnnnnnnnnnnnnnnnnnnnnnnnnnnnnnnnnnnnnnnnnnnnnnnnnnnnnnnnnnnnnnnnnnnnnnnnnnnnnnnnnnnnnnnnnnnnnnnnnnnnnnnnnnnnnnnnnnnnnnnngccaagggacataaagcaactgaatttggtgaaagtttctgtatctaatgttttcacctcctctgactgatacccaaagagaaaggtcatgagtaatactactgtttctcaggtaagccaggtgcttctgagggcaagtagtctagatgaacactagagggccttaagaaagtccatgactgagcaataagatggtgaggttctaaaatggcgacttttttcatcaccttccggacctgagaacaaatcttggctacttaaaacaggtctgtgcagccttttctcctctcattggtgcccctgccagtgagcaaatccaaacagttcaaggccagagcaggatgtggtttttgattgacacagtaagatgaacgatcatgttctttgtttcattatggtgaatatattcaaaatcccttgggttatcttaagaaatatggtaccttgttgtgagcagtattcatcctactgtgtctttgaacaccaaatttgataccactttgaataaattattgtctgttctgtctctacttccctccagcctctggtaagagatatttttacttgcttgtgtgtttacaatagccagcacatggaacacactaataggcttctctgctgacttaataagccaatttgagctgaattaaaagtagaaaagcatatttatttcagaacagttccagggcaagttcactggtctcaggggacaagacggaagtcctccaggctatggcagagaaggcttttatagattgtcggtgaaggaaaatgacctgtcagccacaagctgggcttgagccccagtgtggttacctaggctggggacaaggttgctacagctaccatgaatgtggaactgggcttttggtgccagggctggggtggtgggaagtgcgtggtatgggtcaagtcaaaggctccaaccaaacgtacatcagcatttatcagtgagtgagtgtggaaaaattgtgatacatactcccatatatactggaatactatgcactagtaagataggatgtcttttgtgacatttttatcctattttgtgtgtggacctgggtgacatgctgagacaaattagtcaggcactgaaagcccaacattgttcatcagttgtagaggggtttgtcagctaaaagcagacaggagtttacactcttttcttggatttggaaagatttttgaaatcacagtgcagaactagaaatcacaatgaaaccaaaccactcctttataatatgaaggggtttagaaatctcccaagacttcctttctatagggagtgtgaggagggctgaagagtactcccaggagaaacttcattgctcacagcaacacatggctgagaggtgctgaggctggaaatgagcacagtagaatttattatactatttttttatattctgtagaactagaaagaatgaaggctgggagttctgtgtggatccaaaggaaacagttcagtgccttaaagctttctttctaatcctaaggatccttttcctgcttgttaatgtaatagaagcttcctggtattttacgtatgtgaaaatgagtgaaatgcaagggttaaagtcagtagaaactctgtaaaaagtataatttacatccagtaaaattaattcatttctgtgaattttgaaaactatataatcttgcattcttcatcatgatatataggggctgaagatttggctcaaccattgagagcatttattgctcttgcagaggactggggtttcattccaagcacccatatggtggctcacacacccacccctaattccaattccagggatccaatatacttttctaagctcttctaatactaatcatgcctgtagtatacatacatacatacatacattnnnnnnnnnnnnnnnnnnnncaatgaaaccaaaccactcctttataatatgaaggggtttagaaatctcccaagtacttcctttctatagggagtgtgaggagggctgaagagtactcccaggtagtaaacttcattgctcacagcaacacatggctgagaggtgctgaggctggaaatgagcacagtagaatttattatactatttttttatattctgtagaactagaaagaatgaaggctgggagttctgtgtggatccaaaggaaacagttcagtgccttaaagctttctttctaatcctaaggatccttttcctgcttgttaatgtaatagaagcttcctggtattttacgtatgtgaaaatgagtgaaatgcaagggttaaagtcagtagaaactctgtaaaaagtataatttacatccagtaaaattaattcatttctgtgaattttgaaaactatataatcttgcattcttcatcatgatatataggggctgaagatttggctcaaccattgagagcatttattgctcttgcagaggactggggtttcattccaagcacccatatggtggctcacacacccacccctaattccaattccagggatccaatatacttttctaagctcttctaatactaatcatgcctgtagtatacatacatacatacatacattctagcatacaggacaacaaagcactgttacatgtaagataaataagactgaaacagtcattttaaaagtatatacacatcgcttctcagccttttggctaagtcaagtgtaaaagtatatacagaccccataccctatctcagtttccccattgtctgctgcagactctccctgctcctctacctcagctgtgagtactcacctttccagatgccataaaatgtgtccatgaagcagagaggtcccacctgagttctttcagcttgtcacagcaatgccctctgctcatcactcacactgcagtgcttatcagtagcatgtcagaaacaagcagtgctggagagatgctgagagaccatgtctacagcactgctgtcagaacaatgctctgagttcagaattttgcatgaatctcaccagcaaatattatacaaagatgttgtgaaaggctgtcaggaaacttctggagaagtgagaggaggagtttagtagtggcagttgggtgtctcctcttagaggaaactgccactccctgtagttctctgacctagtttgcataagcttactggcaggcttagtttagggactttttgggtaagaagcccttgggatattttgcctgttaaagtggcatgagatagggcaagcccaggcttgtgttctgagttgtttcttgtgttgagagaaggtttaccttgtcatcagcttggggaaatttcaatggtcacaaatgtgtcattttcacagggatccttatattcacataaagatatcgtgccacttaaatgcaggctgtcctttccagcatggggatatgtgggtggatgggagcatatcatattttatacttacaaacagttttgtagtagctgtacaatttagccttaaaaaggcgtgttagttctacatcaacattgatatccacatcaatgtataaccatcctgttgtgcagacagtgattttgctcttaaatctaagatgattttgcccaagacaagttcacaaacattctcccttatttttctaaatatcaaatgtctatgatattaagttttgtgcttgggtctatatgtctacaaatggactgtagtagtttgtgtttattttattttatttcattttttaaataaaaatacatctttatgtgtaaaaaaaaaaaaaaaaaaaaccaaaatccaagacctaccagttttccattataaaaatccataaaaagaatcgtatgaattaagaggctgcaattnnnnnnnnnnnnnnnnnnnncataaagatatcgtgccacttaaaatgcaggctgtcctttccagcatggggatatgtgggtggatgggagcatatcatattttatacttacaaacagttttgtagtagctgtacaatttagccttaaaaaggcgtgttagttctacatcaacattgatatccacatcaatgtataaccatcctgttgtgcagacagtgattttgctcttaaatctaagatgattttgcccaagacaagttcacaaacattctcccttatttttctaaatatcaaatgtctatgatattaagttttgtgcttgggtctatatgtctacaaatggactgtagtagtttgtgtttattttattttatttcattttttaaataaaaatacatctttatgtgtaaaaaaaaaaaaaaaaaaaaccaaaatccaagacctaccagttttccattataaaaatccataaaaagaatcgtatgaattaagaggctgcaattgcaaggtgaaaggctgaaaaggctgaaagaagattaaaactgtacaaattctttttaaactaagtggaacctaaattaagtaaacactgttagtctctgctatgtaacgtggctatacaattcagcaagcaaccacaaaattctttccttctctttttctacttctctgacccagagctttttctatgtactcagactgatcttaaacttttgatctccctgccttggcctccagagtcctgagattacagaccattatgctgagctccaatcaggactcatctgaaaatgaaaagatagtgatatttactttagaacaacaacaacaacaacaaaaaacccaaaaccataaaattaaaagaaccaggcacagtggtgaacacacacctgtagtcccagctactcttggggctgaggaagaagccatctgagcccaagtggttgaggccagccctggcaacagctattcctttaccccactccccaccaaaaggagacatatctgtgacatgtgtcccatagagaaggtagtgtgggacactgttttccctggtgtgccttgcttcctcaaagtcaaggctgattttcacaagcaccctgtgacatgtggttagcactctaaagaagtaaacagttatggttcatgacattgtgttccattccttctaccctcccctaccccactactggagaccttacctagtggtttatgcatgctaggtaagtgttctagcactggactttaccccggccctctttttatgttaggacagggtcttactggcctagaattaaggctgtagtccaggcagacttatgtctataacctgtttcagcctcccaagtatctgggattacaggtctgagtcacctgcctgacctagaggtgggtttaacatgacagctctcctcttccatgagacacttaaccacacagtgaccaaaatagctgagatgaaatttcaatgggtattaagcctctagccaagcccctctccccagtgattctagcatgtgtctccctgggattgctaattttctggaggattctgggccaggtgctgttcccattcaacttcaaccaacttgtacaggtccattgtggcctggtcatcttctaccaaggaatgtccactatttccaacctggatgtcccgactcagcagcttcttggtgagatgtttcagtgacaaagtgacattttctgggcagtcatccttccggtggaggagtggtatctggaaagtgtctcgggtgagggacttgggatgaaagtactgtagggctttgtagtcattgtgagcggcatgccctaccactaccttccctgagagtatcttcaagatctcactctgagcagtcttaaagggtgtagcgttaaccatgcggcacttaaggatgccactccatctggtctggtcgtccacgatgtagcaaaggggtgtgaggatgggggaggacgtactcatcatacagcacatcgccattgtaattcacaatgctgcatccagccagggaactaaggcaccccttaggtcttgtgcccaccatttcacagtctattgccaccatcttccctggcaagttttggggtactgtagggcacttatcttcagaacgagcttgggtggagttctgtacagcatttttcttcaagggcttcttcttggagcctttatcctttgactgagcttgggtggagttctctgtagcaattttctttttcaagggcttcttcttggagctcttagtctttggaagggcactctgaagctcccctagcaaatctattttagtcacaacagaagcagtcttctttgaaggagcaggggtcagccaagacaatggtgctttcttgtctttggactgctctgagtccctcttggaggcaactgtgtctttcttcttctttgggcatggaaggatcttcaaaatgccatctactcttgaagtttcccctttctttggaggttctgaattcaacttagacaccttgctaggggattggttctttttattcagaaataatttcttttccaagaaacgttgcttcttgacaaaatgttgatgtttggcatttcctccaaatgtctttttcgaaggttgcccaaagtctaaattcaggagtatggtagacatgagatcagtggatggtgggagaaagctgggaagaatggctcactgatggcaaaaggatgagaggctcattctctgtggaattccataattcaacatatggaggtttgcaattagccttggggacaaaagtaatcctgatacccgcaacataggcctccaagttgggtccccactaagatcgcaagcatccggagcaggaatgcgggtgacaacgggagggcagctagcgagggcccacagagcccccacctcaggcagcaaggccagcaattcagagtgcatgagcatcaggaatgatggtggcggcatgggtgggggctggatgagctccacggcccctcgggcccatggaagtctattttattttttagcagacagatagaaggttgtttcagtagcacacactggagtgatgccaccttttccctgtctaaagactgttcatctctgttaagtgtctgttgaccacccacgtgtgtttgacctcattgtggagtcctattttctgctgtgttgtttcagtgtctactctgatgctagcaccaggctttcattcctgttcctgtaagaacatgagacatcaggtcaggccttgtgatctttctgattttgacctcttcattctcagaataatttttgactattaatttttgactctttaattttcatattacttctcatacaacttggtgctatgatttttttttttctgaaggcaacctcccctctggaacatgttgcacatatatgtgtgttcaggaattgttgatatgagcaatatggagtgttctagttcattatgtgtttagagctgccttgatttcttttttttttttttatttcaagaatgtaatatgtgtgagtgtttggcctgcatagacatctatggatcatgtgcattcctagtgcccaccaaggtcaggaaagttcttagagttcctgaaactggaattacagaggcttgtgagctcttatatcggtgctaaatttgaacccaggtggttggaaagatcaacaagtgctcttaaccactgagccaactttcctatatttatttgtttataaatttacatgtagtttttgttatgctgactatgaacatcctatttttagatttgtaattttatggtttatttggcattactgtaaagagcactgtctaagatattaatttccacttgacaggaaaatataactgattttaccatggtgatgccctgtcctgcaacttcataaactcatctttttttacatccagtattcttttatagatttgttagaatttttatgtagatagaaccatgtcatctgtgaagagaaacactttcgcctgtttctgagaaatgtaaacttcctttcgttctttaagaaacttatttatgtacctgactgtttgcctgcaggtttgtgtatcacatgaatgcacagtgcctaaagaagccagaagaaggcgaaggctcccccggaactggaggtgtgcaatgttgtaagctaccttcaattcaagtcctctggaagagctgaaagagatcttaacagctgagccattctccagatacctgaccctatttctttgtcctggcgagcacctcctgggaaaagtctacctggagtaatgagcagacatctgactcttgctcctgattgctgggaacacattcataatggcaccattgagagtgcagctgactgaagttggacttactgttttgtttttagtggatgacttttgtagggttgaagaagttcctttcgcttccattttcacataattttgctgtttattgagatatttctagtttttcctcttttcttattttgttattatgtctaattacatcaacttattttctagtgtttccataactccttctagccagagcgctttttatggagccaaatccagatttttgttgtttgcatttcactgggatccccactccctccatttttgcgcttccattattcaccctgagttcagtgaccagaaggctccctggcagaagttctgtttccatcctctctatacttctttctaccatggacatcctttgtggaccagggccttctctaaaagggttggcagaagcctttcaggaactgataggcaattgtcaagtgggttttgtggttattttattttattttatttaagaaattcttgaaattcgcattcttatattcatattttacagataaaattctccaaagaaaaagtctcagagccatctcccctgagtcttctgctaagctttactgctgctatggagtgatcatggtcctcactgtagctgtagttgctctttctgttgctttgtcaggtaagtgacataccctccaaattctgtgacactctgtccatattcacattgccagttatgctttctaagcactgtgatccaggcactgtggcaagggctctagaggaaacacactggaaggtcctgttctctgagaatttaggttccaacaggaagatgcagtgaaggaacacagaggctttgatggggacatccccgggaagatgacatccagcaagctctagacagagatgcaggggacataggtccccttgggggaacaattcaaggcagagaataacaagagggaatctccaagtagaaacttcaaaggtgaggccaggaaggtacagtgcctttgaccatgacccatgagtttagataccaggctcaactctattttgaaagtattaaatggaaagttcctgaagtaagaaatttataggattttagtaccacaatattcagaatagtgcaatacaatcttgcactgtcctcttaagtatttgaagtcatcctttagtgcaaggtgtctgcaccgtatatacgacctacccaaaaattctcatagaaatctcaattatcaggctgggtgtcagtaggtgtccctacagagtgcttgctgctgtagcaatccccactgtagtcaatggtcatccaaagctcagaaagtgatgctgttatagaagtgcactccctgggagccctactgacagtgagcacctgagagagaatgggacacaggcccacggtgggaggcctttagttaaaggcacatctcgatcaggagaggattcctacagatcagttaggaaagctaccatcagattcacacctcacagctgagctcaggagagtgtggcaaaacgagagaagacctgcttgctatgatccatcatattctctacattttagtaacaaagacagaacagatcctaatcaacaagacctatgctgcttgcccgaaaaactggattggagttggaaataaatgtttttatttttctgaatacacaagtaactggacatttgcccagaccttctgcatggcacaagaggcccaactagctcggtttgacaacgagaaggagctggtaagcaatgggcagggattggtttgtctgtctgttctgttgaatattatattgccttgagatagagagttacagatgaggcccgaggaaggatcccacccaagcacatggagacatagggaatgtgagtgtgtgccatttgctgatgcttgacttctgactggagccctgagatagtcaagaaacattctctcatgaagtgctcatagtcagctggaaggtcaaatatgccattttactgggatacctggtgaccatgagtgttttcccatatgctggcatatgttgggtacagaaggagacaactgataataactgcagtggaaggttaacccagaactgtccaaaccacagaggaatgtgaccctcagttacatcctcctgttatctctagagaaaggtgtggagtggagagactccaggatcatctgaaacaaatagacacatgtattcttgacttttttgtgttttatgacagaatttcctaatgagatacaaggcaaattttgattcctggattggactgcacagagagtcgtcagagcacccttggaagtggacagacaacactgagtataacaacatgtatgttttcacgatgtttttccttctattatgttcatgtgttgtgatatgtgtgtgtcgtggctatgagagatggaagtcaatgtcatgtgaagccaactgtactgggaagaaagaaaaaaaaatgaacccttgcctggaggtgtggctcaggggtagagagtgtgtataaatgcaatatccaatccccagaaagctctacacacccacaaatttaaatacttcagaggttttcctgtttattgaccgtcattttcaaaacctttgcatcatgtcattttactcaaaatatttaccataatgatggtgtctgagagtagctattgtttgctctggctccaacttaaacatttctgttgttgataaatgtcctgtgagggatatagacagagccttagatgggcagtgggggctctggaatcccagaaagccactgcagtatctgcaagcctgagattcagctttccactatttgcatgtctgcacctgttcaggaaagcagagactctaagtacatttggaacctcctctaaagtctcgtcatcactgagcacccaaaacagtccttgggtttgagctgttttactgggatggtaaatcacagactcagtcacatccatcactgaagcccttagagcaatttactaagtgggcgtccccatatataaaatgcctaaaacagaattgaaaatcacccttggtggggtcactcatggctgcagttcatttgaacatggcagcgagcaccagcccaatgccttgtacacacattacaggattcaccatggacaaatgacaaaggagtggtgttcaaatcctgagaatatgagacagtaggtgtaaaactaatgcaggtgattcctcagggactttttgattcatattaccaaaaattagtggagactggtgagatttcattgcaggagcaaatgcagttctgggctctgtaggcttacttttttggtttcttttcaggattcccatccagggagtggaaacatgtgcctacctgagcggcaatgggatcagcagttccaggcactatatacctcggatatggatctgtagcaagcttaacaactatagcctccactgcccaactcctgttcctgtctagcatttaccaagagactcttcctagcctgttatctatgggtgctactttttcccctatggtcccacagtgctatcaaacgggattgagaatattttttaacgtcgcaaatgaaaaccatcaaggctggagagattgctccgtagttaagagactgactgctcttctgcatgtcccgagttcacatctgagcaaccacatggtgtcttacaaacatctgtaatgacatcttatgtcctcttctgtggtgtgtgaaaacagctacactatacctacatatgataaataagtaaatcttaaaaaagaaaaagaaaaccaccttagagaggtgcacacatggaggattacaagaccatagatgagttttaaatagatgtcagcactcataccttaagcctaaagtacaactaatgttagggaaccccacttttatgatattaaggttttgtgcagagaattcttcttttgaatttatgagaccacaaaaatgagtcccccaacatgggtgtaacctttaataatgaaagcagaatggctgggatcctgagaagcatctgtaatcccaggtaccgaagggttgacacaggagggtctcaggttcaccagtggggacggaaagcacaaaaacactttaataatgatagggaagatgagatgtctgttgcatcccgtaatttgaagaaacatattatacatgcttttcaaaaattcaaaccaacatacagaagaatttttaaaaagtgtgtaaaattaagatttactttttactctgcaatttaaaaagatgagggacattggcgaaatgtttctccactttaattttaatattcctatttccaattatactgttctaagtataattatacttacttacttttcctgttctaagtgtactgcattttataatcaaataccattttaatttcactattttattccaggagccttctggcccaggccagtgtaatggtggagtctatatagaatcactacaagatagttcatctttgtggatctgcagagatctgcttcaaagggggagtgtttctactcagcaattgttatatatgtttaacaataacagtaaaagcacattaatagcaggaatctctcctaaaacgagtcactcatagccttgcttaatgagggctcacctgtcacagattatataataatctgaggcaggccacttcaggatgatcacctgctagttattagcttgtctcattatgggtcctgaccattttttttggatttatttcacatcaaatgtgagttaaactccttaggcatttaatacttaattttacactagcatgtgcattactgagcctttaaaaaaatattgaaaatcttatagattgagctaccatgtactgatgagtcccaaaagagaaaaaatcataggctaaacgcagctcttggtctcttcatcctttcttctccttcttggtctttttaaagactatatcaacttgatatgccaagggggagttgatatccatgggaggcctccaggtctttaaggagaaagggatggagaaatggaggaagggaaggggagagggacatagggggagggaggagggaagggaaattaaaaaaaaaaataaaacctaaacactacatttgtacggacttcatttatgcttattgcttgtatgttcatatgtatttgccccacctgtgctgggcagacaatgcagagacagctcagacagagatcagacaggaccagaaggaatcagctccctgcttactgtgagtggtgatgtggatgctggaaatggagcaagaacaagtgctcctaactgctgaagccatctttccagcctttttgtgttccttttattggcactgctgatcaagctctgcaaaagtagcacgtatccctgcagtttttgtaattttcttataagttcttgcctaaatctgtgaccctccttaagtagctggggtcacaggtgtgtttcaccacaccagccattctacttctcaatactaaagaccaagaacattttaaaaatgcgttgatgctttgcctgcatgtgtgtctgtgtaagggtgccacatcctctgaaactggagttacaggcagatgtggctcccatatgggtgctgggaattgaatcaggtccaatgcttctaatcacacatacattttgagtaacgcattgtctttattttaaagccaggtttaattatttattagatgaatgcaagcacatttcactctgaaaatgactttcttagccccccccatttagtcctaataatactatttttttgcaatccattttacttcctacatcctaagagataggtagactatggtcccagggatggttcagagaaataaatgttaaacattaagaaaatgctaatttcaagagagttaaaagttatcattaatatttccatgatgtttgtagaacatgattttaattttttcaaccattgatactcaccaaacagaatagttattttaagatgtattttcttgttatgtctcccttttcatttctgattttattaatttggttactgactctgtgctctcagtttagtctgtctaaaggtttatgtatcttattgattttctcaaagaaccagctcctagttttgttgagtctttgtatacatctttttgtttctatttggcttgattctttactaccttctactcctcttgggtgcatttgtttctttttgttctagagctttcaggcgtgctatcaagctgctagtgtaagccttcttcagtttctttttagaggcacttagagctatgagtgtttctcctaccagtgctttcattgtgtcttaaaagtttttgtatgatgtgtctccattttcattaacttctaaaaagtctttaattttttttttatttcttccttgaccaagttatcattaagtagagcattgttcagcttccatatgtatgtgtgcttttcgttgtttttgttggtatttaagactgggcttagcctatggtgatctgataggttgcatgggattatttcagacttcttgtatctgttgaggcctgttttgtgaacacttatatggtcaattttggagaaggtatcatgaggtgctgagatgaaagtatattctttggcttttggatgaagtgttagatccatttggtttataacatgttaatttcactgtgtctctgctttgtttctgtttccatgatctgtccattgctgagagtggggtattgaagtctcccactattattgtggagggtgctatgtgtgctttgaacttcagtaaagtttattttatgaatgtgggtgcccttgcatttggagcatagatgttcagaattgagagttcatcttggtagatttttcctttgaccagtatggtgtccctccttatcttttttgataacttctagttgaaagtagattttattcaatattagaatggctgctgaatcttgtttcttgggtccatttgcttggaaaattgttttgcaaccttttactctgaattattgtctgtctttgtcactgagatgtattgcctgtatgcagcaaaatgctgagtcctgtttacatatccagtctgttgacaaaagaagctaaaggatgcaaaaataaaatatagggacatttacagatgcccacttgagagaatttcatagtttcacaagcgtgccttgaagctgtcatgtgagttcatagaagagcaggtatgtatgatactggtcagattaaaagccttccaggcctttgttttaagctgtcaggcttttgtcttaggtcaagagggcataggagttttgcctgcatgtatgtctgagaaccacataagtgaagcagaggccagaagaaggtgtctgagcctccagaatgagagttatatagatggtgtgagcagcatgcgcactgagaaattcaccctgctcttctgcaaaatcagcaagtgctcttaatcaatgagccatcgctccagccatttactcaaagtccaaatgtggaatcactgttttgctgctggatgctgctgtatattgcctttatgcattctgctacaggaacagaacacaacattcatagtcataaacacattactctttccaaaatgcactgtgtttactcatttttcatctgttgcacttagttctctattacactgtcacacactgacatttcttgcattatttttttaaggtagtatatatatattttatttttttattatatattttcttcatttacatttcaaatgctatcctgaaagtctcctacacagtccccccaccctgctcccctacccactcagtcccacctcttggcactggtgttcccctgtactggggcatataaagtttgcaagaccaaggggcctctcttaccaatgatggccgactgtgccatcttctgctacatatgcagctagagacacgagctctgggggtactggttagttcatattgttgttccacccatagggatacagaacccttcagtacctccattgggggccctttgttccatctaatagatgactgtaagcatccacttctgtatttgccaggcactggcatagcctcatatgagacagctatattagggtcctttcagcaaaatcttgcaggggtatgcaatagtgtttggtggctgattatggaatggattccatggtggggcagtctctggatggtccatccttttgactcagatccaaacattttctctgtaactccttccatgggtattttgttccccagtttaagaaggaatgaagaatcaatgtgtttgtcttccttcttcttgattttcttgtgctttgcaaactgtattttgggtattctaagtttctgggctaatatccacttatcagtgagtacatatcaagtgacttcttttgtgattggtttacctcatgcaggatgttatcctccagatacatccatttgctaagaatttcataaattcattgtttttaatagctgagtagtacaccattgtgtaaatgtaccacatgttttgtatccattcttctgttgagggacatctgggttctttccagcttctggctattataaataaggctgctatgaacataatagagcatgtgttcttattaccagttggaacttcttctgggtatatgcccaggagaggtattgctggatcttccagtagtattatgtccaattttctgaggaacctccagactgacttccagagtggttgtacaagcttgcaatcactccagcaatggaggagtgttcctctttctccacatcctctccagcatctgctgtcacctaaatttttgatcttagcaattctgagtggtgtgaggtggaatctgagggttgttttgatttacattttcctgatgattaaggatgttgaacatttttttacgtgcttctccgccattcggtattcctcagttgagtattctttgtttagctctgtactccatttttaatggcgttatttgaatttctggagtccagcttcttgagctctttgtatatattggatattagtcccctatcagatttaggattggtaaacatcccagtctgttggtggcctttttgtcttattgacagtatcttttgccttacagatgctttgcaattttatgaggtcccatttgtcgattcttgatcttacagtacaagccattgctgttctgttcaagaatttttcttctgtgcccttatctttgaggcttttcctaactttctcctctataaatttcagtgtctctggttttatgtggagttctttcatccacttagaattgagctttgtacaaggagataagaatagatcaatccacattcttctacatgataaccaccagttgtgccagcaacatttgttgaaaatgctgtcttttttccactggatggttttagctcctttgtcaaagattaagtgaccataggtgtgtgggttcatttctgggtcttttattctattccattgttctacctgtctgtcactggaccagtaccatgcagtttttatcacaattgctctgtagtagagcttgaggtcaggcatggttattccaccaggaggttcttttattgttgaggatagtttttgctatcctaggtttttgttattccagatgaatttgcaaattggcctcgctatctcagtgtagagctgagttggaattttgatggtgattacattgaatatgtagattgtccaggatcttctgtctttcacagtctctggtgaaaagtctggtgtaattctaataggcctacctttatatgttgcttgacctttgccccttattgcttttaatattctaactttatgtagtgcatttgttgttctgattattatttgtcgggaggaatttcttttctggtgcagcctatttggagttctataggcttcttgtatgttcatgtgcatctctttctttaggttagggaagttttcttctataattttgttgaaggtatttgctggccctttaagttgaaaatcttcagtctcatctactcctattatccgtagatttggtcttctcattgtgtcctggatttcctgcatgttttgagttaggatctttttgaattttgtgttttctttgattgttgtgtccatgttttctatggaatcttctgcacctgagattctctcttccatctcttgtattctgttgttgatgctcgcatctatggttccagatttctttcctagggtttctatctccagagttgtctccctttgggttttctctattgtttcttcttccattttcagatcttggatcattttgttctattccaacacctgtttggttgtgttttcctgtaattttttaagggatttttgcgtttcttctttaaggacttctacttgtttagcagtgttttcctgtaattctccaagggatttttgtgcttcttctttaaggccctctaaatgtttagccatgttctcctgtatttctttaggtgagttattaatttccttcttaaaatcctctaccagcatcatgagatatgattttaaatctgaatcttgcttttcaggtgtgttggggactcgctgaggtgggagtgctgggtttggatgatggtgagcagttttgatttctgttagtaagattgttccattcgcctttcaccatctggtaatctctggcattagttgttatagctgtctttggctggaggttgttcctcctgtgattctgttagtctctgttagcactcctgggagtccaactctctcctgagtctcagtgggcagagtactctcagcaggccatctctcctctgacaggggaggagcacagatgtctggagctcagatctacttcttggctgaagatgatgacccaaaactgggcctgtcccagaagctatgttgcttcttcagtgtgcaggttcccctgcacagactggtctctgagggaccagggatacaagatggctctctcacctgttccagctgttagagctgtccctagtggccacctctcctttggcggaaaaggagcacagggtctagaactcagatctgctgtgttgtatcattttgatttacttatcatgaatcataatacaataggaattctcatgtgggcatgcactaagaaagggaattgtttgccctgggattggtcaggggatccgtttaaagctgtgactgttttcttttctacctgtacctccacagcctctctttaatgctgtctatagcaaaaatcagcatcattgtgtattactagagttgccaaatttggagactctataatggatcctcatcaaaattaaaataaatccccaaattaatcacaactggggatggagtaggcttttcacattcatgaccccatttccttcaataggagcacaccttgtctagcaaggccatatctcctaattcttcctaaacagctccaccaactaggtaccaagcatttgaatatttgagtctatggggccattctcattcaccatagtgttatatagaaatatgggtaaaggactttatgagccatctctgctaaagggaaacattgttctgttcatggtaaagctctttgtcatgtactaagtgctggatagatggctcagctatgcaaagctaggatcacaactgaaaagacaagaacaatggctaaaacttcccattgttagacactctttccatcatgaattttgggaggtgaagaactaaatgagaaggtcaaaaccaggcaacctcattagctcaaaaaaaacctgaacaaagactaccttcagcaaggatggaaaatgtggtgttgggttgcttctgacttacctcctgtgctagaagacctcaggagataaattctcagatccttgttttgcacctcaaatttgtgctgacatctgagaaaattaccgcttggacatcagaaaatctgagtgacccatcttcaactgcattgacaatttccaagtaacagaatttaaaaaccctctgactacatttctattaactctcattttataatatattttatttaatatattatattactatattaattatacatccttatattttatatagttaatatgctaaatattatattttttaaatttagccttggttgacttggagctccctatgtagaccaggctaggctctgattcatagagctctacctgtgacagcgtccccagggccgggatcagagcccatgtgctaccataccatcacctaaatattttatcataaatactttttaaatagtctgagacatttgcaaattccttgccatatgttcctaaatgataaaaataattctaaacgcatcttgcatgaggatgaggatgttctgctgttacatttttggggtacctacattctaaacccaaattctttaagcctgtgaactcagctctgagcaatcttacaccctctcctggcctctacgggcacctgcatggttccactgagagtcacacccacatatatagtcaaaatctagagcagtttttctatacctgtgagatgcaacctcttttttggggtgcgggggtcgaattaccctttcacaggggtctcatatgagacatcctgcatatcaaatatttacattataattcataatcgtaccagaattacagttatgaaatatcaacaaaataattttatggttgagagtcaccacaatgtgcagaactgtattgaagagtcacagtatgggcaaagttgagaaacactggtctagaggcattccttgtgctgataaaggtggcagtgggcattattctgtctccataccagtagcaaaatgtttccatatgtaaacatgtaatattagacagcctgagtctgtagtcctgaggtaggatctggctccagaacaaaggatctcttattccctgagaggcaagaagtttgtttagctctgactgtgatccccaactctctcctttctgactctgtctcctagagattctgtctctgggcttttcaacacacagactcctctgaccttgccctggatgtccctgtaaaatgcccccaaaacccagagctgtaacaacgtggggctcgcctaccttaaagatcactgtctgatgtgtggtattcagggcaggaaaggattggtaatattttctttttgttcttgtcatgtttgtgtgtgtgtttgtgtgtttttttgttgtcgtcttttatttcctaattgattcccgctggacagtaaaactggtctcaccctccagccccttttggctttgttaaaagctctttgtctacagcattagtttcacttcattacagtctaatgaaatgcctcccttacaatgcttcaatttgagtcaaacaagtttgcacaggaaggagtagctcaagcttccggattggccagttgggctaaatactgaaacctcctctgtatttgtgcttctcggctttcaattttcaatcctgtagtggaaactcagcttctcagctctgagatgagtgttacaaaggcttcccttcctatgctcagcactacaagcagcccgcaggagggagaagtgggtatgtattcaatactatttgaaccaaactataagagcagagaggagcttcaccagggaaggaaggcaaaagagctgaaccttgaacaaaataaggacagaagggcgtctgtgagcctgtcaaggtgtgtctgcagagcaggagaatgcagatcggattagctatgaggttgttacattagttattctattggagtatacaatactcaaatagttctcaggcaagagaaatgaacagtgagtcaccttctaagagccacagctttctttctttgtacttatcttgctagagcactcttcctagggatctggtaagctacaatctggtggattaccttattgtggaaaatgctagctctacaagtccctgagtggaggaaattcaaacagtagctttgcaatgtgcatagtgacagaagttgcctgggaagcttggggtttttgtttttcagatccattgtaattgaaaaagaattgtaaggaggtggcatggggtgggggtggggagttgaacctacccaggaccacatcctttccatttttttgagctcttgataagttatagaaaaagaatataatgagttttcttcttcagccttcagaaaggaagcaaaagtgtgtttcttgtgtctcaaactgtctatgcttcattatattgtgttcctttatcttccttttttcctttattactgttccttcatctcttttttctttttgtcatgtattgaagaatactggattttgagaaaacaagatcgatatttatcaaaatacaaaattcacaacaaatgttaatgcttatcacttaagccaagtattctgactgaaactattattattattactgacaatgatgatgacaattgattgattcttcggcattttgaataatgttaggacagtgccatagcaagaagagcaaatatgaagcattttgtcaatagaaactgagttttggtaaagaagtgctacagacagaccccttttttgggtctcctatctgcatggatccggctactggttgcaggtgggcgaaggagtcagtgaaagtggggagacaaacagacacaacacgagagagtgttttgaatctgaatgtaatgtccaaaggaaaaacagacttttttatacagaagaaaaacaaaacaaaacaaaacaaaaacaagaaaagccaggcgggacatatctgccaagttatagtgacacaaaacaaaaggaatgtatacatcaaaaggtggtggaggatcaggctgcatttaccacttagaatggagccaggtgtaatgctagtctatgttaaaccggcaaccagaggttcttaataaatacctgataatgctgttcctttggtcctcgtgaagaaa

SEQ ID NO: 12 - DNA, 2232 bp, Mus musculus
caatcctatagtggtaactcagcttctcagctctgagatgaacattacaagggcttccctacctatgctcagcaccacttgcagctgcaggagggagaagtggaatttcctagggagatacgaggggacttttgactactggatcggcctgcacagagcgtcgtctaagcacccttggatgtggacagacaacactgagtataacaacatgtttgtgtatcacatgaatgcacagtgcctaaagaagccagaagaaggcgaaggctcccccggaactggaggtgtgcaatgttataaaattctccaaagaaaaagtctcagagccatctcccctgagtcttctgctaagctttactgctgctatggagtgatcatggtcctcactgtagctgtagttgctctttctgttgctttgtcagtaacaaagacagaacagatcctaatcaacaagacctatgctgcttgcccgaaaaactggattggagttggaaataaatgtttttatttttctgaatacacaagtaactggacatttgcccagaccttctgcatggcacaagaggcccaactagctcggtttgacaacgagaaggagctgaatttcctaatgagatacaaggcaaattttgattcctggattggactgcacagagagtcgtcagagcacccttggaagtggacagacaacactgagtataacaacatgattcccatccagggagtggaaacatgtgcctacctgagcggcaatgggatcagcagttccaggcactatatacctcggatatggatctgtagcaagcttaacaactatagcctccactgcccaactcctgttcctgtctagcatttaccaagagactcttcctagcctgttatctatgggtgctactttttcccctatggtcccacagtgctatcaaacgggattgagaatattttttaacgtcgcaaatgaaaaccatcaaggctggagagattgctccgtagttaagagactgactgctcttctgcatgtcccgagttcacatctgagcaaccacatggtgtcttacaaacatctgtaatgacatcttatgtcctcttctgtggtgtgtgaaaacagctacactatacctacatatgataaataagtaaatcttaaaaaagaaaaagaaaaccaccttagagaggtgcacacatggaggattacaagaccatagatgagttttaaatagatgtcagcactcataccttaagcctaaagtacaactaatgttagggaaccccacttttatgatattaaggttttgtgcagagaattcttcttttgaatttatgagaccacaaaaatgagtcccccaacatgggtgtaacctttaataatgaaagcagaatggctgggatcctgagaagcatctgtaatcccaggtaccgaagggttgacacaggagggtctcaggttcaccagtggggacggaaagcacaaaaacactttaataatgatagggaagatgagatgtctgttgcatcccgtaatttgaagaaacatattatacatgcttttcaaaaattcaaaccaacatacagaagaatttttaaaaagtgtgtaaaattaagatttactttttactctgcaatttaaaaagatgagggacattggcgaaatgtttctccactttaattttaatattcctatttccaattatactgttctaagtataattatacttacttacttttcctgttctaagtgtactgcattttataatcaaataccattttaatttcactattttattccaggagccttctggcccaggccagtgtaatggtggagtctatatagaatcactacaagatagttcatctttgtggatctgcagagatctgcttcaaagggggagtgtttctactcagcaattgttatatatgtttaacaataacagtaaaagcacattaatagcaggaatctctcctaaaacgagtcactcatagccttgcttaatgagggctcacctgtcacagattatataataatctgaggcaggccacttcaggatgatcacctgctagttattagcttgtctcattatgggtcctgaccattttttttggatttatttcacatcaaatgtgagttaaactccttaggcatttaatacttaattttacactagcatgtgcattactgagcctttaaaaaaatattgaaaatcttatagattgagctaccatgtactgatgagtccc

SEQ ID NO: 13 - protein, 277 aa, Mus musculus
NPIVVTQLLSSEMNITRASLPMLSTTCSCRREKWNFLGRYEGTFDYWIGLHRASSKHPWMWTDNTEYNNMFVYHMNAQCLKKPEEGEGSPGTGGVQCYKILQRKSLRAISPESSAKLYCCYGVIMVLTVAVVSVSVTKTEQILINKTYAACPKNWIGVGNKCFYFSEYTSNWTFAQTFCMAQEAQLARFDNEKELNFLMRYKANFDSWIGLHRESSEHPWKWTDNTEYNNMIPIQGVETCAYLSGNGISSSRHYIPRIWICSKLNNYSLHCPTPVPV

SEQ ID NO: 14 - DNA, 51994 bp, Homo sapiens
ccagctggaaaccaccggactgacgattgttgtgcttaggataaggcactttgtgatgagttaggaaaacaacaatcagatatgtacacttcaaaattgacctcaggaaggtaagcagaaaaatagataaaatgggtgagaaaatttctttattatgtttcattgtgattgtctcacttttagcaagaaaggaaaagccagtggtagagtcatctaaatacgctgcttgcccaaaaagctgaattagatttaggagtaaatgtttttatttttctgaaggcataagaaattagacattgagtcaaacgttctgtgtctcattagaagccagccttgctcagtttgcaactatggaggaactggtaagagatatttttggatcatgttttctgttaaatacttagccccctgaggcaggtcggctacatagggttaaagctgaaatactaagaaggatcccattccaggggcatgagatgtgttttcatgtctaacatttgttgagggtgtgttctctgcctggaaccctgtcagacattttagatatatttccccatgtaatgctcatggtgagctggtaagatgagatgtattgttctcattctattaagaagtaaggtaattatataatttgtcatctagattaagacatatagggcattaaaagtgatcattaatacattggtggaatgacaagcataaactgagaatttcccaatgaaactgggatttatgctcactttaaataaagtaatttaggatcagagacgttaaatgacttaaactgagaactgggaattagtctcactccagaatttatgctgcttaattataccacgctgccagtgaaaaagagaagggatagggaagagagactccagagtaatatgaaagaaaggggctcatggtgttagtttctgttttattatagaatttcctgaaaagatacaaaggcccttctgaccattggattggccttagaagagaatcatcccatcgcatttggaaatggacagacaacatggaatataataacatgtatgttttgagacttctcatcttttgctgtgtttatgtatggttatgtgtgtgagttgtgtttatgagataagaaatgtagtatcatggaaaacttactgcaatatgaggtaagaaatctaaaccctttttatgctcttcagttggttagctgtgtctttgggaaagctttacctgtgatttcagttgaagtctttaatgtgacagtgacatttctcacaattttacactttcatccactgatttaaaactgctgaaatccctacttatagctgatgtgcaacaaaggttctacaatcataggaagccactgaggagctgatatccacaaggctgttaagcccactcttgcaggtgttgcatccatttacaataggaaagcatccagggaactcatgggaatctctccctcctaaagctttatcaccagaaggaaactagtaacagttccttggactgtgaacatttcaaaggggtattttgaatataatcattacattgcagcagataaaatgtaggaacccagtcatatccattaatcaaagctaagccctttcaggaatttactagttttttttttttttttagttttcacacatttataaaacaatttgggaggaggctggaaatcatcttgactgaagaccaccaatggcagcagttcatttgggtacagcagcaagcatcagttaaatacctatcaacatagctgggcttggtatggatgaatgataagcttgtgattttcaagcaaggaccttgaggacataaaggacactaaatacagaaatggtttatattactatgaagcaatattaatgacagacttttgcttttctcttattcacattgaaatatggaggggttgcagaagatgatggggaggaacaaatgcaggtgtctaacttacaaatatttaatatttttgtgtttggatttaggcttgctatcagaggaagtggagaatgtgccttcctgaatgacaatggagtcaacagtggcagaatctacatgaacagaaaatggatttgtagcaagccaaacaattatgtctacagttgccagttatgtccccactgggatactacctagtagagctgtgagaagagggccaccatcctccagactccagaatggtggaatcatcagcagcttccaccatgcccctggaaaaactgcaagtaacagacctgcacatgtatcccctacatctaaaataaaagttggaaaaaatggaactttgatgttaagatgcactgatacaaaacttaaattttggtctcctacattaaaacaatatgagtctcttaaaatattgatttgttcttagtaagattacaagaggctttgatttttaattctgcaatgtttccttaacagccattctgaattacaaactaattcctatttctgccacattccttcctgagaactgtctagtcctggtttgggatttatcttaaaggtctagaaaggcaacattttacttcagcaaaacttgattctatattgttgttttttcttaatgtgtcaaaattgttttgttactaggatttcctatgttgttattaaatgtattcccctgatcaaggtcactggcctagaaaacaaagattctgtgttttaccaagataattcccagtgcttcatggtgtctttattaggctttgactgcttagggaaactgagccttaaaagggtaaaagtttttccatccatgtaactttctgaggtctttaggttgtcactctgattaaatgagtagtattcttagcagtgacttattatctgttgaaggaagtattttaagctttttgacatctttggcaggtttctctagaatccaaatcctaaattaagccttttggcctaaaattgactgggatttttccaggtggaccccctagatatgctcctccaaaggcttgtctttcttgtagagttattaaatgattaggcttatttggcaaatactgctagaagcattgtcaaataagaaatggtgttttacctttctttaagctgtgtttgtgtaagttcatcatttatagaaatgtgaaattttatgagattcctaagatactgacatgctgagatacctgtaataattgcaatttttatgttggatgattgtatgccacagaagcacttaaatttcctggttaattggtaacgttaatcagatctttacctatggctgttctgggtttttgtcattcacagttattattttaatttcttctttggaagcgttcgcaatcagctatagtccaaaattgctaattaagatcaagcaaaacaaaattaattacgtaaaattaatttataaggatgtttttatgacgtaaatgttttattttccagagccaaggaaattttctgtcacaagctatctaccgtttgcaataatttgataaataatcctttgtgaacaaatatggaagcatttgctttttctctctacttgattccttcaaaattcagaaactatttgtggatatttttagttttatttatacaacttcagtaaaaatccactctctctttataagcaggatccagttggaaacattatttatattgctaaggtttggcttgaaatgtcatatttcagaatgtgcatagaggccaggggtggtggatcacacctgtaatcccagcatgttggcaggctgaggtgggtggatcacttgaggccaggagtttgagatcagcctggtcaaaatggtgaaacctcatctcttctaaaaacacaaaattagccaggcatcgtggcgcacgcctgtagtcccagctactcgagaggctgaggcatgagaatcgcttgaacccaggaggtggaggttgcagtgagtggaaatcccaccactgcactccagcctgggcgacagcgtgagactgtgtctcagaaaaaaaaaaaaagtgcgtaaaatgccttgcttcatgagttcccagctttacagggaatgagtaaaaattgtcactttctggcaggttcaagaaccttattataagcaaaatccaaaggctgctttggtttggtttcctagcctcaagaggttctaaaatctaagacctcctacatcatcaacgggagagaaaaattatgcttctaaggaaagcaaagttacacctgtttttagattttaaccctgtacattgtcttcaagtccttgttatctgcctgtggactgaactagatcctgaattctcctaagttcctccaatattaggttataacagtcctgatggagtcccccaaccctcttgcctcgatcctgactagggatgctccagggacattcaggtgacttccccttcttaaaaatctgaccagctagggacattagataccagaattgggaacaaactggatccataagatactatggtcagtaatgagatcttattggtcagtgactttttttttttttttaaatggagtctcactctgtcacccagagtggagtgcagtggcatgatctcagctcgctacaacctcccatctcccgagttcaagtgattctcatgcctcagcccctcaattagctggggttacaggcatgtgccaccacacctggctaatttttgtatttttagtagagattgggttttgccgtgtgggccagactggcctctggcctcgaactcctgacctcaggtgatccacctgcctcggcctcccaaagtgttgagattacaggcatgagccactgcacctggcctgctcagtgacttctaacattgctgctgtacctgggtaaatacttccagtcatatttaagcgggcttggagttggcaaaatctctgagagagacatcttcggaaagcctccatgctggacttagtggataaagtttccaatgtccagatattttcagctggtttctccttggtataggatttcttctgcattctaccctgcacatcttaatgataaccctcatattttggctaagcatttgactcccctttagaattgttctaacttgtttttaacagatgtctacaagagattcccaccaggatcctgcccatgcaatctttgagactttaaactcactccagctggaaataggaaccaacttaacccaagagactttggttcacatttaaccagtactttcctgaatgcctctcctaagtaaatggctctagtttctctattggccactgcactgccactaggattcctgcaagggatccgatgggcccagagcaggtagccaaccacttctctgttggatggaatgcaatgctgtttgccagcatgtttgagccagtccttcaagatggattctgagtgactaactggacctaaatttaaatagcacaaagcagccatttgctaactagatttcatacaaatgctctgagttcctggaaaacccacactccttaactttgggactttcaagactcacctaaatcaatcaattaaagctcacttgtgtcagctaatcagggatcagctgtattgactaatgaaaactaagcgagtttcaaattttaaccatttatttgtgtagaagacttgattgggagcctgggtatgaatacttgctataaaatctgagcattccctttgttctctggagcaaacaatgttaagttgttaactctctgtacctttctctagaactggatggaaacaactccatctgaaatgcagccctaataccagggaactcctacagtaaagcgctaaacaactttattactctaaccaacgtttatgtccctaatcagcaagaagtagttagaatggtcatcatccctttccctcaagattgaggaatggacataaaaaggaggggatttgtaactgctccagactgatctgttgtcagaaaggggctcttgaaccagaccatgaaagagggttcttggatctcctgcaggaaggaattcaaggagagtcacagagtgtagagagaatagacagtttattgaaagctactcagttacagagtagggcatcctccaaaagcaggaggaggaatgtgctgtctttgttttaaactcttcttttataggggtttaatctatgtaaaacctaagctatgtctacatgtgggtaggctgtcagtgtgacaaaatttagtattttgttgatataaagaaacttatccttgtcatcttagtgcataagtacatcaaagtatgactttagctaccttaaaagcatgtattgttatgtgatattgggacatctggacattctgctgtcgtaggagtttgtccttgcagcattactaaatcgcttccttagctgtaaacatcttataatcgtaggtcataactgtcaaggaagtgccttgctagtttttagatggagttgattttaaaatagtgtcactctggctttcctatgctcctgctttcctaacaaatctggttcaacttttttttttttattcaacataatcttttttttccatactacctcatttacagagtgcttcctatagatatggttggtctgtatgtttcctttttcagctttgattcttatttttttgaatcacacatgctttatgggggcttccactaccatgagccatattttctgtattaccagcaagatgtttgggtttgttttttgttttctttatatttcaaattttattttagatttaggaagtacgtgtgcaggtttgttaacatgggtgtattgcatgacgctgatcttacaataccaatgatcccatcactcaggtagtgagcataatatccaataggtagtttttcagaacttgccttatcttccctctctccctgctctcttaattcgaagcctatttttcctatctttatgtccacatgtttccagcatttagctcccacttatacgtgagagtatgtggtatttgtttttctgtgtctgcattaatttacttaggatgatggcttccagctgcatcttttgttgcaaaggacatgactttgttcttttttatgactgtgtagtattccatggtgtatatgtaccacattttctttatccagaacactgttgataggcatctacattgattccatgtcttggctattgtgaatagtgcagcaataaacatgcatggttcaacttttatggtaacaaagctgtgagttgttcttcagttgtcatggaccctcactcaggtcatgtaacctgagcatggacaggtgaaacaagtgtgcaaccacaagggaaacctaatcgttcagactgaggtacagggaccgaattaagaggtggacacaggatggcaggatccaggatccaactggatagaactcaggcatcacttcatggcaggatccagtcagatcttgcctcccagcatcacctcattgcaagatccaatcagattattcctcactaccctatgcttataaaacctgacccacctcccagcttggcgaggtactactttgggagctttgtccagtgttctctttactttctgtaagaacaaaatctccttgctaaatccaccttgtcggtggtcattgggttgatacctgccaagtgactgaacccacctgttgtgtgggtaacatttagaacatattttccatttctttattttccttgactgtctgcattggtgtctgtgcaccagataaaacagcttcctttccagtcttcacagacaggtctcagataggacaacacctttaccaatcagtccagacagaggttctgggtgccacttaaaccttcctggtagttgaaaccacaatgtttgttcttaatggtcctcaggcatctagagtatgccaggcccttccagtgctctcagatacatgagataaaatccagttcctcaggtagcagccagaaaagctggggtgctagttatttggtctgtctcctttgcttttcagagagaagctggaagccaggctttatcactgcactgagccaaagtggggagcagggggaagtgcccacatgcttattaaaaaccgctctgaaaatatttgaagtaacagggctataacaattattattttaaaagcaactgctgttttggtttgtgtagccccagaggtttagcagatgctgggccctgtcagctcaccaaaacagggaaattagaaaccagtctatctggtagtatctagagaagttgtgataccagataggtggtccaaacccttcactcctcagggatagactaagagatgggagttccttcccgatcatatggcattgtattagggttgggggttatgatcacagtgtgtgcaagttttttcctatcagttttgatgtggatagtttcacactcacctagggtgcaggagtggctcagtcagtttctggatttccaatgatgggaatttgcctctgtgttgctgttgaattgatggtggggaaggagagtttagggccttctattctgccatctgtgactctgacagtttcttttaatgttaaactatcatacagtctagttactacatttgtagacatttctctcgcacaaatgacaacttatatttacacaaaagcctgtatataaaatgtgcataacagctttattcataatagtcaaaacttgtaaacaactgtatgtctcacaatgggtgaaaaattaagtaaattctgttataggcatacagtggattactactcagcaataaaaaggaatgggctattgatacatataacaacttccttgaatctcaaagtacttaggctaagtaagaaaagccaattactgaagatcgcattctgtgtgatttaatttacgtaacattattgaaatgacaaaatggtatagatagagaatgagggttatggatgggtgagtggagaagaaggggcagtatggagaaagggtggtgtggctctccgtcgtgatggaagagtttcgtttcctcattgtatcaatggcattatcttagtcgtgatattatagtgtagttttttagatgttaccattgggagaaactgagtaaagaagatgtgggatctttctttagtatttcttagaactgcatgtgaatctacaactagctcaaaataaaaagtttaattataaaataaaagctacatgaaatgaagcaaaaaataattcacccttgtcacgcacacagagtcagagactgtaacataatttgcaggatctagagcagaatacaaatgtaaaacatcttgttaaaaaattattaataattttgagacattgataaagcattaagccgcctgtggggccctttaagcatgataaactgtgctaccacacagattgcacattcacgtatctggccctgcaaatggaatgatttttgcccatgatcaattcaccatggcctctttgggctcagtgaatttgcttcttcaggagggtaattttctcttctttctctgctaagctgtttaacagtagttgccctgcctaatgggcttcatccatccatttctctcagattattttcatgatgcactaggatgaagcacaccctttctcctagtcttgaggaaacgtcgatattcagaatatttaaacgcaggcactgaccaatcagaagagtttctggccaacgttccacacttgagggaaatgacattatctgagccctgaagaaaaacgttgtagatattctccagatcaaagcatcgacaggaagattttagatgttgaagttcgtaatatttcctaaagcaggtatgaattactagtaacttaataggtatattaactgatgaagttttcatttctcagaacaaaccagtcaaggaaggtgctattatactccttttattcatatagatcttgaggctgagacagtttaatcaatatgctataattattgtgtaataataaattaccataaactaggggtgctatgatctcaatatttgtatctcccactcccaaattcacatgttgaaatcctgactcccaaggtgatggcattaggagatgaaacctttgtgaggtcattaagtcatgagggtagaataccgatgaatgggattagtgcccttacaaaaggggcccaccaaagctgccttgttccttctactatgtgaggacacatctagaagttaccatcaatgaaccagaaagtgggccctcaccaggcaccaaatctgccagcactctgatcttggacttccagcctcctgaactgtgagaaataaatttctgttgtttataagttacccattttatggtattttgttacaggcacatgaactaagacaagtggattaaaaacaacacaaattattattttactgtctagaaatgagaggttcaaaatggctaaagtcagggtgccactgatagggctgcatttcttttggaggctctagggaagaagccgtttccttgcctttttcagcttccagaggccacctgcattccttagcttatggtcccttgctacagctttaaagccagcagcacagcaccttcaaatctctctctgacagtgacattcctgccttcccctaataaagacccatgtgattagattaggcccacctggattatccaaaataatccctctgtctttagacccttaaccatatgtgcaaaatgtcttttgtcatgtaaaataacatccttacctcaaggttttgggaattagcttattaatgtctttagggggtcattattctgctttccacatacatttaaaattaactatcaggctacaaaagtcatatatgaattgagcttgttttgccccaaaggctgtgttctttttttattttttttatttttattttttgagatggactctcactgttgcccaggcaggagtgcagtggcacaatctcggctcactgcaacctccgcctcctgggttcaagtgattctccagcctcagcctcccaagtagttgggattacaggtgcgcaccaccacgcccagctagtttttgtatttttagtagagacaaggttttgccatgttggccaggctggtctccaactccggacctgaggtgatccacctgcctcggcctcccaaagtgctgggattataggtgtgagccaccacaccctgccagctgtgttcttttacatcataatacactgccttttatatccctcacttattcaatatcattaccatccatcatgctgtcacaaacacaaaaacccaagaaaagtgggatacaggtcattgagaataaataatttttataaacttttgttctttcttgtaactttttatcagtcagctattccaatgaagcaaaatctgataatatattgcttttatactacttagttgagacactcacatctattgaagagtaatgggcactttgaaggggcttttttctttccttttatatccggtcaattagtcattaatttctgccttctaatatagactcaactaaaaaattatattttgaaaaaaatttattttctaaatgaaattaaaattactctgtatgtgtacttcttttcctcacactggaattctctaaggacagtgtaaatgcacatcactgtatcttatgtgtggtatcttatgtgtggtatcagctatttaacacaaggttgcataagaaagtaagcacgacgatatggcttagaagtcatgagattcacatagtttaatataaagctcttgtgataattggagagttattttgtcacatttctcctttcataatttatgctccagctctctcagatttcaggtgttttcccaactctgagatatattctcttctctctgggcctaactaaagaaactagaagactttcttcaactggaagacttcttcctccacctcaaatgcctcactttattttttttaattaattaattaatttatttatttattgttttgagacggagtctcgctgtttcgcccaggctggactgcaatggcactatctcggctcactgcaagctctgcctcctgggttcatgccattctcctgcctcagcctcccgaatagctgggaccacaggcgcctgccaccgtgcccggctaattttttgtatttttagtagagacagggtttcactgtgttagccaggatgtatgtatttatttattttgagacagagtctcactctgtcgcccacgtggtgcaaccttggctcactgcaacctctgcctctaggattcaagcaattctcctgcctcagcctcccaagtagctaggactacaggtgcaagccaccatgcccagctaatttttgtatttttagtagagataggatttcaccatgttggtcaggctgatcttgaactcctgacctcaggtgatccacccgccttggcctcccaaagtgctgggattgcaggtataagccaccatgcctggcctaaatgcctcactttatttaactaactccagctcatttgattggtactttcttgggaaaacttcttctgggttaagtgccctcattaactgctctcctaataaattattctactgccattcacatcttgttacaataagtcatgtatacctacttatttttcagtttcatattaacttccttaaagaaagggacattaccctcaaagtccacctggcgtgctggctgaaagatgttaagtttgaaaatatttgttaaagggtaaatgattatgtacatctttaggacttcatgaacttactttcagtttagtttccacataaggagaaacttacagcaacgtagaaaccaagagattgatatgaataaatgatgtgactaactcacaaataccatgtcatttgatatttgacctttaaagtagttttcatatcagatctgtcagtcatgggttctatagcttactgtgaacttagacatattagttagtccctcacccaaaatcatctgaaaaataaaggtaatatcagcctcattagttagttatgccaattaaataagaacacatatttaaatctcatattaatgtgtatggagcatagtaagcagtaataacctggcatgttgtcatgccaggctagtaacagtaaaagtaatagtagtttcactggaaggtccaagattagtgtggaaattccaagatgattagtgtggaaattccaagataagtgtggaaatttcaatttatcagggtttaccttttgtcccctttaagctaacaatgaaattataaaaggatataaaagggataagcctgacagttcatatccacttctgtgtatgataatataactggagagacatcaaactcatgctgagaacaactagaagagttagaattgaagaaaaaggatttcattaagatattagagagtgttcaaggcaactggaggcagaacgaagattctggaaaggggccacagagaagtgagtcagcattccaggagccacccttctcttaggggcatcttggcagtgggtcagatgctgagattctggggagagggctgtggataccaggcatttttttgggggagagaaaaatctcttcctaaagcacttgaaggaccaaaacccccagagaggagagagggccaaagaaatgagaaaaatttttctctcaagcaattttcaaattattaaatttcacaggaaaggaggttaggaagaactatgtgaaaaacagacttgaacttttggcaatcacatgttgttcaggagacaaaaccaaattcaacttccaagaaagagaagcagctttgataaaaagcaggttctcagatggaattactagaaggctttatcataggtcctaggacaaactagaaatgatgaaatagtaaagaaaaagatatataaaatcttacagaaactggaactcagtcctaatgcaacttcatttctatttgataaaggcaatagctgtccaatctggaacttatttcttacaggtaaggggggctactgtatagaattcaaaagcagggaaaatatgttgtcagagttaagatagagattgtatttggggtaatgagcgttgcaggacatgagtagggcacatagcgtgttggtattgttttacgtggttttaagatatacttcatctaggcacttgttacatgttatatttttaatgaatgtgtttagttgtatgcttatgatttgtgcacattactataaattatattttagtaaaaggtgcccttactggcatttatatacaagaaatcaacacatctgacaagaagctcttgctgctaaagagcctctgtgctcctggatcatgccagagggagcacagaagctgcacaccgttcaagcccatttttgaaaagttgttgtagcagccatagcagcaaattcccaaaatatcttgaagaaattgaaaacaagatattttttgaatgagcgtaaactcttgggaatgaattttaatttgagattaaaattgctgttgtctttacttacctaacattcatttcctctgagagccaactccttcctttcaataaattcttattttctatcataatattgctttgtaccgcacaaaatacaattataatttttaatagtcaaagaaattttaagttatcaaacattagtttctttcgtaaccaaaatactgttagagaagtagcttcaactttttaaaattcttacaaacaccagtttattctgttgtgatgagctgatttttgaaacaatttatgcttcatttgttcctctagctatatttaacttaaaggcttgacattttgagttactggggcggttacacacttacacgttttagtcgttgggctttttttttgttttgttttgaatcattcttggggttgaaaacgtagagactgtggtttagatcactcatagaaactggaggcaaaatgcatgacagtaacaatgtggagaaagacattacaccatctgaattgcctgcaaacccaggtaagaagctgggctctacagagtaagtgtgaggactggaatgggaaggtagtggtagtgatgggctcacacaggaaaggtgctgatctagtaaaaagttttcaaggataagagatggaatgtgggagtccataaattggcttataatttgtgtaaaacatgcatatatttatattcccagttctaacaactaaggagagggaacaatgagagaaagatgtaagacaatgagataaggttaagtttaggattgaaaataacagttaatttcactaaaaaaaaatctatacaaactctaaagtgttactcagatacaagataccatcattattacataggtagaaaacctatcatggaagctcttaagagagaaaaggtagaaaatagtatgtaaaggacatttacaaatcaaaaaagtaacaaaggttgagtagaaacttagtagggcattctaatggaattatgttacattggatgcactggaaatatatatatatatagctttatatgatgctttagtaagtgaaaaaaatgacttttgccacagttagggaatatcaaggttttataacttaggacttaaaagtttggagttttctcctcccaacttaaaaggtaatcaatttggagaaaaggtaattcagaggcagaaaaagatgaactctaaatgttgttaaatgacttcatttatttcttcattcattgggtattttgagcattttataccaaatgctttaaactgtttgtcggatagttccaacatctctgtcatgtcctccttggcttgtgttttctttccccatggaagttgacattttcgtggttcttcatatactgtgtaattttggattgtaatttgaacattttgaacaaatatttagttagactggatcttatttaaattttggagtatattgatactattgttttagcaagcaatcaccctggtgagatgaagacaatctgtgggatctggttccaatgtcagttccattctgaaagcctttgtagtgctattcagacatgtgcatcaaccaggggtgaaattgggaactgtgcaatgctctactcattagttcaggtcttagcatctttagtgtgccaattagaaccatatctaggcatgcataagttgaggggcaggtgaatccaggagtttatgaataatgttcatgggtctctttctaaagtttcttcctcttcaccatctgacccgtactttcaggttcccaggggcttctcctttccatcctccagctagaaatgcgggcctccttttattctgatgaaccatatacttctgcaattatagctgcatctttaagctcatgtggcagacggacagtgagaaagaagaaaaaaaaagcaagaggtttggccccactctcatggagctacagctcaactgaatggaaaggattgactttagatttcttttctttttttgaggtggagtctcactctgtcgcccaggctagagtgcagtggcgcgatctcggctcactgcaagccccgcctcctgggttcacgccattctgcctcagcctcctgagtagctgggactacaggcgcccgccaccaggcccggctacttttttgtatttttagtagagacggggtttcaccgtgttagccaggatagtctcgatctcctgactttgtgatccgcccgcctccgcctcccaaagtgctgggattacaggcgtgagccaccgcgcccggccgaggattaacctttctcaaggttttggctattgcatgttgctgtagtttcccctaccatcatcagattgcctgaggtttgaggcacatgagaatgtagacaagagggggagaaaaaataaacgtggtattttcacactctatttgagataggagtttgcttttctgttcctcagaccatacctctagtgcttctcctggagccctctctttatgctgacagaggctcaattccatgtttctggctgtattaagttcggggcagtgatactagaggagggaaatttaaattcaccactggtttgatggctctttaaatttggatattcttgtaagatctgctgctagtatatcctttttccttttgctcttttttgttttgtttaaagaccatatttttagagccattttgggatcacagcaaaattgtgagaaaggtagttttttttttcattttctccttgttgccacacatatatagactctgtcttagtctgttttgtgctgctattacagaatacccaagactgggtaatttataatgaacaaaatctattggctcatagttctggaggctggaaagttcaagactgagaaacacatcttgctccatcatcccatggcaaaatttggaagggcaagagagcacatgcataagaaagagagcaagaggcaccaaacttgcttttataacaaatccactttcgtgatagtaaacccactcccattataaggacattatgacctgattacctcttaaaggacctgcctctcaacactattgcattggggattaagtatctaacacatgaactttggagacacattcaaaccatagcagtctctaacatcaacattcttcaccagcagcacatttattacaattaataacctacattggcatattgtagcactcaaaattcataatctgatggacttccctttgtcagtgacctgacctttctccctggctgcccttaatattttttcttccatttcgaccttggagtatgtgtcttggggttgatctactcatgaagtatcttattggggttctctggatttcctgaatttgaatattggcctgtcttgctaggttggggaagttctcctggattatatcctgaagtgtgttttccaacttggttccatcctccctgtctctttcaggtactccagtcagtggtaggttcggtctttttacatagtcccatagttcttggaagttttgttcatttcttttcattcttttttctctaatcttgtctgtctgccttatttcagcaagagagtcttcaagctctgatattttctcttctgcttggtcaattcagctattgatacttgtgtttgcaacatgatgttctcgtgctgtgtttttcagctccatcaggtcatttatgttcctctctgaactggttattctggttaacagctcctgtaatcttttatcatgcttcttagcttctttgcattgggttagaacataatgctttagctcagcgaaattcgttattaccaactttctgaagcctacttctgtcagtttatccatctcagcttcagccttgttctgtgccctcacaggagaactgttgcgatcatttggaggagaagaggcactctggcttttggaattttcaccgttttttcattgttttttcctcatcttcgtggatttatccacctttgatctttgagactgatgacctttgaatggggtttttgtggagtcttttttgtagatgttgttgttgttactttctgtttgtttgtttatcttctaacagtcagcctttctgaggcaagtctgctgcagtttgctggggatccactccagaccctgttcacatgggtatcaccagtggaggctgcagaacagcagattgctgcctgcttcttccttcagaagttttgccccagaggggcactggcctgatgccagccggaactcttctgtatgaggtgtctggtgacccttgttgggaagtctcacccagtcaggaggcatgggatcaaggacccgcttatgtagagaatctgacattcccttagcagagctggtgtgctgtgctgggggaatcccactcatcgggttcatctggtctcttcagagccagcaggcagaaaagataagtctgctgaacctgaaactgcctctcccctcaggttctctgactcagcgagatgagagttctgtctgtaagcccctgaccagagctgctggaattcttgcagggatgacctgcctggtgaggagggatggctcagggtcccacctaaagaggcagtctggccacaacctgccacagccagtttgctgcactgtgggaaatctggcccagtccaaacctctcaggctcctttgcactgtcaggggcaaaccgccaactaatggtggtcacccctccccccaggaacttagtcattccaggcacactccagactactctgctggcagcagggatctcaagccagtgggtcttagcttgcagggatccatgggagtagaacctactgattgagactgctgggctctcctccttggcttcagccccctttccatgggactggatggttctcgtgcctcactggagttccaggcaccactggagtatgtaaaaactcctgcagctcagtgcctgcctaaacagccaccaatgggagtggctgtcattggtttgcccaggtttgtgcttgagacccagggccctggtggtgtaggctcatgagggaatcttctgatctgcagattgcaaaaatctgtgggagaagcatagtacacctggtgggtaggacagaccctcgccacttcccttacctcagggaggcaagtctccccaccctgtgcagctcctgggtgaaatgacaccccacctgctttcttcctgcttcctgtgggttgcaccagctgcccaatgagatgaacttggtacctcagatggagatgcagaattcacctgccttccgcattcatctcactgggagcttcagaccagagctgtttctgtttggccatttgggcccctcccttcaagtatgttttcttttgtaagaaactgccaaagtggctgtagcatttcgctttcttaccagtaatgcatgagacttctggttgctccacatccttgctagtatttgatattgttaatgttttaatgtaacacttaagtaatatgtaatgatatctcattattttaacttgcaattctcaaaagacatatgatattaataatttgtcatttcattattttgattatgtcttttgcaggttgaaagtttttagttttaatgaagtccagtttatcagttctttctttcatggattgtgcctttggtattatatttaaaaagtcatcaccatacccaaagttatctaggctttctcttatattatcttctacgagttttacagttttgtgttttacctttaggactatgatacattttgagtcattttggggaaaaatgtaaaatctgggcctagattcatttatttgtatgtgggtgtctagttattcagcatcgttagttgaaaagactgtcttttcttaattgtattgctttgcttgtttatgaaagatcagttgactatatttatctgggtctatttctttttagtctgctactctgctttctatcctttttcattaatttatttgtctattccttttttttttttttttttaagagacggagtctcactctcttgcccaggccggagtgcagtggcgcaatctcggctcactgcaagctccgcctcctgggttcacccaccattctcctgcctcagcctcctgagtagctgggactacagacacctgccaccacgcccggctaatttttgtatttttagtagagacggggtttcaccgtgttagccaggatggtatagatctcctgacctcatgatccacctgccttggcctcccaaagtgctaggattacaggcgtgagccaccgcgcccagccttatttgtctgttctttaacaaataccacactgtcttgattactgtagttttagagtaaatcatgaagtcaggtagtatcagttgtttaactttgctcatctccttcaataatgtgtttgcttttctgggtcttttgcctatctatataaactttagaatcagtttgttgatatttatacaataacttgctgagattattattatcattgcatttaatctgtagattaagctgggaagaattgatatcttggcaatgttgagtctttctctccatgaacataaaatacttctccatttatttagttcttcattgatttccttcatcagtttgtagttttccacatatagattttgtatatattttgttagatttatacctaagtattttattttttgaatgataatgtatatggcactgtgttctcaattaaaagtccatttgtttatttctggcatatagaaaagtgattgacttttgtgtattagccatgcattctgcaaccttacatatcagtaaccttgcatgtcagttcccaaaattgtcaattattttggattttctacatagatgattatgtcatctgcagagaaatacagttttatttcttactttctcatctgtataccttttatttcctttatttccttttcttgtcttactgcattatctggtacttccagaacaatgttgtaaagtattggcgagagggacatctttgccttgtccttgatcttagtgggaaaacttcaagtttctcaccatacttgaggatgttagctgtaggttattgtagatattctttattaaggtgaagaagttcttccctatttctagtttactgggagtttttgtcacaaatctgtgttgaattttgtttactgaaagttatcacaaatgggcgttgaattttgttaatttttttgtatatattgatataatcaagtgattttttttagcttgttaatgttatggataacattaattgatttttgaatgttgaacctgccttaaatagctgaaataaatttaacttcatcacagtatataattctttttatacatcattggattggatttgctgatgttttgttaaggttttgcatctatgttcatgaggtatattggtccatagttttcttttcttgtgatgtcttaatctgattttcctattaggataaagctggcctcatagaatgagttaagaagtattctctcggctctaacttctaaaacaaattatagacaattggtataattttttccttaaatatttggttgaattcaccagtgagtccatcttgacatggtgctttctgttttggaaggtcaacttctgtaataaatgtaaacatatttaggtcatctatttctccatgtatgagtttagacaaattatgtctctcaagtgattgatcctctgtgtggacatagaactgtccattttagcatccatgggatctgtagtaacaactccttatttatttctgatatagataatttgtgtccttcctcttttcttcttaattagcctggctagagccttatccatttttttttttttaatctttcaaacctagtttttggttttgataacttttttctatcagtgtcccattttttatttctgctctaattatttcttttcttctgtttaatttgtacctgatttgctcttctatttctagtttcctaaggtgtaaacttagatcattaattttagatctttatttttttctaatagatgcattcaatactatcaatttctctttaaacaatgcttttactgcatcccacaaattttgttaagctgtattttcattttcatttagttgaagtattttaaaacttctattgtgatttcttccttgacccatatgttgtttagaaacgtattgtttaatctccacatgtttgtggagattagtgggattttaaaattttctttctgttattgactctagtttatttacattgtggtctgagagcagacgctgtatgatttctattttgttaaatttgttaggatatgttttggcccagaaggtggtctattatggtgattattccatgtaatcttgagagtgtgtattctgctgttgtttgacaaagtagtctatagatgtcaattatattcggttaattgatgatgttgctgagttcacctaagttctactgattttctgcctgctggatctgggcatttctttctttcttttttttttttttttttttattttgttgtttttgagacagagtctcgctctgtcacccagactggagtgcagtaatgcaatctcatctcatttcaaccactgcttcccgagttcaagcaatcctcccacctcagtctcctgagtagctgggaataccggcaaataccaccacacttggctcatttttgtctttttgtagagacagattttaccacattgctcaggttggtcttgaactcctgagatcaaataatccagccttttgggcctcccaaagtgctgagattacagtcatgagccaatataccctgctggatctgtgcatttccaatagagtgttgttgaaatctccaactatgataatgaattcatcgatttctccttgcagttctgttaatttttgcctcacgtagttaaatactctcttgttaggtgcgtgcacatttaggtttgttatgcggaaacataacatagtttcttggaaagctaattcttataccattatgcaatgcttttcttcattcctgataaatttccttgctttgaggtttgttctgtttgaaatttgtatagcttctcctgctttcttttgtttgtgccagtatgatataatacatatatatattcatgatccatttacttttaatttgtgtgtctttatatttaaagtgcatttcctgcagacatcatatagtttaatctctgatttttaattggtgcatttagatcattgatattaatgattattaatataggtggattaaatatctaccatatttctttctgttttctatttgttgcctttgttctttgtttctatttttgtttttcattctcttcttttcagagactgagtctcattctgttcattaggctagagtgtggtggtataatcatagctccctgtacccttgaaatcctaggctcaagtgattctcctacctgagccctgagtacctggtattacgggcatgtgccacaaagcctggctaatttttatttaatttttgtagcgacagagtctttgctacgttgcccaggctggtcttgaacttctggcctcaaatgatcctcctgcctcagtgtctcaaagggttgggattataagtgtaagctacaacacccagccatgtcttccatttttttcctgcatttttagtttttaacttagcatttataaagttccatattttctcattcttagtatatcaattatactttaaaaatgtgattttagtggttaccctagtgtttgcaatatacactcacaactaacataagtttgctttcaaataatactataccatttcacaggtactgtgagtaccttataataaaaaaatctaattctctgcttttatcccatgtgtcatttctgttatttattttatttacatgtaagaatacataagcatataaatatatataaaagatgtatacataagcacacataattaaatatattgctactattgttattttgaacaaactgccatttgttagatcaattaagaataagaaaaatagttttattttaccttcacttattttttatattgttcctttttcatataatttaggtttctaacctgtataattctctttccttttaaaataattgcatttaacttttttgttttttgatataagacaagtctactggcaacaagttatctcaatgtttctccaaaatagtggttgtttctcattcactttgaagaatttttttggctaaagaattctaagttgataaggttttttctcttaatactttaaatatttgtttccactgtcttcttgcttgcatggtttttgagaagaatgtaaatgtcatttttatctttgtttctctacatgtagaatttattttcctctggattctcttatgatttcttaaatctttgataaagggggtacaggggcatatgtgaactctatatttttaattcagtatttctgtcaacttaaactgataaaaactaaaatctattgattaagacaaatatcttgggaaacatcaatgtaaagcttgctgatctctctagtgttggggggaatgttggagaaaaatatgcctatttagctaaggacaaacctagataaattaactagaggtgtgaattgtatgcaagagattgtgtcagaacagggttccaataatgaacttcataagaggttttagataacctaagacattttgaaatataacacaactacaggaaattatacaatacaaatatgtagcttgattaattattataagataaacacctttgttgactcctgatatggcctagctgtgtctttacccaaatctcatcttgaattgtagttctcataatccccacttgtcatgggagggacccagtgggagataactgaatcatggagttggttaccctcgtgctgttcttgtgatagcgagtgagttttcatgatatctgatggttttataaggggcttttacccctttgttaggcacttctgtctcctgctgccatgtgaagaagaacacgtttgcttcctcttccaccattattgtaagtttcctgaggcctccccagccatgtagaattgtgagtcagttaaacttctttcctttttaaattatccagtcttgggcagttcttcatagcagtgaggatggactaatacaactgctaacattgtctaagaaagatccttgttatgtggctcagaggccctccatgtattcttaactattcactctcctatccttccaagaataacactaatttgacctctacaataatcactttatcactccagttttgccttttttcctccaaaacaatgccttttaagtctattttaatcgatagatttcctcttaatatcatttaaaaatatttctttacatttttagacaggaatcagaataatttgctatgttgaatttccagttacttggattttgttgatttcattcctgtggtttagttgacatgaatctctccaattgaaagggtaacttgaatatggtagctggaaagttaaaatcaattcttttaactttggaaaatgattaaattctggagatagaatagtaagttcataagatgacaggtcatttgcatcctctagtgaaaagcgaaggaattaaataaaaataacattttgatgcttaatgtttctggcagtattatgtctgtatttaattgttaaaatgtttttcaataattttttccaggttgtctgcattcaaaagagcattctattaaagctaccttaatttggcgcttatttttcttaatcatgtttctgacaatcatagtgtgtggaatggttgctgctttaagcggtaagtgaactgtaatctttattcatctagagagaattatacttgtaaaaagaagaggaagaatctgaataattttgttattctttacagcttttaatatattgtctcactaactgagttacactccaataactttttaagtggcaccaaaaattttaattatgtaaatagggttcacattattccaagtttagtgagatgatcagagtcttcagaaggtagaagacagaccactattccttaagaatattgatgcaaaaattaaaaaaaatagtaaactgaaaaatagtctcttgtccgatctaggaacatggttaattttacctccacaacaaccttgtttcatgaaaaatagcaaaacagatggtttaaagtacacaaaactactaagtggctgtataacatcacaggcagcctgttctttcttcctagctatttgagcatgttctggcccttgttttttttagcatatgtagcccatcttcctagaaaacaaactccgtttagtgattgtaccctaaaagcaattagctataaaaattatcttgtacttcaaaacatgcttgcagtgcatctaatatagaccaagcgaagacatagaaaactacaaaagcacttcccccaaacctcatgccaatctggatatcaacctaaaatctaccccctgttactacattctgaagtaatttcagagagacccttcaaatactgcttacgtaacttaagagtcagcaatacttggagcactccatataacactctaaataatttctattcatttgcaaatcttttgcttattatcttttggcattttgaaaccacagataatatactttatacatttatgaagcaaaaataatttttttatttcagagatttaagtcaactaattgtaactatttaagaaagaaaaaattggaaagagacaatttctgtactctgtaagtacctcagtattaatcaagggaatgtattctgaaatataatttaaatttatagctcttttttttacagtaagcatatgaaattgacacttatgactgttttcctttattatccattatgtgtttctcttcctttcagctagcactttggaaatgatttcttgtgtggagccaatagctggagccatcttctaatctggtcattttctttctttctttttttaaatgtgttattatgtattactttatatcatttttatgttttatttaacatttagattgttagttaactattcaagtgtggtatttccccatttaaatcgagttatttagattggctttagttataaaaattcctaatagagctttgtagttatagctctggtccctaactttttttttaaattatactttaagttctgggataaatgtgcagaacccgcaggttcgttacataggtatacacgtgccatggtggtttgatgcacctatcaacccatcatctatattaggtatttctcctaatgctatccctcccgttgccccccaaccctcaacacgcctcagtgtgtgatgttccgctccctgcatccatgtgttctcattgttcagctcccacatatgagtgagaacctgcagtatttggttttctgttcctgtgttagtttgatgagaatgatggtttccagtttcatttgtctccctgcaaagaatatgaactcattcttctttatggctgtatagtattccatggtgtatatgtgccacattttctttatccagtctatcattgatgagcatttgggttggttccaagtctttgctattgtgaatagtgccacaataaacatacgagtgcatgtgtctttatagtagaatgatttataatcctttgggtatagacccagtatttctggttatagatccttgaggaattgccacactgtattttccaaaatggttgaactaatttacactcccaccaacagtgtaaaagtgttcctatttctctacatcctcttcagcgtctgttgtttcctgactttttaatgattgtcattgtaactggcatgagatggtatctcattgttgttttgatttgaatttctctaatgatcagttatgatgagctttttatcatatatttgttggccacataaatgtcttcttttgtgaagtgtctgttcatatcttttgcccattttttgatagggttttttgttttattcttgtaaatttttttaagttccttgtagattctagatattagctgtttgtcaaacggatagattgcaaaatttgtctcccattctgtaggttgcctgttcactctgatgatagtttgttttttttgtttgtttgtttttttttttttttgtgcagaagctctttagttaaattagatcccgcttgtcaatttttgcttttgttgcaattgcttttggtgttttaatcataaaacctttgcccatgcctgtgtcctgaatggtattgcctaggttttgttctcaggtttttatggttttaggtcttatgtttaagtctttaatccatcttgagctaatttttgtgtaaggtgtaaggaaggggtccagcttcagttttctgcatatggctagccagttttctcaacaccatttattaaatagggaatcctttcccccattgcttgtttttgtcaggtttgtcaaagatcagatggttgtagatgttgggtgttatttctgaggcctctgttctgtccattggtcaatatatctgttttggtaccaacaccatgctgttttggttactgtagccttatagtttaatttgaagtcaggtagcatgatgcctccagcttagttctttttgcttaggattgtcttggctatacaggctcttttttggttccatatgaaatttaaagttttttttttttttaattctgtgaagaaagtcaatggtagcttgatgggaatagcattcaatctataaattactttgagctatatgactattttcataatattgattcttcctatctatgagcatggaatgattttccatttgtttgtgtcatctcttatttccttgagcagtgatttgtagttctccttgaagaggtccttcacatctcttgtaagttgtattcttaggtattttattctcttagtagcaattgtgaatgggagttcactcatgatttggctctctgtttgtctgttattggtgtataggaatgcttgtgatttttgcacattgatttcgtatcctgagaatttgctgaagttgcttatcagcttaataagttttaaggggatgagacaatggggttttctaaatatacaattctgtcatctgcaaacagagataatttgacttcctctcttcctgttgaatacactttctttctttctttcttttacctgattgccctgactagaacttccaatactatattgaataggagtggtgagagagggcatccttgccttgtgccagtttacaaagggaatgcttccagcttttggccactcagtatgatattcgctatgagtttgtcataaatagcttttattattttaatgtatgttccatcaatacctagtctattgtgtgtttttatcatgaaggggtgttcaattttatcaaaggccttttctgcatctattgagatcatcatgtggtttttgtcattggttctgcttatgtaatggattacatttattaatttacatatattgaaccagactttcatcccagggatgaaactgacttgatcgtggtggataagcttttgatgtgctgctggattcggctggccagtattttattgaggatttttgcattgatgttcatcaggaatattggcctgaaattttcttttttgttgtatctctgctaggttttggtatcaggatgatgctggtctcatataatgagttagggagaattccttctttttctattgtttggaataatttcagaaggaatggtaccagctcctcttcgtacctctggtagaattcggcagtgcatttgtctggacatgggcttgttttggttgggtaggctattaattactgcctcagtttcagaacctgttattggtctattcaggaatctgatttcttcctggtttagtcttgggagggtgtatgtgtccaggaatttatccatttcttccttgcctgggtatcaccagcaaaggctgaagaaaagcaaagattgctgcctgctccttcctctggaagcttcatcccagaggggcacgcaccagatgccagctgagctgtcctgtatgaggtgcctatcaacccctgctaggagttgtctcccagtcaggaggcatgggggtcagggacccacttgaaaaggcagtctttccctcagaagagctcgagcactgtgctgggagatccactgctcttttcagagctggctggcaggaatgtttaagtctcctgaagccgtgaccacagccaccctttcccccaggtgctctgtcccagggagataagagttttatctataagcccctgactggggctgctgcctttctttcagagatgccctgcccagagaggaggaatctagagaggcagtccggctgcagtggctttgctgcactggctttgctgcactgtggtgggctccgcccagtccgaacttcccccagggctttgtttacactgtgaggggaaaatcacctactcaagcctcagtaatggcggatgcacctcccctcaccaagcttgagcatctggggtccacttcagactgctgtgctggcagcaagaatttccagccagtgggtcttagcttgctgggctctgtggggattggacccactgagcaagaccacttggctccctggcttcagccccctttccagcagagtgaatgattctgtctcagtgggttccaggctccactggggtatgaaaaaaactcctgcagttatcttggtgactgcccaaatcgccacccagttttgtgcttgaaacccagggttctggtagtgttggcactccagagaatctcctggtctgtgggttgcaaaaaccgtgggaaaagcgtagtatctgggccagatagcacctcacagcacagtccctcacaacttcccttggctaggggagggagttctcccaccccttgtgcttcctgggtgaagcagcgccccaccctgcttctgcttgccctctgtgggctgcacccacttgtgtaaccagtcccagtgagatgatcctggtacctcagttggaaatgcagaaatcacctgccttctgcattggtctcactgggaactgcagaccagagctgtttctaatcagccatcttgccctctctggtctggtcgttttctttaaattggttgatacaggagcagtgatagcacaacaaatatgcacagatttggggaaagtcatcctgccttatggtctggttcaagaaattacattttaatagttataatttggtatcaccttgtttgtgataccaaaccagatacaatacacgtttgcctcatgttatgatttgttattcagattacaccagttattattcataactaagagtgatttctcatctcacaagagccaaatccaaggataatggtgccaattgatagtaatgattctatgaatacccagcattctggtctatcatagacactttcagaaccattgagttgaaggtagaaggtggttatataatagaagatgaactggtagctactaggggctcagtgacaactatctggagagacattcattcatctcgatcccacatgaagagagcatttctcctgattatataagaagtgggtcagaaaagcctgtccagtgaagtattgctgccttcaaagtgtagaaaacctcactacatctccttagtggaaggaagttcactgtacaacaacttatttcatatttatgatagtatttagacatatacaaggctttttcacatcaagaaaccttattcacataaggcatctctatcctgcccttcattttaccaagtcatctggagcagcaatcgccaaccttgttggcatgagggaccagttttgtgaaagacaacgttttcatggactggggtcaaggaatggtttggggataatttaagtgcattacttttattgtgccctttatttccattattattacattgtgtaataatatataataaaataattatacaactcaccataatgtagaatcagtgggaaccctgagctagtttttctgaaagtagatggtaccatctgtgagtgatgggagacagtgacagttcatcaggtattagattctcacaaggagcccacaacctagattcctcacatgagaagttcccaatagggtttgccctcctatgagaatctaatgccactgctgatctgacaggaggtggagctcatgaggtaatgtgagtgatggggagtggctgtaaatacagatgaagcttcacttactcattcgctgcttacctcctgctgtgcagcctgcttcctgactcatccatggaccagtactgatccatggcctaggggttggggacccctaatctagagcacttggagaactatctgttctccaaagctgatcaaatgctatcattaatgtatctaatattttaagaaagggtaacactgttgagagccaaatagatacatggcccagagcaagcttaagttactaataactcctttttcagctcaccccctgctgaaggcatgagtttgaatctcagttttgccatttgctgtgtaatgtatgcaattatatttagcatcatatttctcacttgaaaaatgaaaataatacatttaatacttaacaggagtgtcagaaagtatattagcacttggtaatttatacaatacaatataaaagtaagaaatttttattttatttatttttattttattttcagcaataagagctaactgccatcaagagccatcagtatgtcttcaagctgcatgcccagaaagctggattggttttcaaagaaagtgtttctatttttctgatgacaccaagaactggacatcaagtcagaggttttgtgactcacaagatgctgatcttgctcaggttgaaagcttccaggaactggtaagaaaatagttctggccagaatcaaagattcagccctacaaggatatgttttcctgtgaaattatctaagaggtaggtttagacatctgcttttacattgattttttttttttttttttttgcataacgaaagagtaacctagcatgtattatattttacagtgaaccatctaaaattaccttaatattcgtggcaggaacaggcccagagggcaagcaagccagagccttctttgacttgtgagccagaattgtgcaaataaggattagaaaagtattggtagaaacccagttttaagtttgtatgaagttagcaacattgtttcaaaataaatcaaacaaggccaagagcagtggcacatgcctgtaatcccagcactttgggaggccaaggcgggtgtatcacttgaggtcaggagtttgagatcagcttggccaacatggtgaaaccccatctcaactaaaaaatacaaaaattagctgggcatggtggcatacgcctgtagttccagctactcaggaggctgaggcagcagaattgcttgaacctgggaggtggaggcctacagttagctgaaatcatgctactgtactccagcctaacagagtgagactctatctcaaaaaaataataaaataaaaacaataagtcaagcaagaatgatgtcatagagattggtagactaaaaagctacagaaatctgttcctccactgagaaaactattgaactgtcaaaaactgtctgaagtaactattttggaattctcgagtctagttaaacactggaagcatcaagggaagagtttgataaagaggatgataaattttggttaatgttggtgaatttcagcctttccactcaataataactattttccataccccattattgcagggatccatgggaactgctgcccatgttcttgtaatgaattcctgcagccagggtgaacaataagcacctttttgtccaaatatcagggttattgctgatttctgcctttgaatgctgaggggcagacacagaagtgggctatcattacatcagtcctcatcagctgaagtggcttcccaaggatttaaataaatagtatgtgtttttcctccctttaggaagcagtcatttaagacaatttttattagataactggctgacagcagagataacagaacagagatttcaatgaccatgcacaacagagaataaaaatagttgggaaaaaatcatgaccaaatgactctgagccacaacaaccaagatttgacaatccctgaagagcaaaataattaagttaccagagttaccacaacatggtactcataatgtccagttctcaaaaaaaaattacaaaacatgcaaagaaaagtatggttcattcacaggaagaaaaagtaatctgacagaaactatccctgaagaggctcagatattaaaaatatgagtcaaaaatgttaaatcagctgtcttaagtataaccaatgagttaaaggaaactagacaaaaagctaaaggaaaccgaaaacataataaatgaacaaaattagaatatcaatataaaggtagaaattgtaaaaaagaaccaagcaaaaattccagagctgaaaagtacaatgactgaaatttaaaaataattttaaaaactcaatgaagaagttcaacagcagatttgagaagtaagagatcagaaaacttgaaaataagataattgaaacaatccagactaagaaaaacaaagaaaaagaatgaagataaataaattctaaggaacctgtaggacatcagcaaacatactaacatatgtactgtagaaatccaggaaagagaagagaaagagaagcagagaaatacacttaaagaaataatgaacaaaactttccaaaatctgaggaaatacataaatatatacatccaagaggctcaatgaactccaaaagggtaaacttaaagagatctacattgagacaaaatatagtcaagttgacaaaatccacagagagaattttgaaagcagccagaatgaagcaactcatcatttacataagaccctgaataaaattaatagctgattttctctgagaaaccatggagatcagaaggtagtggaatggcatatttaaatgtctgaaagaaaaaataaaactgccaaccatgaattctatgtatagcaaagttgtccttcaagaatgaaggaaaaagtaacacattttcagataaccaataattaagggattttattaccagtagacatgtgctacagaaaatgctaaaggaaaccttttaggctgaactgaaagtacactagacagcaattcagagcctccaaaataaagaatattcataaaagtaacaatagaggtaaatataaaacccagaattactacatgtgtcatatagtttataacttctcctatttatagctttctatatttatatttatctataacttcataggcaaatgaataaaaattataaatatgatagtggtcatataatgtataaagatgcaatctgtgacagtcttatgaagcagggatgaagacatataggatcaaaatgtttgcatagttattgaagctatgttgatattatgaaattatattgttacaagtttaagatgctaattataattctcaaggtaaccactaataaaattaccaaaattatgcagaaaaggaaaaaagaaaaacaatacactataaaaaaccaattaaatacaaaaaatgtcagtaacagacaacttgagaaacaaagacatataagatatagagaaaacaaatgattaaatggcaaaagtaaatcttgttttagtaatcacattaaatagaaaaggatgaagccatcctattaaagggctgagactgacaagttggctaaaaactaaaataaattaaaaagaaaaacaagactcatctacatgctgtctataagagacttgccttagatataaggacacaaagaagttgaaagtaaaaggactgaaaaagatattccatacaaacagtagtaaccaagatagtgccgagtggctatatttttgtcaaacaaaataaactaaagtaaaatttacaagagaaaaagaagggcattatgcattgacaaaaattttgacatagccaaataattatctgttataaaatatatgtacttaataatacagcctcaaaatatatgaagcaataattgctataatttaagggagaaaagaacagttctatgaaaagttagagaatgaaatattccactttcaacatgagattaaacaactagacataagatcaataaggaaatagaaaatttgaacaacactataaaccaattatccctaacaggcatatacagaagaatctacccaacaagagcagaatattaattcttctcaaatgcacatggaacattcttaaaaataaaccatatgttaggccacaaaacaagtgttagtaagtgtgaaaatttgaagtcataaaaagtatcttttgcaattacaatggaatgaagctagaaatcaataactagaaaaaccagaaaagtcacgcatatgtagaaatttaaaaacctgctcttcaacagccattggtcaaagaagaaatcacaagggacattagaaaataccttgagacaaatgaagtaaaaatacaaatagcacgtttatggtatacactgaacatagttctaagagggaaatttatagctgtgagcagttaactaaaaaagaagaaagatctcaaatccatagcctaactgtacactgtaaggaactaaaaaaagtaaaacaaaaatagaagtcatctttatgatttgaaagagtaaaagatttacctaataagtccctaaatttactaataataaagaaaattgtttatatatttaattgcgttaaaattcagaacttgtaatcatgaaaaggacagtacacattgacaaggaaacacagcaaaggaaaccagcctatgctgctgctgttgtgaggataatttggtacacttacattagtttggtgtcttttctttctctctctttctttctttctttctctttctttcgttcgttcgttcattcgtttctttttgagacagaatctcactctattgcccaggctggagtgcagtggcgtgatcttggctcactacaacttttgtctcccaggttcaaatgattctcatgcctcagcctcccaaatagctgggattataggtgcatgccatcacgcccagctaatttttgtattttttttaatagagagggggcttcatcatgttggccaagcctagtctcaaactcttggcctcaggtgatccgcctgcctcggcctcccaaagtactgggattacaggtgcctggcctggtggtgtcatttcttaaagttgacaaaaagcatatcctggggcctaaaaattctattctaggacaggtgccaagaatgtcatagtagcatacattccaaacttgataaaaccctggtgtcaaccgatagtataatagataaattggagaagagtcatacaaaggagtacaatacagaaacaaaagtaaccaaattatcaacaatttctctcagttttaaattatcttcttttgatatgtatgataatatagcacacctattctgtatgtattactaaacaatacaaaatcaaaaggaagaaaattatgagtagttaagaatatagcatagcagcaacatttctgggagaggatgggttatgttagattaatgaatatcatctctgtgttttctgaaagaatttcctgttgagatataaaggcccatctgatcactggattgggctgagcagagaacaaggccaaccatggaaatggataaatggtactgaatggacaagacagtaagttctaaaaatctggcagtaatatttgtatttgaatttactttgcattaaatctgaagtgttctctagttacatgctttaaaaaattctcattttaaggttagtcatgaaagaagatggtgccaacttgtatgttgcaaaggtttcacaagttcctcgaatgaatccaagacctgtcatggtgaggtagactgactgtgaacttggctccaggcttatctatgtcattttcaaacactttcattttaagcaaaccatacaatatctttaagtctgttccttacctccacaacaaaattaaattgcacttgtcctcctgatttcacagggttgatgtgaggaacagaggttttgatgtatcagggaaagattatgagtgacagcaattatacctattatttaaaataagacaatagttttaaaattttaaaatgggtaaagtttggcactagaaaatttaatctcaattgtatatttataggatcttcagattactaaaaagatttgagataatgctggaaaaattggattcacacaatttcactcaatgtttgtctgagagatgagacagttttgaaaagctactttattgtaatacattcatcaatattggaaatataactttatttaataaaaagagccccagactggacattggcaggtttgaaatgagttttttctcattagcttttgaccttggatgggatggtaagttttagaaatcagagaacatgtacatttatacattgttgtatctacactgccttgcacattgtgactgcttcataaatatctagaattaacttttatttcttattttacaatacggaagtagtaaattttctctacctaattcttaaaatggttttttgtttgtttgtatttttgagagacagggtcttactctgttacccaggctggagtgcagtagtaccatcgtggctcactgcagccttgacttccctggctcaagtgagcctcccatctcagcctcctgagtagctgggactacaggtgtgtgccaccttgcttggctttttttttttttttttttttttcagcgatggggtctcactatgttgcctgggctgatcttgaactcctgagctcaagcaatcctcccacctcggcctcccaaaatgttggaattacaggtgtgagccaccatgcctggcctctcaaaatattttaaggatcaaatatattattaactaaccagtttttggaaactgctcatcacttaaagaaatgtaaaatattatatgattaaggtctaacaagtttcaacaattagcaaattatatcatagatgatagtgattccaatgagcaaagaggaaaaatttataatccaaatgctgacctaaaatatctgtgccaagccatctaaactcagctaaatagcactgcagtttcagtactaaaaccaccagggaagtaggaggaataaaatcaagcatggtttttagaaatagctgctgagtcttcagttatttaaggaagcaaaatattgggaaactgtgtaaagaaaacgtgtcagacttctcccatcagccagctaaggctttggatgtacttgaaagaatattatgcttacagacatgaaataggtttgattcaggactttgcagtattcctatagttgatttataacatctcctgctaagcaaagcccactgactaattagtcaccactacacaaggaaaaacagcattatttttagaggctgaattaatgttagttttctcattttctcatcttcattctctctgctgttgaagaaatgttcagtggccaactgattctgcttcttctcttgcaggtttcctatcctgggagcaggagagtgtgcctatttgaatgacaaaggtgccagtagtgccaggcactacacagagaggaagtggatttgttccaaatcagatatacatgtctagatgttacagcaaagccccaactaatctttagaagcatattggaactgataactccattttaaaatgagcaaagaatttatttcttataccaacaggtatatgaaaatatgctcaatatcactaataactgggaaaatacaaatcaaaatcatagtaaaatattacctgttttcatggtgctaatattacctgttctcccactgctaatgacatacccgagactgagtaatttataaataaaagagatttaattgactcatagttccacatggctggggaggtcttgcaatcatgacagaaggcaaatgggaagcaaagtcatgtcttatgtggtggcaggcagggggacttgtgcacaggaactcctatttatacaaccatcagatatcttgagacaagaacagtatggggctccctggtgtgattccgtcctgcgcggctgttctctggagcagcattcatttatcttcgtctgccttgtctcctacctaagtgtgtgtcgccacccgatggaagattcgatggacatggacatgagccccctgaggccccagaactatcttttcagttgtgaactaaaggccgacaaagatgatcactttaaggtggataatgatgaaaatgagaccagttatctttaagaacggtcagctcaggggctggtgcaaaggatgaactgcacattgttgaagcagaggccatgaatgacgaaggcagtccaattaaagtaacactggcaactttgaaaatgtctgtacagccaacggtttctcttgggggctttgaaataacaccaccagtggacttaaggttgaagtgtggttcagggccagtgcatattagtggacagcacttagtagctgtgaaggaaggtgcagagtcagaagatgaagaagaggaggatgtgaaactcttaagtatatctggaaagcagtctgcccctggaggtgggcagaaaaaagtaaaacttgctgctgctgctgctgatgatgatgatgaagatgatgatgatgatgatgacgaggaagctgaagaaaaagcgccagtgaagaaatctatacgagatactccagccaaaaatgcacaaaagtcaaatcagaatggaaaagactcaaaaccatcatcaacaccaagatcaaaaggacaagaatccttcaaaaaacaggaaaaatctcctaaaacaccaaaaggatctagttctgtagaagacattaaagcaaaaatgcaagcaagtatagaaaaacgtggttctcttcccaaagtggaaaccaagttcatcaattatgtgaagaatttcttctggatgactgaccaagaggctattcaagatctctggcagtggaggaagtctctttaagaaaatagtttaaacaatttgttaaaaattttccatcttatttcatttctgtaacagttgatatctggctgtcctttttatagtgcagagtgagaactttccctaccatgtttgataaatgttgtccaggttctattgccaagaatgtgttgtccaaaatgcctgtttagtttttaaagatggaactccaccctttgcttggttttaagtatgtatgggatgctatgataggacatagtagtagcagtggtcagacatggaaatggtggggagacaaaagtatacacgtgaaataaaactcagtattttaataaagtaaaaaaaaaaaaaaggtatggggaaaactgcccccataaagcaattgtctccacctggccctgccctttgcatgtggagattattacaattcaaggtgaaatttgggtggagacacaaccaaaccatatcagatggctatatcaaaaagacaagaaataacaagcattggtgagagtgtggagaagacggaacccttgtacacagttggtgggaacacagtttggtgcagccattatagaaaacgtcatggaggttcctaaagaaattaaaaagagaactaccatatgagccagcaatcccttttccagatatacacccaaaggaaatgaaatcaccacctcataaagatatctgctttcctgtttattataacacatctttattcataatagccaagatacggaactaactgaagtgaccattaacagatgaatggataaagaaattgtcatatatataaaacacacacattatatacatacatacatatatatatataaaaaaatagaatattattcagccttgtaaaaagaaatcctgttatgttgggaacaagccccccaaaatctggccataaactcaccccaaaactggccataaacaaaatctctgcagcactgtgacatgttagtgatggccataacacccacgctggaaggttgtgggtttatgggaatgagggcaaggaacacctggcctgcccagggtggaaaaccacttaaaggcgttcttaagctacaaacaatagcatgagcgatctgtgccttaaggacatgttcctgctgcagttaactagcccaatctattcctttaattcggcccatcccttcatttcccataagggatacttttagttaatttaatatctatagaaacaatgctaatgactggcttgctgttaataaatacatgggtaaatctctgttctgggctctcagctctgaaggctgtgagacccctgatttcccacttcacacctctatatttctgtgtgtgtgtctttagttcctctggcgctgctgggttaggatctacccaactgagctggtctcagcactgttatttgaaacaatgtaaataaacctatagggtttattatatatactaagtgaaataagccagacacagaaaaaaaatgttgcatgatctcacttatagtgaaacttaaaaaaaaacccaaatacatagaaatagagtagaatggtggttaccagagatgaggaaaatacagagacacaggtcaaaagatacagagttgcagttacaaagggtgagtatgtctagatatctaacatacagtatgaggactataatagtattgcactgtgtactgaaaacttgatgacagattttagatattcttaccacacagacaaaaagaaatgtaagtatgtgagatgaagcttatgttaattagattaagtgtatgtacataaaaacatcacattatacacatcaaatatatacaataaaaaagcacattgggagatacatgataaatttctatctgcagttgctatttgcatttttaaaggatatttttattttttaaatttttagctgacaactgtataattatggaatacaatgtgatgttctgatatatgtgtacactatggaatgattaaatcaaactaacatttcatcatctcacatacttatcattttctgtggtgagaacatttgaaatttattctcttgacaattttgaaagatccaatacactattattaactatagtcactatgctgtgcaatagatctcaaaagcttattcctcttaactgaaacctactaccctgtgacatgtggggaacatctctctattccccagccccagtccctaaatgttgaatacacaatggggaaaaaatagtcttcaatgaatggtggtgggaaaattgtatatccacatgcagaagaataaaattggacccttacctcctaccatatataaaaaccaactgaaaatcgattaaagacttaaactgtaaaactactaaaagaaaatatagggagaaagcttcacaacgttggtctgggcaataatttttggatttgacctcaaaagtagatgcaaccacagtgaaaataaacaaatgaaattgcataaaataaaaaatgtttctgcacagcaaaggaaataattaatggagtaaagagacaacttacagattgggagaatatatttccaaactattgttggggctcagaaacggataccctaacatatagtgatttgacaggtggaactaaagaagactcgaggtctctctgacctcctcctcaacctctgtttcttaatcctctgttttcccagagcacaggaggaagttctctgaagttcctttatctgctttaagttcagactcaccaaataagaaaacagttaattctggtgccttccatgggttttcattaactgaagtcatattgtaggaaaaagaatgaagtctcttaacccacctggatagatttttctcacaaaccattgtcttctctgcaagcccagtagactttgtcccaggccatttatgtgatcttcaccccattaagttctccccaaattatttactcttcccccaaaatcacccacacttccccatctccctctcccctaaggacaagggtatatcaccatctataccccattgcttggtggggtgatcactctgatttctctgcatgcatttttatagatttgtttgccatttatcctattaatctgcattctgtcaattgtggcaagttatcagcgtattttttaacttttaattattcttaatggaaagacacttctgtatacactggaaatctcaggaaatttcttttttccttaagcttaattgaaatgtttacttttcagtaaaatttcaagcttgagtaatgttcatgcctgcttttcattgaaatagaatgaaaaggttgcacaatattattttcatgaaattacttctagtataattctgaataaacactttgaaaggcagtgaactgtaaatatattacagctatctcttattcttcagggtgggtctcaattatgtaaaagatgattggctttctgttttaagtaatagtcattttgaaaacactttaaaactgtcaagtgaagtgtgatggctaattttatatgtcaacttgactgagataaggtatactcagcagggaaagcattatctctggatgtgtctatgagggcttttctgaaagagattgatgttggaatcactaagctgtgtaaagatgatctaccttcaccaatgttggcaggcatcatccaatccgtgcaggtcttacccaaacagagcaaaaagtcaggtagggtaaatttattctcttctaaagctagggcatccatttctttctactctcagacattggagttccccagtttcccagacctttggccttacactgagaattatgctttgttttatttaggcatattttaataatacttcatgtattggtcaggaagacatttcctggttctaaggctttcgactcagactagattacaacactggctttcctggttctctagcttgcagaagagaatactaggaagcttgtacttcctacataggtaagaagaggaaactaaatctctggcttataaactatgtaaccaaccacaattcacaaagattccataatttccttggcaggaggctaagatctaaagcccaatatgattgtacttctcttatcagttttctgcaaacaaaagagaatagaactaaaatacagctttgttaaaataatgttgattcatttgcatgaaatatcagatcacagaaacaacatatttttataaaatatgagctctgtcacactggccctcatagacacatccagagataatgctttccctgctgagtataccttatctcaatcaagttgacatataaaattagccatcacacttcacttgacagttttaaaattaggttgttttttccaaatgacaaaaagcaggagcaaactgcaagtgctcctgcaacacatctaacaagaaagccttatctgacttttatgaggttcagtataatgcccaaactgcatatttcaaactcttgccatcagattcacctaagaagacaaaagatctattgcctttgaacctacattcccaaagcgtgcaacatgaacttgcctacatccaaggggtaggaccttcttacgtagtgaattcccaaagtgttgctgaaattatgaacagtgctctgcctcatactgacaagtgaaacctctatctctgattgcccaaaaatgtctaatgaagctatagcatcactacaatttggaatagacacttaatccagaattgaagagatatagataaaaatgaactgagtgcaatgccaagagataggataaatatggccccctccaaaaaaagatcctaagtccatgacaatggtgctagagatttctcacaaaactccaaggagtaaaacaagaaactataaagacagatggagaaccacatgttatggtgcatcatataaacaacgaagagatggtagtcaattgtgtaagaatcttgaagttgttgggttcaaataaagagaattatgaaatgaaataagtatccaattaacacaggaaataatatgaacaatggggttaggagaacagagatcaatgtaagagatgtttccaaaagtaatgatgttgtcatggaagttggcagatgatcaaattatcaggtatgtaaaactgatcatgaaggtgttccaaggaaattactctaattgtttcatcaatattgaacccaaaattaaatcaacacaaacatagaaaaggaaaaaaaaaaaaaggcaaaaggcacagtgtaatgatgctctctttactcctttggaagggattgataaaattgcaactacttcttgtataaagaatcatccattttatagatgactacaaattcaatcctaaaccttcaaatacaatgaaaagaaagtatgtactgagagctggaatgactactcacctaggccaaactctcacctaggaatgaagcatcaggcacacagtgcactgagcatggctgaaggtgcattgactaatcttctaaaacctactccagaatgagagagactggtacaactccatttgtgctaaatttggagatataaacaatattttggagttaaaacctagaagttttcaaatctacataaaaaatcaatttcttttttttcttgcaaaagcagaaaagatgagaggacattggcacctgccaagagtgttgatgaaatggggtacttccctggcctctttgcaggagttgcaaaggggttggcttgtttactcagcccacagctctcaacccctcatgggaggggaaactcacaggtgagtgggtgtagggatcaggatgagggcttctgtgtgccagcaggagtagaactctgtgctgccccatggcaacatctaggggagttcccatgacccctcaagccccagagggtgagtgttacagtgtgctcttttagcttttctatccacagatgacttaagtatttaacagctcagtggagggtcagggtgacagccttttggacctgccttcttggtacctcagttcttgtttagcgtccaggaagaatcaggtcatgcaaacaaattgaagggtagtgaatgtggaggattttattgagggatggaagtggctctcagcgggatagggagctggaaagtggatggaatgggaaggtggtattcccctggagttcagacaaactcttctccgaggtcccaccatcaagctgtccctctgagctcaaactgcttctctctgacatccggctgcttcttcttttctttctttctctgtcactctgctattccgctgctctgctgctctgccactctggtgatggggcctgtggtttttatgggtagaggatggggtgtggggtgggccaaaaagcaacatgtgagtgggaaagcaggaaatgcatgttctcattttggtctgtgatcccaggcttgaggatgtgtggctcttgcttgggacagccctcttctgcccagtatttccctgcttcccacccatatcaccaacactgctcctaaccctactcaaaaggtacattaaaatatagaggtggaaagttatatgctgcttctctcagagcaaaccctttctctcttatgtaaaataactaactttcctccacagcataatttaaaaagaaaactaatgatgacattagtcagaaatctgtagacatctctactcctctagtaactctgaaaactgggtctgctaatgagttggtagcattaaatctgaagactgaaagttttctattctgttccttctctttttacccttactttagtggaacagtaaatttcagtaaaatcagtgaaggtgtatctgccaaggttccaatcaacacagaggaagagaagacttgttctataactaaactagtagacaacccagaaaaattatctctacttataataaacagaaatcctaattactgcatccaactacctgaccatcattcatttttaagagacagaatttttaacgttccaaagttctcacccaaaagagatctgacagtttctgactgcactccattctggagaagttgctactaaattgaatagagtaaagttattgttcctttaaatacaatatctatgaatggacaatcaagatttatgtcccttaaggcataagacagctgttaaatgttgttcctccattgtactaatcaacttcatactactggaggatatttgtaaaaaatatttatatatacacacatacacacacactcttaaaataatttgtgctaggttatttatttatttatttatttatttatttatttattgagacaaggtctcactctgttgctcaggctggagtgcagtggcatgatcatagctcactgcagcctcagcttcccaaactctggcgatcctctcacatcagcctcccaagcagctgggaccacaggcatgtgccattatacctgactaatttttgaattttttgtagagacagagttacaccgtgttgccaaggctggtctcaaaattttggggtcaaacaatctacctgccttggtctttcaaagtgcttggattatagttgtgagccactgagctcagcctgtcctaggtcttttaatgtcaaaagaacacttgcccgcatatatatatatatgtatacatatttgtcatttctttgtcttaaaactggaatatcctgctttaaaactttaagacaaagtgtaaatgattttctttttttaatgagaaatagtcaccttttgtcaattttatttgctgattttattgacttgcgtattctacagtggagacctcaacatattctatgtattgtgttttagtagcaaggtgaacatatgtatgatattttccaccttaatgttactctttaattgaatacatttataagttacattaaagcttattttatgttgaaagaaggagctagaaaactagtgatgttaaacaatgtgttaacatttattttcaatgatgaatcatttagtttacaagacatatcttgtattttctttaggtaattgccaaatcagagtcaaatttatggtaagttcatagtactttaatattttattaatatgaaatacttgatttttacattcttagaattttaattgcgcaaggagaacttccaataaatattttctgtatataattatgacactttcttcacaaatattacatattctatgctccaaggccttgaacaatttcttgtgaaaatgttgctgcattgtcacagttatttcacaattttcatatagagaggaatagggattaagttatgttcatttgctttttttaacttttaagttcagagatacatgtgcaggatttgtagatttgttacataggtaaacacatgtcatggagatttattgtacagattattttatcactcaagtattatgcctagtatccattattttttaaattctctccctcctttcaccctctgctgtttggtaggcccccgtttttgttatttccctctaggtatctatgtgttctcatcatttagctctcacttacaagtgagaacatgtggtatttgattttccattcctgtgatagtttggtaagaataatggcatctagttccatatatgtctctgcaaaggacatgatcttgttcctttttatggctgcatagtattccatggtgtatatgtaccacattttctttatccagtctatcgttgatgggcatttaggttgattttgtgtctttgctattgtgaatagtgctgcaatgaacatatgtgtgcgtgtgtagttattatagaacaatttatattgctttgggtatacgcccagtaattggattgctgggtcgaatagtagtgctgtctctaggtctttgagaaattgccatactgtcttccacaatggttgacctaatttacactcccaccaacaatgtaaaagcattcctttttcaacacaaccttgccaacatctattattttttgactttttaataatagccatctgactggtgtgggatggtgtctcattgtggttttgatctgcatttctctaatgatcagtgatattgagctttttttcatataattgttggccacatgtatgtcttcttttgagaaatgtcttttcatgtcctttgcttactttttaatgaggtcttttttttttgtaaatttgtttaagttccttataagtgctggatattagatcattatcagatgcatgaattacaaaaattttatcccattctgtaggttgtttactctgttgatagtttctcttgctgtgcagaagatctttagtttaattagatcccatttgtcaatctttccttttcttacaattgcttttggcatcttcgtcatgaaatatttgcctgtgtctatatcctgaatgttattgcttaggttttcttctatggtttttatagttttgggttttacactaaagtctttaatccatcttgagttgatttttgtatatgatataaggaagggtcccagtttcaattttctgcatatggctagccagttctcccagcactatttacaggggaatcctttcccattgctcatttttgtcaggtttgtcaaagatcagatggttgtaggtgtgtggtcttatttctgaattctctaatctgttccattggtctatgtgtctgttgttgcactggtaccatgctgttttggttactgtagccttgtagtatagtttgaaattgggtagtgtgatgcctctggctttgctgtttttgcttaatattattcaggctattcaggctcttttttattccatataaattttattccatataaattttaaaataggtatttttctattgaatctgtaagttgcattgggaagtacggccattttcaagatcttgattcttcctatgcataagcatggaatgtttttccatttgtttgtgtcttctctgatttctttgagcagtggtttgtacttctccttgaggaagcccttcacttttcttgttagctgtattcctaggtattttgttctctttgtagcaattgtgatttggctctctgcttgcctgttgctggtgtgtaggaatgctagtgatttttgcaaattgattttgtaacctgagactttgctgaagttgcttctcagcttaagaagcttttgggctgagatgatgggactttccaaatatagaatcatgtcatctgcaaacaaagacaattttacttcctctcttcctctttgaatatgctttatttctttcccttgcctgattgcccaggccaaaacttctaatactatgttgaaaaggtgtagtgagagaggttatccttgtcttgtgtcagtcttcaaggggaattctttgagcttttgcccatttaatatgatattgactgtagatttgtcatatatgactcattattttgatgcctgttccttaaacaccaggtagattgagagtttttaacatgaagggatattgaattttattgaaagccttttctgcatttactgagataagcatgtggtttttgtctttagttttatttatctgatgaattacatttattggttggtgtatgttgaaccaaccttgcatcccaaagatgaagccgacttgatcgtggtgaataagcttttcaatgtgctgctggattcagtttgtcagtattttgttgagaatttttgcatatgatcatcaaggatattggcctgaagttgtctttttgtttgtatttctgccaggttttggtatcaggatggtgctgccctcatagaatgagttagggagaagtcacttctttcaagtttctgaaatagtttcagtaggaatggtaccagcttttct

SEQ ID NO: 15 - DNA, 2706 bp, Homo sapiens
accgatgaatgggattagtgcccttacaaaaggggcccaccaaagctgccttgttccttctactatgtgaggacacatctagaagttaccatcaatgaaccagaaagtgggccctcaccaggcaccaaatctgccagcactctgatcttggacttccagcctcctgaactgttgtctgcattcaaaagagcattctattaaagctaccttaatttggcgcttatttttcttaatcatgtttctgacaatcatagtgtgtggaatggttgctgctttaagcgcaataagagctaactgccatcaagagccatcagtatgtcttcaagctgcatgcccagaaagctggattggttttcaaagaaagtgtttctatttttctgatgacaccaagaactggacatcaagtcagaggttttgtgactcacaagatgctgatcttgctcaggttgaaagcttccaggaactgaatttcctgttgagatataaaggcccatctgatcactggattgggctgagcagagaacaaggccaaccatggaaatggataaatggtactgaatggacaagacagttagtcatgaaagaagatggtgccaacttgtatgttgcaaaggtttcacaagttcctcgaatgaatccaagacctgtcatggtttcctatcctgggagcaggagagtgtgcctatttgaatgacaaaggtgccagtagtgccaggcactacacagagaggaagtggatttgttccaaatcagatatacatgtctagatgttacagcaaagccccaactaatctttagaagcatattggaactgataactccattttaaaatgagcaaagaatttatttcttataccaacaggtatatgaaaatatgctcaatatcactaataactgggaaaatacaaatcaaaatcatagtaaaatattacctgttttcatggtgctaatattacctgttctcccactgctaatgacatacccgagactgagtaatttataaataaaagagatttaattgactcatagttccacatggctggggaggtcttgcaatcatgacagaaggcaaatgggaagcaaagtcatgtcttatgtggtggcaggcagggggacttgtgcacaggaactcctatttatacaaccatcagatatcttgagacaagaacagtatggggctccctggtgtgattccgtcctgcgcggctgttctctggagcagcattcatttatcttcgtctgccttgtctcctacctaagtgtgtgtcgccacccgatggaagattcgatggacatggacatgagccccctgaggccccagaactatcttttcagttgtgaactaaaggccgacaaagatgatcactttaaggtggataatgatgaaaatgagaccagttatctttaagaacggtcagctcaggggctggtgcaaaggatgaactgcacattgttgaagcagaggccatgaatgacgaaggcagtccaattaaagtaacactggcaactttgaaaatgtctgtacagccaacggtttctcttgggggctttgaaataacaccaccagtggacttaaggttgaagtgtggttcagggccagtgcatattagtggacagcacttagtagctgtgaaggaaggtgcagagtcagaagatgaagaagaggaggatgtgaaactcttaagtatatctggaaagcagtctgcccctggaggtggtgctgctgctgatgatgatgatgaagatgatgatgatgatgatgacgaggaagctgaagaaaaagcgccagtgaagaaatctatacgagatactccagccaaaaatgcacaaaagtcaaatcagaatggaaaagactcaaaaccatcatcaacaccaagatcaaaaggacaagaatccttcaaaaaacaggaaaaatctcctaaaacaccaaaaggatctagttctgtagaagacattaaagcaaaaatgcaagcaagtatagaaaaacgtggttctcttcccaaagtggaaaccaagttcatcaattatgtgaagaatttcttctggatgactgaccaagaggctattcaagatctctggcagtggaggaagtctctttaagaaacagttgatatctggctgtcctttttatagtgcagagtgagaactttccctaccatgtttgataaatgttgtccaggttctattgccaagaatgtgttgtccaaaatgcctgtttagtttttaaagatggaactccaccctttgcttggttttaagtatgtatgggatgctatgataggacatagtagtagcagtggtcagacatggaaatggtggggagacaaaagtatacacgtgaaataaaactcagtattttaataaagtaaaaaaaaaaaaaaggtatggggaaaactgcccccataaagcaattgtctccacctggccctgccctttgcatgtggagattattacaattcaaggtgaaatttgggtggagacacaaccaaaccatatcagatggctatatcaaaaagacaagaaataacaagcattggtgagagtgtggagaagacggaacccttgtacacagttggtgggaacacagtttggtgcagccattatagaaaacgtcatggaggttcctaaagaaattagaaatgaaatcaccacctcataaagatatctgctttcctgtttattataacacatctttattcataatag

SEQ ID NO: 16 - protein, 208 aa, Homo sapiens
MNDEGSPIKVTLATLKMSVQPTVSLGGFEITPPVDLRLKCGSGPVHGQHLVAVKEGAESEDEEEEDVKLLSISGKQSAPGGGAAADDDDEDDDDDDDEEAEEKAPVKKSIRDTPAKNAQKSNQNGKDSKPSSTPRSKGQESFKKQEKSPKTPKGSSSVEDIKAKMQASIEKRGSLPKVETKFINYVKNFFWMTDQEAIQDLWQWRKSL

SEQ ID NO: 17 - DNA, 2628 bp, Homo sapiens
accgatgaatgggattagtgcccttacaaaaggggcccaccaaagctgccttgttccttctactatgtgaggacacatctagaagttaccatcaatgaaccagaaagtgggccctcaccaggcaccaaatctgccagcactctgatcttggacttccagcctcctgaactgttgtctgcattcaaaagagcattctattaaagctaccttaatttggcgcttatttttcttaatcatgtttctgacaatcatagtgtgtggaatggttgctgctttaagcgcaataagagctaactgccatcaagagccatcagtatgtcttcaagctgcatgcccagaaagctggattggttttcaaagaaagtgtttctatttttctgatgacaccaagaactggacatcaagtcagaggttttgtgactcacaagatgctgatcttgctcaggttgaaagcttccaggaactgaatttcctgttgagatataaaggcccatctgatcactggattgggctgagcagagaacaaggccaaccatggaaatggataaatggtactgaatggacaagacagtttcctatcctgggagcaggagagtgtgcctatttgaatgacaaaggtgccagtagtgccaggcactacacagagaggaagtggatttgttccaaatcagatatacatgtctagatgttacagcaaagccccaactaatctttagaagcatattggaactgataactccattttaaaatgagcaaagaatttatttcttataccaacaggtatatgaaaatatgctcaatatcactaataactgggaaaatacaaatcaaaatcatagtaaaatattacctgttttcatggtgctaatattacctgttctcccactgctaatgacatacccgagactgagtaatttataaataaaagagatttaattgactcatagttccacatggctggggaggtcttgcaatcatgacagaaggcaaatgggaagcaaagtcatgtcttatgtggtggcaggcagggggacttgtgcacaggaactcctatttatacaaccatcagatatcttgagacaagaacagtatggggctccctggtgtgattccgtcctgcgcggctgttctctggagcagcattcatttatcttcgtctgccttgtctcctacctaagtgtgtgtcgccacccgatggaagattcgatggacatggacatgagccccctgaggccccagaactatcttttcagttgtgaactaaaggccgacaaagatgatcactttaaggtggataatgatgaaaatgagaccagttatctttaagaacggtcagctcaggggctggtgcaaaggatgaactgcacattgttgaagcagaggccatgaatgacgaaggcagtccaattaaagtaacactggcaactttgaaaatgtctgtacagccaacggtttctcttgggggctttgaaataacaccaccagtggacttaaggttgaagtgtggttcagggccagtgcatattagtggacagcacttagtagctgtgaaggaaggtgcagagtcagaagatgaagaagaggaggatgtgaaactcttaagtatatctggaaagcagtctgcccctggaggtgggcagaaaaaagtaaaacttgctgctgctgctgctgatgatgatgatgaagatgatgatgatgatgatgacgaggaagctgaagaaaaagcgccagtgaagaaatctatacgagatactccagccaaaaatgcacaaaagtcaaatcagaatggaaaagactcaaaaccatcatcaacaccaagatcaaaaggacaagaatccttcaaaaaacaggaaaaatctcctaaaacaccaaaaggatctagttctgtagaagacattaaagcaaaaatgcaagcaagtatagaaaaacgtggttctcttcccaaagtggaaaccaagttcatcaattatgtgaagaatttcttctggatgactgaccaagaggctattcaagatctctggcagtggaggaagtctctttaagaaaatagtttaaacaatttgttaaaaattttccatcttatttcatttctgtaacagttgatatctggctgtcctttttatagtgcagagtgagaactttccctaccatgtttgataaatgttgtccaggttctattgccaagaatgtgttgtccaaaatgcctgtttagtttttaaagatggaactccaccctttgcttggttttaagtatgtatgggatgctatgataggacatagtagtagcagtggtcagacatggaaatggtggggagacaaaagtatacacgtgaaataaaactcagtattttaataaagtaaaaaaaaaaaaaaggtatggggaaaactgcccccataaagcaattgtctccacctggccctgccctttgcatgtggagattattacaattcaaggtgaaatttgggtggagacacaaccaaaccatatcagatggctatatcaaaaagacaagaaataacaagcattggtgagagtgtggagaagacggaacccttgtacacagttggtgggaacacagtttggtgcagccattatagaaaacgtcatggaggttcctaaagaaatta

SEQ ID NO: 18 - protein, 216 aa, Homo sapiens
MNDEGSPIKVTLATLKMSVQPTVSLGGFEITPPVDLRLKCGSGPVHGQHLVAVKEGAESEDEEEEDVKLLSISGKQSAPGGGQKKVKLAAAAADDDDEDDDDDDDEEAEEKAPVKKSIRDTPAKNAQKSNQNGKDSKPSSTPRSKGQESFKKQEKSPKTPKGSSSVEDIKAKMQASIEKRGSLPKVETKFINYVKNFFWMTDQEAIQDLWQWRKSL

SEQ ID NO: 19 - DNA, 2582 bp, Homo sapiens
accgatgaatgggattagtgcccttacaaaaggggcccaccaaagctgccttgttccttctactatgtgaggacacatctagaagttaccatcaatgaaccagaaagtgggccctcaccaggcaccaaatctgccagcactctgatcttggacttccagcctcctgaactgttgtctgcattcaaaagagcattctattaaagctaccttaatttggcgcttatttttcttaatcatgtttctgacaatcatagtgtgtggaatggttgctgctttaagcgcaataagagctaactgccatcaagagccatcagtatgtcttcaagctgcatgcccagaaagctggattggttttcaaagaaagtgtttctatttttctgatgacaccaagaactggacatcaagtcagaggttttgtgactcacaagatgctgatcttgctcaggttgaaagcttccaggaactgaatttcctgttgagatataaaggcccatctgatcactggattgggctgagcagagaacaaggccaaccatggaaatggataaatggtactgaatggacaagacagtttcctatcctgggagcaggagagtgtgcctatttgaatgacaaaggtgccagtagtgccaggcactacacagagaggaagtggatttgttccaaatcagatatacatgtctagatgttacagcaaagccccaactaatctttagaagcatattggaactgataactccattttaaaatgagcaaagaatttatttcttataccaacaggtatatgaaaatatgctcaatatcactaataactgggaaaatacaaatcaaaatcatagtaaaatattacctgttttcatggtgctaatattacctgttctcccactgctaatgacatacccgagactgagtaatttataaataaaagagatttaattgactcatagttccacatggctggggaggtcttgcaatcatgacagaaggcaaatgggaagcaaagtcatgtcttatgtggtggcaggcagggggacttgtgcacaggaactcctatttatacaaccatcagatatcttgagacaagaacagtatggggctccctggtgtgattccgtcctgcgcggctgttctctggagcagcattcatttatcttcgtctgccttgtctcctacctaagtgtgtgtcgccacccgatggaagattcgatggacatggacatgagccccctgaggccccagaactatcttttcagttgtgaactaaaggccgacaaagatgatcactttaaggtggataatgatgaaaatgagaccagttatctttaagaacggtcagctcaggggctggtgcaaaggatgaactgcacattgttgaagcagaggccatgaatgacgaaggcagtccaattaaagtaacactggcaactttgaaaatgtctgtacagccaacggtttctcttgggggctttgaaataacaccaccagtggacttaaggttgaagtgtggttcagggccagtgcatattagtggacagcacttagtagctgtgaaggaaggtgcagagtcagaagatgaagaagaggaggatgtgaaactcttaagtatatctggaaagctgctgctgatgatgatgatgaagatgatgatgatgatgatgacgaggaagctgaagaaaaagcgccagtgaagaaatctatacgagatactccagccaaaaatgcacaaaagtcaaatcagaatggaaaagactcaaaaccatcatcaacaccaagatcaaaaggacaagaatccttcaaaaaacaggaaaaatctcctaaaacaccaaaaggatctagttctgtagaagacattaaagcaaaaatgcaagcaagtatagaaaaacgtggttctcttcccaaagtggaaaccaagttcatcaattatgtgaagaatttcttctggatgactgaccaagaggctattcaagatctctggcagtggaggaagtctctttaagaaaatagtttaaacaatttgttaaaaattttccatcttatttcatttctgtaacagttgatatctggctgtcctttttatagtgcagagtgagaactttccctaccatgtttgataaatgttgtccaggttctattgccaagaatgtgttgtccaaaatgcctgtttagtttttaaagatggaactccaccctttgcttggttttaagtatgtatgggatgctatgataggacatagtagtagcagtggtcagacatggaaatggtggggagacaaaagtatacacgtgaaataaaactcagtattttaataaagtaaaaaaaaaaaaaaggtatggggaaaactgcccccataaagcaattgtctccacctggccctgccctttgcatgtggagattattacaattcaaggtgaaatttgggtggagacacaaccaaaccatatcagatggctatatcaaaaagacaagaaataacaagcattggtgagagtgtggagaagacggaacccttgtacacagttggtgggaacacagtttggtgcagccattatagaaaacgtcatggaggttcctaaagaaatta

SEQ ID NO: 20 - protein, 149 aa, Homo sapiens [sequence omitted]

SEQ ID NO: 21 - DNA, 2025 bp, Homo sapiens
gtttcctatcctgggagcaggagagtgtgcctatttgaatgacaaaggtgccagtagtgccaggcactacacagagaggaagtggatttgttccaaatcagatatacatgtctagatgttacagcaaagccccaactaatctttagaagcatattggaactgataactccattttaaaatgagcaaagaatttatttcttataccaacaggtatatgaaaatatgctcaatatcactaataactgggaaaatacaaatcaaaatcatagtaaaatattacctgttttcatggtgctaatattacctgttctcccactgctaatgacatacccgagactgagtaatttataaataaaagagatttaattgactcatagttccacatggctggggaggtcttgcaatcatgacagaaggcaaatgggaagcaaagtcatgtcttatgtggtggcaggcagggggacttgtgcacaggaactcctatttatacaaccatcagatatcttgagacaagaacagtatggggctccctggtgtgattccgtcctgcgcggctgttctctggagcagcattcatttatcttcgtctgccttgtctcctacctaagtgtgtgtcgccacccgatggaagattcgatggacatggacatgagccccctgaggccccagaactatcttttcagttgtgaactaaaggccgacaaagatgatcactttaaggtggataatgatgaaaatgagaccagttatctttaagaacggtcagctcaggggctggtgcaaaggatgaactgcacattgttgaagcagaggccatgaatgacgaaggcagtccaattaaagtaacactggcaactttgaaaatgtctgtacagccaacggtttctcttgggggctttgaaataacaccaccagtggacttaaggttgaagtgtggttcagggccagtgcatattagtggacagcacttagtagctgtgaaggaaggtgcagagtcagaagatgaagaagaggaggatgtgaaactcttaagtatatctggaaagcagtctgcccctggaggtggtgatgatgatgatgaagatgatgatgatgatgatgacgaggaagctgaagaaaaagcgccagtgaagaaatctatacgagatactccagccaaaaatgcacaaaagtcaaatcagaatggaaaagactcaaaaccatcatcaacaccaagatcaaaaggacaagaatccttcaaaaaacaggaaaaatctcctaaaacaccaaaaggatctagttctgtagaagacattaaagcaaaaatgcaagcaagtatagaaaaacgtggttctcttcccaaagtggaaaccaagttcatcaattatgtgaagaatttcttctggatgactgaccaagaggctattcaagatctctggcagtggaggaagtctctttaagaaaatagtttaaacaatttgttaaaaattttccatcttatttcatttctgtaacagttgatatctggctgtcctttttatagtgcagagtgagaactttccctaccatgtttgataaatgttgtccaggttctattgccaagaatgtgttgtccaaaatgcctgtttagtttttaaagatggaactccaccctttgcttggttttaagtatgtatgggatgctatgataggacatagtagtagcagtggtcagacatggaaatggtggggagacaaaagtatacacgtgaaataaaactcagtattttaataaagtaaaaaaaaaaaaaaggtatggggaaaactgcccccataaagcaattgtctccacctggccctgccctttgcatgtggagattattacaattcaaggtgaaatttgggtggagacacaaccaaaccatatcagatggctatatcaaaaagacaagaaataacaagcattggtgagagtgtggagaagacggaacccttgtacacagttggtgggaacacagtttggtgcagccattatagaaaacgtcatggaggttcctaaagaaatta

SEQ ID NO: 22 - protein, 205 aa, Homo sapiens
MNDEGSPIKVTLATLKMSVQPTVSLGGFEITPPVDLRLKCGSGPVHGQHLVAVKEGAESEDEEEEDVKLLSISGKQSAPGGGDDDDEDDDDDDDEEAEEKAPVKKSIRDTPAKNAQKSNQNGKDSKPSSTPRSKGQESFKKQEKSPKTPKGSSSVEDIKAKMQASIEKRGSLPKVETKFINYVKNFFWMTDQEAIQDLWQWRKSL

SEQ ID NO: 23 - DNA, 505 bp, Homo sapiens
accgatgaatgggattagtgcccttacaaaaggggcccaccaaagctgccttgttccttctactatgtgaggacacatctagaagttaccatcaatgaaccagaaagtgggccctcaccaggcaccaaatctgccagcactctgatcttggacttccagcctcctgaactgttgtctgcattcaaaagagcattctattaaagctaccttaatttggcgcttatttttcttaatcatgtttctgacaatcatagtgtgtggaatggttgctgctttaagcgcaataagagctaactgccatcaagagccatcagtatgtcttcaagctgcatgcccagaaagctggattggttttcaaagaaagtgtttctatttttctgatgacaccaagaactggacatcaagtcagaggttttgtgactcacaagatgctgatcttgctcaggttgaaagcttccaggaactggtttcctatcctgggagcaggagagtgtgcctatttgaa

SEQ ID NO: 24 - protein, 90 aa, Homo sapiens
MFLTIIVCGMVAALSAIRANCHQEPSVCLQAACPESWIGFQRKCFYFSDDTKNWTSSQRFCDSQDADLAQVESFQELVSYPGSRRVCLFE

SEQ ID NO: 25 - DNA, 2710 bp, Homo sapiens
accgatgaatgggattagtgcccttacaaaaggggcccaccaaagctgccttgttccttctactatgtgaggacacatctagaagttaccatcaatgaaccagaaagtgggccctcaccaggcaccaaatctgccagcactctgatcttggacttccagcctcctgaactgttgtctgcattcaaaagagcattctattaaagctaccttaatttggcgcttatttttcttaatcatgtttctgacaatcatagtgtgtggaatggttgctgctttaagcgcaataagagctaactgccatcaagagccatcagtatgtcttcaagctgcatgcccagaaagctggattggttttcaaagaaagtgtttctatttttctgatgacaccaagaactggacatcaagtcagaggttttgtgactcacaagatgctgatcttgctcaggttgaaagcttccaggaactgaatttcctgttgagatataaaggcccatctgatcactggattgggctgagcagagaacaaggccaaccatggaaatggataaatggtactgaatggacaagacagttagtcatgaaagaagatggtgccaacttgtatgttgcaaaggtttcacaagttcctcgaatgaatccaagacctgtcatggtttcctatcctgggagcaggagagtgtgcctatttgaatgacaaaggtgccagtagtgccaggcactacacagagaggaagtggatttgttccaaatcagatatacatgtctagatgttacagcaaagccccaactaatctttagaagcatattggaactgataactccattttaaaatgagcaaagaatttatttcttataccaacaggtatatgaaaatatgctcaatatcactaataactgggaaaatacaaatcaaaatcatagtaaaatattacctgttttcatggtgctaatattacctgttctcccactgctaatgacatacccgagactgagtaatttataaataaaagagatttaattgactcatagttccacatggctggggaggtcttgcaatcatgacagaaggcaaatgggaagcaaagtcatgtcttatgtggtggcaggcagggggacttgtgcacaggaactcctatttatacaaccatcagatatcttgagacaagaacagtatggggctccctggtgtgattccgtcctgcgcggctgttctctggagcagcattcatttatcttcgtctgccttgtctcctacctaagtgtgtgtcgccacccgatggaagattcgatggacatggacatgagccccctgaggccccagaactatcttttcagttgtgaactaaaggccgacaaagatgatcactttaaggtggataatgatgaaaatgagaccagttatctttaagaacggtcagctcaggggctggtgcaaaggatgaactgcacattgttgaagcagaggccatgaatgacgaaggcagtccaattaaagtaacactggcaactttgaaaatgtctgtacagccaacggtttctcttgggggctttgaaataacaccaccagtggacttaaggttgaagtgtggttcagggccagtgcatattagtggacagcacttagtagctgtgaaggaaggtgcagagtcagaagatgaagaagaggaggatgtgaaactcttaagtatatctggaaagcagtctgcccctggaggtgggcagaaaaaagtaaaacttgctgctgctgctgctgatgatgatgatgaagatgatgatgatgatgatgacgaggaagctgaagaaaaagcgccagtgaagaaatctatacgagatactccagccaaaaatgcacaaaagtcaaatcagaatggaaaagactcaaaaccatcatcaacaccaagatcaaaaggacaagaatccttcaaaaaacaggaaaaatctcctaaaacaccaaaaggatctagttctgtagaagacattaaagcaaaaatgcaagcaagtatagaaaaacgtggttctcttcccaaagtggaaaccaagttcatcaattatgtgaagaatttcttctggatgactgaccaagaggctattcaagatctctggcagtggaggaagtctctttaagaaaatagtttaaacaatttgttaaaaattttccatcttatttcatttctgtaacagttgatatctggctgtcctttttatagtgcagagtgagaactttccctaccatgtttgataaatgttgtccaggttctattgccaagaatgtgttgtccaaaatgcctgtttagtttttaaagatggaactccaccctttgcttggttttaagtatgtatgggatgctatgataggacatagtagtagcagtggtcagacatggaaatggtggggagacaaaagtatacacgtgaaataaaactcagtattttaataaagtaaaaaaaaaaaaaaggtatggggaaaactgcccccataaagcaattgtctccacctggccctgccctttgcatgtggagattattacaattcaaggtgaaatttgggtggagacacaaccaaaccatatcagatggctatatcaaaaagacaagaaataacaagcattggtgagagtgtggagaagacggaacccttgtacacagttggtgggaacacagtttggtgcagccattatagaaaacgtcatggaggttcctaaagaaatta

SEQ ID NO: 26 - protein, 216 aa, Homo sapiens; identical to SEQ ID NO: 18

SEQ ID NO: 27 - DNA, 2536 bp, Homo sapiens
cactcatagaaactggaggcaaaatgcatgacagtaacaatgtggagaaagacattacaccatctgaattgcctgcaaacccaggttgtctgcattcaaaagagcattctattaaagctaccttaatttggcgcttatttttcttaatcatgtttctgacaatcatagtgtgtggaatggttgctgctttaagcgcaataagagctaactgccatcaagagccatcagtatgtcttcaagctgcatgcccagaaagctggattggttttcaaagaaagtgtttctatttttctgatgacaccaagaactggacatcaagtcagaggttttgtgactcacaagatgctgatcttgctcaggttgaaagcttccaggaactgaatttcctgttgagatataaaggcccatctgatcactggattgggctgagcagagaacaaggccaaccatggaaatggataaatggtactgaatggacaagacagtttcctatcctgggagcaggagagtgtgcctatttgaatgacaaaggtgccagtagtgccaggcactacacagagaggaagtggatttgttccaaatcagatatacatgtctagatgttacagcaaagccccaactaatctttagaagcatattggaactgataactccattttaaaatgagcaaagaatttatttcttataccaacaggtatatgaaaatatgctcaatatcactaataactgggaaaatacaaatcaaaatcatagtaaaatattacctgttttcatggtgctaatattacctgttctcccactgctaatgacatacccgagactgagtaatttataaataaaagagatttaattgactcatagttccacatggctggggaggtcttgcaatcatgacagaaggcaaatgggaagcaaagtcatgtcttatgtggtggcaggcagggggacttgtgcacaggaactcctatttatacaaccatcagatatcttgagacaagaacagtatggggctccctggtgtgattccgtcctgcgcggctgttctctggagcagcattcatttatcttcgtctgccttgtctcctacctaagtgtgtgtcgccacccgatggaagattcgatggacatggacatgagccccctgaggccccagaactatcttttcagttgtgaactaaaggccgacaaagatgatcactttaaggtggataatgatgaaaatgagaccagttatctttaagaacggtcagctcaggggctggtgcaaaggatgaactgcacattgttgaagcagaggccatgaatgacgaaggcagtccaattaaagtaacactggcaactttgaaaatgtctgtacagccaacggtttctcttgggggctttgaaataacaccaccagtggacttaaggttgaagtgtggttcagggccagtgcatattagtggacagcacttagtagctgtgaaggaaggtgcagagtcagaagatgaagaagaggaggatgtgaaactcttaagtatatctggaaagcagtctgcccctggaggtgggcatgatgatgatgatgaagatgatgatgatgatgatgacgaggaagctgaagaaaaagcgccagtgaagaaatctatacgagatactccagccaaaaatgcacaaaagtcaaatcagaatggaaaagactcaaaaccatcatcaacaccaagatcaaaaggacaagaatccttcaaaaagacattaaagcaaaaatgcaagcaagtatagaaaaacgtggttctcttcccaaagtggaaaccaagttcatcaattatgtgaagaatttcttctggatgactgaccaagaggctattcaagatctctggcagtggaggaagtctctttaagaaaatagtttaaacaatttgttaaaaattttccatcttatttcatttctgtaacagttgatatctggctgtcctttttatagtgcagagtgagaactttccctaccatgtttgataaatgttgtccaggttctattgccaagaatgtgttgtccaaaatgcctgtttagtttttaaagatggaactccaccctttgcttggttttaagtatgtatgggatgctatgataggacatagtagtagcagtggtcagacatggaaatggtggggagacaaaagtatacacgtgaaataaaactcagtattttaataaagtaaaaaaaaaaaaaaggtatggggaaaactgcccccataaagcaattgtctccacctggccctgccctttgcatgtggagattattacaattcaaggtgaaatttgggtggagacacaaccaaaccatatcagatggctatatcaaaaagacaagaaataacaagcattggtgagagtgtggagaagacggaacccttgtacacagttggtgggaacacagtttggtgcagccattatagaaaacgtcatggaggttcctaaagaaattagaaatgaaatcaccacctcataaagatatctgctttcctgtttattataacacatctttattcataatag

SEQ ID NO: 28 - protein, 191 aa, Homo sapiens
MHDSNNVEKDITPSELPANPGCLHSKEHSIKATLIWRLFFLIMFLTIIVCGMVAALSAIRANCHQEPSVCLQAACPESWIGFQRKCFYFSDDTKNWTSSQRFCDSQDADLAQVESFQELNFLLRYKGPSDHWIGLSREQGQPWKWINGTEWTRQFPILGAGECAYLNDKGASSARHYTERKWICSKSDIHV

SEQ ID NO: 29 - DNA, 2542 bp, Homo sapiens
cactcatagaaactggaggcaaaatgcatgacagtaacaatgtggagaaagacattacaccatctgaattgcctgcaaacccaggttgtctgcattcaaaagagcattctattaaagctaccttaatttggcgcttatttttcttaatcatgtttctgacaatcatagtgtgtggaatggttgctgctttaagcgcaataagagctaactgccatcaagagccatcagtatgtcttcaagctgcatgcccagaaagctggattggttttcaaagaaagtgtttctatttttctgatgacaccaagaactggacatcaagtcagaggttttgtgactcacaagatgctgatcttgctcaggttgaaagcttccaggaactgaatttcctgttgagatataaaggcccatctgatcactggattgggctgagcagagaacaaggccaaccatggaaatggataaatggtactgaatggacaagacagtttcctatcctgggagcaggagagtgtgcctatttgaatgacaaaggtgccagtagtgccaggcactacacagagaggaagtggatttgttccaaatcagatatacatgtctagatgttacagcaaagccccaactaatctttagaagcatattggaactgataactccattttaaaatgagcaaagaatttatttcttataccaacaggtatatgaaaatatgctcaatatcactaataactgggaaaatacaaatcaaaatcatagtaaaatattacctgttttcatggtgctaatattacctgttctcccactgctaatgacatacccgagactgagtaatttataaataaaagagatttaattgactcatagttccacatggctggggaggtcttgcaatcatgacagaaggcaaatgggaagcaaagtcatgtcttatgtggtggcaggcagggggacttgtgcacaggaactcctatttatacaaccatcagatatcttgagacaagaacagtatggggctccctggtgtgattccgtcctgcgcggctgttctctggagcagcattcatttatcttcgtctgccttgtctcctacctaagtgtgtgtcgccacccgatggaagattcgatggacatggacatgagccccctgaggccccagaactatcttttcagttgtgaactaaaggccgacaaagatgatcactttaaggtggataatgatgaaaatgagaccagttatctttaagaacggtcagctcaggggctggtgcaaaggatgaactgcacattgttgaagcagaggccatgaatgacgaaggcagtccaattaaagtaacactggcaactttgaaaatgtctgtacagccaacggtttctcttgggggctttgaaataacaccaccagtggacttaaggttgaagtgtggttcagggccagtgcatattagtggacagcacttagtagctgtgaaggaaggtgcagagtcagaagatgaagaagaggaggatgtgaaactcttaagtatatctggaaagcagtctgcccctggaggtgggcagaaaaaagtaaaacttgctgctgctgctgctgatgatgatgatgaagatgatgatgatgatgatgacgaggaagctgaagaaaaagcgccagtgaagaaatctatacgagatactccagccaaaaatgcacaaaagtcaaatcagaatggaaaagactcaaaaccatcatcaacaccaagatcaaaaggacaagaatccttcaaaaaacaggaaaaatctcctaaaacaccaaaaggatctagttctgtagaagacattaaagcaaaaatgcaagcaagtatagaaaaacgtggttctcttcccaaagtggaaaccaagttcatcaattatgtgaagaatttcttctggatgactgaccaagaggctattcaagatctctggcagtggaggaagtctctttaagaaaatagtttaaacaatttgttaaaaattttccatcttatttcatttctgtaacagttgatatctggctgtcctttttatagtgcagagtgagaactttccctaccatgtttgataaatgttgtccaggttctattgccaagaatgtgttgtccaaaatgcctgtttagtttttaaagatggaactccaccctttgcttggttttaagtatgtatgggatgctatgataggacatagtagtagcagtggtcagacatggaaatggtggggagacaaaagtatacacgtgaaataaaactcagtattttaataaagtaaaaaaaaaaaaaaggtatggggaaaactgcccccataaagcaattgtctccacctggccctgccctttgcatgtggagattattacaattcaaggtgaaatttgggtggagacacaaccaaaccatatcagatggctatatcaaaaagacaagaaataacaagcattggtgagagtgtggagaagacggaacccttgtacacagttggtgggaacacagtttggtgcagccattatagaaaacgtcatggaggttcctaaagaaatta

SEQ ID NO: 30 - protein, 216 aa, Homo sapiens; identical to SEQ ID NO: 18

SEQ ID NO: 31 - DNA, 2595 bp, Homo sapiens
accgatgaatgggattagtgcccttacaaaaggggcccaccaaagctgccttgttccttctactatgtgaggacacatctagaagttaccatcaatgaaccagaaagtgggccctcaccaggcaccaaatctgccagcactctgatcttggacttccagcctcctgaactgttgtctgcattcaaaagagcattctattaaagctaccttaatttggcgcttatttttcttaatcatgtttctgacaatcatagtgtgtggaatggttgctgctttaagcgcaataagagctaactgccatcaagagccatcagtatgtcttcaagctgcatgcccagaaagctggattggttttcaaagaaagtgtttctatttttctgatgacaccaagaactggacatcaagtcagaggttttgtgactcacaagatgctgatcttgctcaggttgaaagcttccaggaactgaatttcctgttgagatataaaggcccatctgatcactggattgggctgagcagagaacaaggccaaccatggaaatggataaatggtactgaatggacaagacagtttcctatcctgggagcaggagagtgtgcctatttgaatgacaaaggtgccagtagtgccaggcactacacagagaggaagtggatttgttccaaatcagatatacatgtctagatgttacagcaaagccccaactaatctttagaagcatattggaactgataactccattttaaaatgagcaaagaatttatttcttataccaacaggtatatgaaaatatgctcaatatcactaataactgggaaaatacaaatcaaaatcatagtaaaatattacctgttttcatggtgctaatattacctgttctcccactgctaatgacatacccgagactgagtaatttataaataaaagagatttaattgactcatagttccacatggctggggaggtcttgcaatcatgacagaaggcaaatgggaagcaaagtcatgtcttatgtggtggcaggcagggggacttgtgcacaggaactcctatttatacaaccatcagatatcttgagacaagaacagtatggggctccctggtgtgattccgtcctgcgcggctgttctctggagcagcattcatttatcttcgtctgccttgtctcctacctaagtgtgtgtcgccacccgatggaagattcgatggacatggacatgagccccctgaggccccagaactatcttttcagttgtgaactaaaggccgacaaagatgatcactttaaggtggataatgatgaaaatgagaccagttatctttaagaacggtcagctcaggggctggtgcaaaggatgaactgcacattgttgaagcagaggccatgaatgacgaaggcagtccaattaaagtaacactggcaactttgaaaatgtctgtacagccaacggtttctcttgggggctttgaaataacaccaccagtggacttaaggttgaagtgtggttcagggccagtgcatattagtggacagcacttagtagctgtgaaggaaggtgcagagtcagaagatgaagaagaggaggatgtgaaactcttaagtatatctggaaagcagtctgcccctggaggtggtgatgatgatgatgaagatgatgatgatgatgatgacgaggaagctgaagaaaaagcgccagtgaagaaatctatacgagatactccagccaaaaatgcacaaaagtcaaatcagaatggaaaagactcaaaaccatcatcaacaccaagatcaaaaggacaagaatccttcaaaaaacaggaaaaatctcctaaaacaccaaaaggatctagttctgtagaagacattaaagcaaaaatgcaagcaagtatagaaaaacgtggttctcttcccaaagtggaaaccaagttcatcaattatgtgaagaatttcttctggatgactgaccaagaggctattcaagatctctggcagtggaggaagtctctttaagaaaatagtttaaacaatttgttaaaaattttccatcttatttcatttctgtaacagttgatatctggctgtcctttttatagtgcagagtgagaactttccctaccatgtttgataaatgttgtccaggttctattgccaagaatgtgttgtccaaaatgcctgtttagtttttaaagatggaactccaccctttgcttggttttaagtatgtatgggatgctatgataggacatagtagtagcagtggtcagacatggaaatggtggggagacaaaagtatacacgtgaaataaaactcagtattttaataaagtaaaaaaaaaaaaaaggtatggggaaaactgcccccataaagcaattgtctccacctggccctgccctttgcatgtggagattattacaattcaaggtgaaatttgggtggagacacaaccaaaccatatcagatggctatatcaaaaagacaagaaataacaagcattggtgagagtgtggagaagacggaacccttgtacacagttggtgggaacacagtttggtgcagccattatagaaaacgtcatggaggttcctaaagaaatta

SEQ ID NO: 32 - protein, 205 aa, Homo sapiens; identical to SEQ ID NO: 22

SEQ ID NO: 33 - DNA, 25310 bp, Mus musculus
  misc_feature (1)...(25310): n = A,T,C or G
gagatgactcagcgggtaagagcactggctgctcttccagaggacgggggttcaattcccagcagcacctgtatagcagctcacaagtgtctctaagttcagttccaggggatccaacaccctcacagagacatacaaaacaccaatgcacataaaattttttaaaaagtcatttaaaagtaagaaaaaatctttttataaaaaaaagaaatgatagggtattttcctttgttctttgcacaaatgcgaacgtttctcccacgtgcttgtagaaggcgcctttcctgttaccagctggagccactgaaactgcacccgatgactgtttgcatcctttacccttggggggctgaacctcatacactgggttttttgccttcctgtggaaaatggcacttgcctaggaccccttagtctgagttagggtggccagcatcggggagaggagagcccaccttcttcctctctcttctcactccattgtgaaggtgaaccttcaggctccatcttgtaaataaatctctagtggccactctagactcacgatgatttcattacagtgaagcccgctggctggtcttgggtgggtaggtactagttgagacataggaggacaagaaccttatttatcctcttttccctaaaacccctgacgcagaatgagccatgtgtgaatgaatgagcatatatgcatgtgtatactcagccttgtgagtatttagggtctgttattgtagctgttaagatttacatattggaagctggggagatggctcagtggttacgaccactaactgctcttccagaggtcctgagttcaattcccagcaaccacatggtggctcacaaccatctgtaatggcatctgatgctgtcttctggcctgtaggtgtacatagagcactcatatacataaaataaataaatattttttttattgaccaggtagaggtggcacatgcctctaaccctagcttttgggaggcagaaacagatagatgtctatgagtttgaagtcagcctggtctacagagtgaattcaaggccagccagagatagagagaaaaaccctgtctcaaaacaaaacaaatttaaaaaaaacaaataaaaaaatcacaagaccaaataaaacaaaactaatatttatttattgttgttttcgtgtgtgtgtgtgtgtgtgtgtgtgtgtgtgcatgcaggtgactgaggaggccagaagagggagtcagatttcttcaagttgtagtttcaggtggttgtaagccactcaatgtgggtgctggtgactgaccctcaatcctctagaagagcagcgagcattttaaactctgctgctacgtcttcaacattattttgtaagtctcatatagcctggactggtcttgaattagtgaccaggatgttgaacctgttctagctgcctctacctcccaagcgctgggattaagacaggcaccatcatatccagttacttgtggtgctggaactggagcccaggacctcatgcacactaggcaagcctgctgccaaccagatgagctacatctctagccccttgtgttttgtgttttgagataaggtttcctgcaggcaggctggcttcaaatttaccgtgagggtgacctggaagtcttgattctcctgcctctacctcccaagttccgggattgccggagtgtggccattgcggatgtctagtgtttcttgtggtgtggatggagatgagtgggagagaagctgcatgtggggtgttcctacgtgtgtgcatgactgctcatgtactttatgcatggctgtgtgtttcagaggctcatgtctgagtgtgcacctatgtgtgcccctgtgtctgatatatatataccagcacatgtacgtatgttctgacggcgattacggcacacacggtgcaggtgtgcatcccattgtgtgccctgggtaagtctgaacataacggggcaatatctgcgtgcactgaactgtgcttggatctgagcaggctcccctaccctcagggcctcctcagctctcctcggttcaacctcattctttctgctgtttcactgtttccgtcctcgtctccagatgttgcaattaagcaaatgcagcaattaagcagagtcccccaaacagccatcccaccaggacccccttccaggaactaatgaggggttacaacacgtgcagacccacatggtccgatgcaggcacccagggaccccccccaggccgcacatgtgatggcgggaaggctcaggcgggctggacacacagagcaaggactccactgctcacttggacctctcttctaagtcttggtgcagtgatccctgattccaggaagccccccaggttcgggggtgggggttggggttgaggaggtcctgaactctgcttgtgagacttcgtgcccctctgcttccctagtcacagcctggaccattctgacccctgctttgtcactacaggcctcattgttttgccctggctttccctgtgcactaggaccttatcccaggctccagccttgctaagccaggtttctcccatcccggccctgatgactctgagctgcctgaagatatgacttctctcttctctctgggggtgttacttcatgaaaggcagctggacaatgacctgggctgtccaagtccttgctttaattgcagccttgtatcattagctttctctctagtgacctaacacttgaactgagagatagctcagcagttaggggcagcgggtgctaaaaggcagaaggcagatccaacctatgatgaccagccccagtgacctgcttacctcacccaggccccctttcttcgcttcaccaccttctaactgtctactcaagtacttggtattcctactaggtagctaccaactttctgaaactctagctcccagaatccaacaccttccctctgtcctctacaagtcacacacatggacacacacacacaaataaaagtaaaatcaaggtgtgatggagattgtggtcctcccttctcccccgggtcgttggctaccgcgcatgaggatgaagggaatagagttgacaaacagggtttcagacaaaccatgagcgtggatggaaatgatgacacttcagcatcagcttctgtaggacagatcaactttactccgggtgaatggagtgttatggagtgtgggggaagggagtaggagtatcctgggtgagtgaaggtcattggctgagattgtactgagatgtctcattaacatggggaggccttccaggaacctcaggtgcttgctgaacgggtttcttatagggagaaaggaagcggaacctgtaatctcaccaaggatgtatgactttctgcgggtagagaaatgggggtttcaagctccccagaaaagatcagagaaggagaagcactgttggtaaagggagtccaccattttgcactgagctcagggcttcctgatgatgtcagatttcggctttataatagcagagtttcccaacaagagatggttcagctgttataggcactggctgctcttgcagaagacccgggttctgttcccagcacccacactgtggcttacaccatttgtaactccagttccaggacatcaaaagcacacaagtggcgtgttcacgtgtatgcatgcagaggaaacacttgtacttaaaacttgtaaacacttgtaaaaacataaaacccttgtaaaataaaaataaatagatcttttaaaatgaaataagtttagagaaaagacgtaatttggctcatggtcttagagagctgagtatcttggccccatgtgtttcagcaaagcatcatggtggaaggaatattgattgacaggaagcaaagagagacagctcacattatggtggacaggaaacgtcagagctatagcaagaagggggagggcaggatacagcactggtgacaggcttccagtgacttacttcctccagtcatgcctcgactatcccttcctaatcatcccaccagatgattagtccattcattaaccaggaccaccaccaacacactaacctaatctcttatcggttcttttaaagacaggatctccaggatggactgggagtcactatgttgttcaggttggccttaaactttcagtagtctgcttacctcaggctctcaagtgctggaattacagatgttagccactgtagcttgataaattatttcttcttcttcctcctcctctcctcctcctcttcctcctcctcttcttcttcttccttctcctcttcctcctcctcctcttgggatcctcagagtgannnnnnnnnnnnnnnnnnnnnnnnnnnnnnnnnnnnnnnnnnnnnnnnnnnnnnnnnnnnnnnnnnnnnnnnnnnnnnnnnnnnnnnnnnnnnnnnnnnnnnnnnnnnnnnnnnnnnnnnnnnnnnnnnnnnnnnnnnnnnnnnnnnnnnnnnnnnnnnnnnnnnnnnnnnnnnnnnnnnnnnnnnnnnnnnnnnnnnnnnnnnnnnnnnnnnnnnnnnnnnnnnnnnnnnnnnnnnnnnnnnnnnnnnnnnnnnnnnnnnnnnnnnnnnnnnnnnnnnnnnnnnnnnnnnnnnnnnnnnnnnnnnnnnnnnnnnnnnnnnnnnnnnnnnnnnnnnnnnnnnnnnnnnnnnnnnnnnnnnnnnnnnnnnnnnnnnnnnnnnnnnnnnnnnnnnnnnnnnnnnnnnnnnnnnnnnnnnnnnnnnnnnnnnnnnnnnnnnnnnnnnnnnnnnnnnnnnnnnnnnnnnnnnnnnnnnnnnnnnnnnnnnnnnnnnnnnnnnnnnnnnnnnnnnnnnnnnnnnnnnnnnnnnnnnnnnnnnnnnnnnnnnnnnnnnnnnnnnnnnnnnnnnnnnnnnnnnnnnnnnnnnnnnnnnnnnnnnnnnnnnnnnnnnnnnnnnnnnnnnnnnnnnnnnnnnnnnnnnnnnnnnnnnnnnnnnnnnnnnnnnnnnnnnnnnnnnnnnnnnnnnnnnnnnnnnnnnnnnnnnnnnnnnnnnnnnnnnnnnnnnnnnnnnnnnnnnnnnnnnnnnnnnnnnnnnnnnnnnnnnnnnnnnnnnnnnnnnnnnnnnnnnnnnnnnnnnnnnnnnnnnnnnnnnnnnnnnnnnnnnnnnnnnnnnnnnnnnnnnnnnnnnnnnnnnnnnnnnnnnnnnnnnnnnnnnnnnnnnnnnnnnnnnnnnnnnnnnnnnnnnnnnnnnnnnnnnnnnnnnnnnnnnnnnnnnnnnnnnnnnnnnnnnnnnnnnnnnnnnnnnnnnnnnnnnnnnnnnnnnnnnnnnnnnnnnnnnnnnnnnnnnnnntgtttcccctggacttccccctcccccttcctcttccccctctccttcccttctccttcttcttcttcttcttcttcttcttcttcttcttcttcttcttcttcttcttcttcttcttcttcttcctcctcctcctcctcctcctcctcctcctcctccttcttcttcttctttgcactggctgttctggaacttgccaagtatttccagactgaccttgaactcaaaaagattctcctgcctctgccttccaagtgctgggactaaaggtaaatggcaccacacctggcttatttactttgagtcgggatttatgaggtctgggctttaaacagtaatcttccttccttagtcttctgagtgctggtattacaggtctgtgccctcacacctagatctcaggaaacattttcttttaaaaataaaggtttatttttattcctttttggtgttttgttattttattcttatgtgggtgttttgcctacatgtgtgtatgtgcaccatgtccatgcctggtgcccgcagaggccagagagggcatctgatccctgagtgctgggatccaaactgagtcctccacaaaagcagcaagtgtttctaccctcggagccatcctttagtccctcatgagcatttccaaatccaatcagattaacgctcaaaactgaccatcacaagtgttacctaccgtaatgatggccagacaaccacagtaactgccgagctaataatggcggcctccttgcctctgtctccctgctcctggcatgtgttcctggcatcccctgcaccactagaggtccgcaaagctgtggcagactgttctgtgtacactgcagatgtccccggtttgtcccagtgagcctccaaatgtagtacccagatcagcaacagtagctttgcatccctgatgtgttctgaggatttcttaaaggtctccagcagaactcagcctcagcatgccagagaagtcacttcatcgccaccaaagcacttacgtattgtttctctttcccaccgaactcttctctcccccgcaacccgctgcctcgctttcctggtatcaacccccagatcgatcagttccactgaattctcctactctcaggacgacctccatgtcttacccaatcccagcatccatgcagtgtctctgaggcttctgcagccttttcccgggcttccgagtgtccagcatccactgtgctgagccaagagccctgatgaactttgctaatgacctgaaaaggcgggccccacggccgagttacttttagcggcaatttttcaatagacatacgtggaaggggccaaacgtgtattgtgaaacctacggcagagcaagggaaacagctggggtggatggacatccacatgccacctccaaggtcacgctgctcctctgttcagatggtttcttagctctatgcccacctcaggtcacacagactgggcctcctttgcaatagggcttctggaagaacacgcttcccaaatgctcacattcaagttcctaggccaggcttgtgggccatcacccacgccctcctcctgaaacactatctgtagaagagtgtgggaccacctacctttacctctttgttccctcccttgaggtgtgtgttagcccaagtccaaccagggtcttctgtgggagtaaggagagacaagacaagatagcagactcatttctctgggtcaacctgtccagcctcctgactctaaccccatttcctatccccccaccccctcagaatctctgctcagtgccttgagctccttctcgaatctcaggagacacaagtcttagtgtcaattttgctccttccaatcggtgaaatgaacctgtctgcttaaaagagcaaacctgtttctggacttcctgggaaggtggtgctgagatagaggggcaggagacagagacgcgggcatctagcgtggtggggctatgtacaaggatatgaatgagtcctggcgttgtccaagtgctgcttaaggggtggaggagagagaggagagagatgggaagatggatagcatgcctctgacttgtccttgctcctcatctctatttctgagtctctcactgtctctgtgtattcacttctttccttcaatgtatttctgtacctccctttctactccactctcttattctaagactatctatccttttagaatctctcatcggttctagctctgtgtctttgcctcaatgtctgtctgtctttattcagggatattcttattcccagtagctccagggcgtctccatggtaggtggtgctaggggcgcgtctttgagaggagggaggagggaggagggggctgcctacgcctttaagcgcgggcgcgcgcggggcctgcgcctttaagcgcgggcacgcgcacggccctgggttcccggcgaggaggccgcgggagcacccggacccggcccgcctgcccggcccccgcccggcccccgccccggccccggcgggggaggggtctctgagcgcgacccctcccccctgagcccccactgcgttgcgatgcccgggtccccgcgtggccctgtctgtctgtccgtctgtccgcgctcaggcctcgccccaccctggccctagagctgcccggctgccccccacccgccacagcagaccccctctttctgggcctgtctcctcggcaggccacgaacccagccgcgccattgctgccccagaccctgggccggtaccctgacatcggggtgtgcttgcagccggcgatcggatccagatattctgaaacccccaagcgtgggaccctgatttgggatcagcaccttgagctcctgccatggaaccctaagactcggaccttgaacctcaatatctggggctggaatcccgacatccgtctctgggaccccaagatttggaagccgaaccccattattttggagcatggatcccaatatttggacctgggaccccaagatttggcgtccaagcccccaaaattggagctgaactctgaattgtctgactgatacgttgacatctgggagcgaattcccaaatctatacctgggaccccactattctgggaaataaaccctgggatgcaggccttcaattccaagatctgaactgtggaattctgtgggggagcctgaagtccttgctgcagacataagtgctgaaatctggggctagagacctccaagtcttgactcagcaccctagtatctgaacaggatcccagtttcggatgccagaactggactcgggattcagaccctaaacttccccttctggctgttcggtgtctcaagcctggcactgagagagcctgagcctgaaaaaccactggggccttggtctctcaagctggactctcgaggcccagtgttaggggtctggaaccccgagagtcaagtttggagactccataaccacagaccagacctggggcaagacagttccttcccagaggccctgaggacaggggagtcttgacctgatgcctcctccagagttctgacctcacccccttggagcctaaggacactgctccctggggtggcttccagttcaggtaaggccactgagagacacccgtggtgggaagggacttggggtgggggtggggtttcttgggctacaggtggaagtaggtaagtaccaggtgccctgtggcatcctaagccgttttcattgtcccatgagtgtgtcaccaaccctctctggacacatgaccccagctctgcccctctctggcctccttgatgggattctagatctcgatgtcaccaccagtctagcttctggccgtctcagcatcctctctggacccctttctccacctctcctcacaatgacagtttctgctttgctctctgagctgccttgacacccctgtcccctgccctgttgttctccagtcacatctgcccacagcctctctcactgacacttccttcccagtgtctccctgatccactggctttctcaacctttgcccactcctgacctctaggctgagactgtgaccatcccaaatctaacatctgtgcagtcttctcctccctaccttgccctcctctcctgctgtttcctctgtccacctcccaccatctctcttctctccctcctaccctgcgctaactcccggtctacccccacctggccagctctgaccatttctaccttgtctgtctttctaccgctgctccacctctccccaaagccttttctctgaccagttgttctggttccctgatgactggtagatctgtcctttctcctctctctggctttcttactggcttttgactaggtcaaaactcttgtatctctttgtccagatagacttagaaggaccactgcgacctgctagcccttctgctcagtttccctccttagtcatgcctgacctttactgattgataatccttgccaactgcccacctcttctctgtagctcgtctagaccctattgcttactttctctccaccttgaccatctgtccttgcctctgcccacctgtgcacatttctagccagctttctgaccatcatggctcatgcttgactctctgtgccttcatgacacatctctgacaccccactccacccccaccccccacctctctgagcatagtatggccatcactccccgtttctggccccaacactgttccttcttctctacaggccacccctgcccgcgatggccgtccttccactactcctttgcctgctaccgctggcccccgcctcatctccaccccagccggccatatccagcccctgtccccgccgttgccgctgccagacccagtcgatgcccctaagcgtgttgtgcccaggggcgggccttctattcgtaccgccatcactggatcgccgcgctgcagaactgcgcctggcagacaacttcatcgcggcagtgcgtcgtcgagacctggccaacatgacaggcctgctgcatctgagcttgtctagaaacaccatccgccatgtggcagctggcgccttcgccgacctacgtgccctgcgtgccctgcacctagatggtaatagactgacctcgctgggcgagggtcagttgcgcggcttagtcaacttgcgccacctcatcctgagcaacaaccagctagcagccctggcagctggtgccctagacgactgtgccgagaccctggaggacctcgatctctcttataataaccttgagcagcttccctgggaggctttagggcgcctaggcaacgtcaacacgttgggccttgaccacaatttgttggcttcagtgcccgctggagccttttcccgcctgcacaagttggcacgactggacatgacctccaaccgcctaaccaccatccctcctgacccactcttctcacgtttgccactgcttgcccggcctcgaggctcgccagcctctgctctggtgctggcctttgggggaaacccccttcactgcaactgtgagctggtgtggctgcgacgcctggctcgggaggacgacctcgaggcctgtgcctcgccacctgctctggggggccgctacttctgggctgtgggtgaggaggagtttgtgtgtgagccacctgtggtgacccaccgctcacctcccctggcagtgcccgcaggtcggccagctgccctgcgatgccgggcagtaggggacccagagccacgagtgcgttgggtatcaccccagggtcggctgctgggcaactccagccgtgctcgtgccttccctaatgggaccctggagctactggtcactgagccggaagatggcggcactttcacttgcattgcagccaatgccgctggcgaggccactgctgctgttgagctgaccgtgggtccccctccacccccccagctagccaatagcaccagctgtgaccccccgcgggacggggaacccgatgccctcaccccgccctctgcggcttcagcctccgccaaagtggcggacactgtggcccctaccgaccgtggcgtccaagtgactgagcatggggccacagcggctcttgttcagtggccagatcaacggcctgtcccaggcatccgcatgtaccagatccagtacaacagctcggccgacgacatccttgtctacaggtgcaggggcctggcagtgggggagtgagatggggggcggggcggggcactgtgggtccacccaggaataccccttgtgaaccactacaaggaaataacactgtaggttccaaaggaaatcagaaagtgaaggcaaacgaaatcaggcagcagtgataaccacggctgggcagaaaggggtaaaagaaatccagggcagatgtggtgaaggcagttgagacgaggagggtaaatcagtcagacagcaggctaacaggcgcaaccaaaggacaatgagtttaaaaaaaaaaaaaatcgggctgcagaggtagaaagaaacaagactgagaacataaatggtaacaaacatacaaagccaggggaaaaatcaggtcaaatgagtaacaagttaatggttaacagtggttgttcgagtgtagttcagatagcatgctatacaatagcaagcaggcagccctgaggttaagcccagtgctgaaggaagagaaagttaaggaggttatggttaaaaataaattttatcagggagtttggcttttcacaggaggctacaatagggaggttgagtcaggattgtgacaagttcagggccagcctggtctacatagggagtttgaagctgaccagagatttatagtaaacagtgcctggaggaggggaggagagggagaaaaaagagcaagaaggggtgggggaaatgggcaggaatgtacagagacagcagagaaagtctaatgaggtaggcaggggaaaggagggcagaggttaagtgggaaattgggggtaggaggttaaatagagattaggtcttgggttcatgcagtatgagccctactggtcaaagttctggttagagtaacatcctaatttttggtttgctaaatcaaatctaagctaggtcagatgtgtcagtgcacggccgtctatctccccagctctcaagaggttgagacaggaggatagtgagttcaggggcatcctggactatacagcgagaccttgtctcaaaaagccaacaagcagcaacctagtgagctatgtgggcagaaatgcccactctgatgctcctgtcacacacacacacacacaccccacggctgcaaacacaaagcccggtgtttacacactccaaaagggcagtcagtgtagcttctgtccctctgctgtcaccacagtgggtagaaatggtggtggctgacactccccatcaaagtctgaccttgtgtgggcagctgtgggggactccctatcctcaatgccaggctgggccaagaatacagccccaaacttggcagtaacctcccacgggatgggttagcaccttgcaaacccagtgcctggatccacaccccccccttccctggccatatgtcaagtcaagattctatcttctcaatcctaatcccttcccttctctctgtctcccccccgctcctccccccccttctgctttagagctcatgtagccctggctggcctcgaactggccatgtaagccaaggaccacactgagccccgagcccttctgccttcacctccccgtctgcgggccaccacatgtggcatctccactccttttctgaaacattattcaggagattgcatggagggcgacccccttgcctggtggggagtgggacagtctggagacagccaccctgccacaggtcattgcaggtgtccttgtgttacgctccctaaagcagggtaggagtaaaacagactctaaaactagcccagcctctgccagggcatcccgagacgaaagtaatgtgtggaattgggtgagaaaggcgagaaaactgtgagtgtagtggctcagaccttaggctcagccctggagagacttgaggcaggggactgagagttccaggtcagcctgggagctacatagccaaagcctggctcaacactcacaccacacacacacacacacacacacacacacacctgcacacagacatgcaggcacatgcatgcacacgcatacttgcacacacatgtgcacacaggtaccacatacacaaaggaaaggctaatcaggaagcgggaaatggagctaaaagagaatgaagagatgaacctggaaagtagtaaggccaaagagggaagagaatctgagatggagattctcaagggctcgccggaaagactataaagtcggtgatggtaacaaggtactggggctgcagggaaattcactggcaagctggaagcaaagcaggcaacagaggtacaggggaagcagtggttagggtagaggggtacagctgccacatactagggaaatgcacaggagctggacaagggaaattagagctgaaaagaagtcaggcagcggggtgtggggtgcgcggctgtaacatcagcgcttggagttgcagagaggatcatgaggagttcaaggctagccttggctaagctccgtgagaccctgtcttgaaaaaaataagcaatcacttccctaccttgtggctcagatcaagtgtagtatctgctcctaccaggttagtatctgatatgtcctctgtccgaggacaatatattaaatggattttttggggagctgggagatggagcagcagcttgctgtgtccaagatactccttgatttggtgttgcagtagtccaggaatggtgcccccacctcaagggcagaaagcaaatataaaaagcaaaataggagtcacagggagatagtctagcaaaaagatggctggaggatagagggagggggccattggtcaggtgtagtgttaaaacggttctatttccagcactctggaggctgaggcgggaccttcacaagatatgaaccagccttggctacatagcaagactctgggaggcagggggcaggaatcagacagggttagcataaagcagagctttgctggtgaggctaaggacttagctgaacagggcgggaggcaaggtgccaaaaagggtcttgaaggatgttaggggctctttaacaggcctagggaataaatctctgaaagaggaatggaatatcttaggcttcagagaaatagggtgtgggatccacaggtgctcaaaattgggaccttaggtgggagactgaagttggctagcccactggaccgtcatgctaagtgttagctaagcaaaataagtcagggtgctggttagatggacctgggttgcaatggggcagctgtactgcagggaacttagctggagggaggcacagggcagatagatcttgggtattgggtgaccacagtcctgaccccatctatcaccctccctcaggatgatcccagcggacagtcgctccttcctgctgaccgatctggcgtcaggccgtacctatgatctatgtgtgctcgcagtctatgaggacagcgccaccgggctaacggccacgcggccagtgggctgcgctcggttctccacggagcctgcacttcggccttgtgctgcaccgcacgcacccttcctgggcggcaccatgatcatagcgctgggaggtgtcatcgtcgcttctgttctggtcttcatcttcgtgctgcttctacgttacaaggtgcacggaggccagccgcccggcaaggccaaggctacggcacctgtcagcagcgtttgctcccagaccaacggagcgctcgggcccgtgcccagtgcgcctgcccctgagcctgctgcacccagggcccatactgtggtccaattggactgtgagccctgggggcccagtcacgaacctgcaggaccctagccaagggcccacctctatggttcctctggtcccagggacacccctcgggacctggcctcagactcaccaaattgctcacggtttttaaaactctgatggggagggtgtcgggggcaccggggcacaacaagaaagtcctatttttctaagctcgggctgttcctttgcccttgtctgtctgtggggactgaggggtgctgcggagggtatgggggcgggggttgaggaacatcccctgaggaaggcacttcctgtcattcagcttggggtctctgcagaggagttgaggatagtcatctatagtcatccatataagcactggacgttctggggaccgagctgtgctgtggcttgtgctggggactctgacccaagctgccttgccctcagtccagtgggaaacatgtcttgagatagccatactccagaatacagagttgagggatgcccagggggttgtgtgcccccccaccaccaccgaagaggaacctgaagtatagttcagggaaggcttcctggaagaggagggatgtaatctaagtagcatatctgaaggagagcattgggcaaagagcagaagggaaggctccaggtggagggcataacatgaacaaaggctgggtattaccaggcattgggttgctgcggtactggtgaggtgggaggggccagcatctgagtgaggtgctcatgatggctagccacggaggatttcatgcctgggggccgagtgggggaggttgtgggtgggtttctagtgcttcttgagggaggtgaaccagaggcaaggaatccgtgggaagccaatgtaggggtgagggtgggtcaggaccaacttcaaccagggaaacattggaagagaagagtggatgacacagccattcaggaaagtgagcagatggatcacagtgctcagagaccatgagggaggggcttatctagagtgatgctctgggctctggccaggggaaagtcctccaggctgccctggctgaggacgagggagcaggggcacagcagagatgctctgtggtcagggtgggactctgcagatgagggaccaggggagggcgagtggggaggggagatggagacgttggagccaaggatagaaagcagggcttagcagacagagtatcccacccctatcatcctcacacctcaggagacagaggcaggagaccagtagttcaaaagctgacacttcagcatgagacccatcccccccccaaaaaaaacccaaaagaatctgggagcagtcgcaagattgaaccatctactggggtttcagtctttaaggtagaaacggaaagcttttggcagctgcacacggaggagaaggtgaaaaatgtcccaagagactggtgtgtttgctaggggaaaggttacagtggagggttggggggtggagagtcagtgccacattgaaccaatctagcagatatgagtgtggacagggactgagcccaggttcagcgtgagtcagagcacttggcctcatgtctttcctgagctggtccccactgtgtcactgcccggggccccctcacacaagtgtcctggaagtttataggatcagacactgggcatggaaaaggccaggcctcattagaggtgcaggaatggggtcaacagcaagaatagcaccccccccccatgcaagtagcttctctgatggcagctgggggggggggcggagcaggggggggggacggggaagggcctgtcagtcacctgaggtaagatgatgttaggatcagggtgaagacaggctaagagtaaactggaattctctcggtttggtacaaagaatgttctggtgagatgacagaacctatttttcatggtggaacttgagaccttcaaaatgcccaccattaaccatggagatgaggcactcagctccccagtcctgcagcatcccgaggtcctttgtcattttgttactctcgagtagctaagatcatgtgaggctatcaacaaatcacagcataagccttgggccatgggagctagcaagtgggaaggctggctcagtgccacctaggaaatacccactcccaccttaagggggagccagagtacacagttcataaacctgttgttaaaatttgaactgtgtgctaggtcatggggcagattcgggtacaagtcctgccctgccctgccctgccctggcagcatttgtgacacgcacatatgttaaatagggatgtgtgggcagcagaggtggatttgactccagctgaggagttaagtcccaagccgaggctggaggtaattagcaagcagtgggaacagtgttcaatggacatggaacggcatatgataaggtatgcattgtgagaaaaagggagagggagggaagccagaggtgagatggagtgagggaagggaattgtcataatatcaggcaggaagcgggcgatgtaaaagccctgtaaattcaccagaggagggaggattccattctaactgacatgagaaaccactgaaggttccttctgtcttgttttctttgagttgggggtctcacaacattagccccaatttggattcattgtctagctcaggtttcctgacctcactcgtgacccttctgcctgggcctcctgagcccaaggatcgcaggcatgcaccgtcactcctggccactggaggatcccgggctatgaggatcttcccggatctcaaggaagctcccatggcagagcttgtgtgtatggagggccaaggggaagcacggggaaactgaggaggaagacactgcaacagttctggcagaaggctgtcttagaccaggctagacctgagctgacatcaatgacagcagcaggctcctcctttcctacccagaagaggacagtgtgaactactagcagctggtctagaagagagggaaggaaggttgtagaaagtaggggaagagggggaggcccgggtctccaatcccaggatccatcccctagagctgatttttctgtaggaagaagtgacctttggcaagccaagcacaaggcagccagcagatagaggccaaaagaggctgaggctgttgaggtggatccaggcccagtacacggggctagaatggagatgcacacccagtaccggcctacgacaggtgtggaggcatgtgaatggagaatgatagtggtgatagcaaagtcccctgaaacttcacaagacacccagactgccccgcacccctgtgcacaaacaaacaccgccggcatctaggatttcaagttaaatagccttgcccagccgaagccacccgctccctgaggtcaggatatgatgtctactgcccatcgcctctctagtcaaagcaatctggccaccaaacctaggctgctgaggcactgtctcctggtgactgctgtctgggttctgtactgtcctcgaaccatactgcctagccacagctcttggggtgactggagctggtgtgagcccataacatcaggagattcccatgatcctctggcaggccttccttgaggccaagcttctgcggcccttcccatgggctcctaggtgggagaacctgatgaggtggagtgtggggactcctcaaagacagcgggtctcccctggatagtgcgacccagtgatccatgctgaggatcatcagcaaagtctggaccccgcatgcctggaggggtgtcggtgcttggcactgtcctggccttagtgaggttagagtgttggggacatgggatgacaaacagcccaggtctctgccctcttggggtcccagttcttagagaacaagcagatacaaatggtggccaggatagactgagaaagaataggcaggaaggatggcagccgttttttgttctctggtgctttgaacagggtctcatggaagccagagtgaccttgagctccaaatctctttgcctctacctttcaagtgccaggattataggcactaccgcatgccaccggtcctgggggacttgggagcctacggggactcctaactgagactgatgggagcaccaagatgtgctgaagatgggactttttaatgtgtcctgtgcttacaatggcttaatgtcccgctgctactgtcctttttaaaaagacagggtcttgtctgcatagtccaggatgaccttgaactcagtcttcctgccccacttgccccaggtgctgggattacaagcacaaactagccacacccagctctcaccttaaacaccttgaaatccctaatacactttgaacaagctcagcaccacgtccctttttggcaccccgcccttcagattatgcagccaatcctacctgaagaagatggtgaaggatggaagagagctaggctttcccccaaagacccacaggtggtggtgatggggacctttggccccagcacttgggaggcagaggtaggtggatctccaagttcaaggccagcctgctctaaaagttccaggacagtcagagctgttatacagagaaaatgtcaagagagacagagatagaaaaatagggcgtgcttgacagagacagaaagatagggcgtgcttgaaggacgagcttgagggagctgtggttggagcttccagtgggagaacaggcagggcaacaggtgacctggggtgccccgatgctgccccagagcactgttgtgccaaggagggggctgggcaaagagagacagcactcagaaagccacctgacccctgtggaaggggaaattgaggcacgtggtcaagaacaatgtgtatgggagggggtggctctgcttgctttaaagggaacggagtgtccacaattctgaagaaggaactgggcaggtcccaggatcaaccctgtccttcattctcaactgttaagtgttcacggggaaggaacacggagtggccgcttacacaatgcccatgctaagtgctagaaaatcttagaacccaagaacactcatgagttgtgctggaagcaacgctgacaagaatttgagaacatggaatttaaaagattttactcaggatgtgttctggcccatactccctggaacccctggggcacagtgcactctcctcagccccatgggtacatcagcacttctacttccttctaaatgctcttcctgccccagggctggggatgaaccccccccctccttcatcttctgttcttctcagctatcaacctgagcctgtgtctggcatcctaatttcacatctggcttcccaccgcttccttggcccccttttcctagataaatatgcaacctgcctcagcgtctttcctggccagcacctttgcccagtttgtattcccacaagccctgaggatccactgtacctccccatcctccttttcctagttcgagtctggtctaacactgctttaactacccggattcctccacggacctccctctgggatcctggccacagcattcctctctgacccaaacccttcttagtgtcaaacctgtcggctgcatataagcttccatggctcaccagggtcccggttcagagtcagagctgtctgggaggctgagacaggaaggttgcatgactttttgagtttgaagccagcctgggatacatcacaagaccttgtctttaaaaaagcaaacaaaacccttcactttggggtatctatgacccccgccttcctcgagtaccatctccaacataacactccttcagtgtagacagaatactaaccattcccaggaagcgaaggccctcccatcatgcctttcttcccacaccccctcatttaccctgcttgggatgacaagcctcccgggaaagcgacacaggaagctgtggaaagaaagctccctctctctttatgtcttaccaacaacaaagcttctaaggagaagagagttagaatatgggggagaaggtgttgagaatctgccccccaccctgtctttcccagccctcctagctcccccttccagctactcccttgtaggagcagtcctcgaggggacaggagaggggaggccaaagctatcccttggaggcctcagctccccaccctccagatctcctcatccagccttctcagtattctctcctgctctgtctccagtcgctcctgcaggccaaacggtaggcctccaggtctccttccctaaacttgggcgttccctaaagtctccaggtcctctttcagacgcagcagcgatctccactcccttcctcggaacccaggcttcccactgcgacccttcctagggcctcagaacgtctagccaaaagcttcttcctcctcagcaggctatggaggctgttcctctgttctagaatgttcttccggtgtcggcttcctcacttgaccgctttgccccattcttctgtttacaggaatatagagcctccgctccctccaaacacgatcaaaccagttctctatactcaaagacccttttctagtcctaatgtctctcaaataagctctctccttctctccttccccaccaagtctccttcccttccttcctgactctctccccactcgtccctctctgcccttccctcacatcctcctcttcctcctctccctcctccttgtaattcctcaacattccctcgtcatgtgcctgttcatctccaacatgtctcacctcctcaaccaatccctcttccccccctcttccgccatctgcctctagtctctaaccccacaattccaacctgatggtaacaggtcagactggagccacacatcccttgctgcttcagggagcgtgatgagggccaggaccaagcttaaagatggtacacaagtgacttgtagtatacacagctccccctgggtcccgataggcaagagccccagcctacctatcctatccatttctgggagtgtgcccacagggaagagggtcaagaggccctctaatactcggtcatcgctgccttcatacctgctcgaacaccttgatgctctggatttcccacagacatgtggatgtacaaagacgatggctggtgacctcagagccaagggtggaaaggctgcctgacatggctcagtgaaagtggaatttctttggacgcgattctggctggttaggacaagatctattgacagactgtgccagtagatacgacaaactggttctggaagcataataaggcaggcagaccagaaaaagtaagccatctctcccagctctgtgaagtgtgtgtgtgtgtgtgtgtgtgtgtgtgtgtgtgtgtgtgtgtgtagcagctttttgagatgagggaaccagagcccacagaagttaggtgtatggttcaagttcccatggcttgaaaaagacagtgaggattcaaacctggcggaatggcctcccaatctacccaactattctggttccctcctctgcgctccgggttcactcagactcaacagctgcgtttgtgggtttctagggccgccgcttaatcacagctttcttggaaaacgggggcgctgagaaacccgacttccggctgtgtgtgtgttgccaccgcccgaagggccccgatggtggtgctactgtcagtaccaatgagccggcgcccagtgcccaagggctgctgaggaatccacgtgggcgagcctgcctggacccaacgccgcggcgccacctgctgggcgctcgcggtgatgccgcggctacggccgggcgactcgcagtcagctttctggggtaatgggcctcctgctgcacataacctgcctgtcagtattcttacatcttgaacccttccttccaggaacggcaggtgtagagcagaatgcgggtgaccaatcaagttcccatgatatgccattcatccggtggcactgatgattggacattcttgtcagcaagcaagacacaagggtaccaactactgctgctcaagggtggcagggaccgccagggcctggagaagcgagaagacctgttgaggatcagggtcgggaaaaattacaaaactacattctattcctcatgaagccgccccgagaccgtttttaaaattcgaatcatgtcccttctctactcaaaatcccccagtgcaatcaccccgcctgccagcagcgccagagtcctgacagtgatttataagtcctacatgagggactggaggtggggcgcacccagttgatagagtgcttgcctaggatgtacaaagccctgggtttgatccccagtacttgcctattctctcagcactctggaagtggaagcagacacacagaagttcatagtgatgtgcgagacaagcataacatcctgtctcaaaatcaagtaggtgaattaaatttaaaattagagccggtgagatggctcttcatctcactggttgctaagcctgacgacctaagttcgagtccccgggacccactgagcaggagagccttggcacctacgagttgccttttgctgggcaggtctgcaagctttggaccacctctttggcagcagtagtggctgggcgtggtgatggtggtgtgtgcacaccttggtactgctgcgtcacaggcctataaataggtgaggctttatgggctaagtggtaagtgcttttatatataatgtatgcatgcacattatgtaatatattcctcacagtcaacctggaggcaggtctttttattatcccagttttatagagaaaccaattggaggtcgaaggcgctaaatcattgcccagagccacactcagagcaggtggctgcttgtaaccaaaattctccggggctattggaaaggagccgctttgcctaagcagcacaaagctttgcgcagactctaaatgcggtcgggcgctggccatggtgctgaacagaatagccgcagcttctccgcttgagattgtcaggtaaccttggaattaaggagctctttctcaaccatggtgatgaaagaaacgtgaaagtgtgttcggaaagaatctatagtttctcagcaacgaagacagaaattttcctgtctcacaaattctgggaccaaagtatctacttttttgttgttgttgttgttggtttttcgagacagggtttctctgtgtagccctggctgtcctggaactcactttgaaccaggccagcctcgaactcagaaatccacctgcctctgcctcccaagtgctgggattaaaggcgtacgccaccaccacccggctcgaagtatctacttttattattttaaaatatatatttattcatttatttatttgatttttggagacaggtttctctgtgtggctctggctgtcttagaacttactctgtagaccagacttgcctcgtattcagagatccacctgcctctgcctccctagtgctggaattaaaagcatgtaccaccactgccattattattattattattactactactactactactactactactactactactaactattattatcttcgagctgtactctggagtggggagcaagcttggaaccctgacccaaactagatgagctctcataagtcacttcccctctctgaccttccacttcctcctctgtaacagtggagaacacaccaacacaccatgtattggtagcattttaaaaaggagaacccagtacagtgatccatgattatatcctagtacttaggaggtgaggcaggaggattgttctaagcttaaagcagcctgggctatatactgagttccagaccacagtaacaacgcctacagtacagtagatatttgttctaaacagggtctcattatgtagctctggaccttgctttgtggaccacactggccttgaactcacagaggtctgctggactctggctcttcggtgttgggattaagggtgtccaccacactggcttctcctcttaaagaattccacaaatatatggtgagttggtggtgttctccacctttacagaggaagcagatgatcaccacttttaagtgaaattttatactatattttttttagacagggtttctctgtgtagccctagctctcccagagctgtctctgtaggcaggatggcctcagactcacagagatccttctgggattaaaggcatgaacaacctctgcctggctaagacaacatatcttaagtcacagtcaaaagactagcagagctaaagagatggctcagcagttacatgttgcttttctggaggccatgggttcgagtcccagcataaatttagcag

SEQ ID NO: 34 - DNA, 2034 bp, Mus musculus
atggccgtccttccactactcctttgcctgctaccgctggcccccgcctcatctccaccccagccggccatatccagcccctgtccccgccgttgccgctgccagacccagtcgatgcccctaagcgtgttgtgcccaggggcgggccttctattcgtaccgccatcactggatcgccgcgctgcagaactgcgcctggcagacaacttcatcgcggcagtgcgtcgtcgagacctggccaacatgacaggcctgctgcatctgagcttgtctagaaacaccatccgccatgtggcagctggcgccttcgccgacctacgtgccctgcgtgccctgcacctagatggtaatagactgacctcgctgggcgagggtcagttgcgcggcttagtcaacttgcgccacctcatcctgagcaacaaccagctagcagccctggcagctggtgccctagacgactgtgccgagaccctggaggacctcgatctctcttataataaccttgagcagcttccctgggaggctttagggcgcctaggcaacgtcaacacgttgggccttgaccacaatttgttggcttcagtgcccgctggagccttttcccgcctgcacaagttggcacgactggacatgacctccaaccgcctaaccaccatccctcctgacccactcttctcacgtttgccactgcttgcccggcctcgaggctcgccagcctctgctctggtgctggcctttgggggaaacccccttcactgcaactgtgagctggtgtggctgcgacgcctggctcgggaggacgacctcgaggcctgtgcctcgccacctgctctggggggccgctacttctgggctgtgggtgaggaggagtttgtgtgtgagccacctgtggtgacccaccgctcacctcccctggcagtgcccgcaggtcggccagctgccctgcgatgccgggcagtaggggacccagagccacgagtgcgttgggtatcaccccagggtcggctgctgggcaactccagccgtgctcgtgccttccctaatgggaccctggagctactggtcactgagccggaagatggcggcactttcacttgcattgcagccaatgccgctggcgaggccactgctgctgttgagctgaccgtgggtccccctccacccccccagctagccaatagcaccagctgtgaccccccgcgggacggggaacccgatgccctcaccccgccctctgcggcttcagcctccgccaaagtggcggacactgtggcccctaccgaccgtggcgtccaagtgactgagcatggggccacagcggctcttgttcagtggccagatcaacggcctgtcccaggcatccgcatgtaccagatccagtacaacagctcggccgacgacatccttgtctacaggatgatcccagcggacagtcgctccttcctgctgaccgatctggcgtcaggccgtacctatgatctatgtgtgctcgcagtctatgaggacagcgccaccgggctaacggccacgcggccagtgggctgcgctcggttctccacggagcctgcacttcggccttgtgctgcaccgcacgcacccttcctgggcggcaccatgatcatagcgctgggaggtgtcatcgtcgcttctgttctggtcttcatcttcgtgctgcttctacgttacaaggtgcacggaggccagccgcccggcaaggccaaggctacggcacctgtcagcagcgtttgctcccagaccaacggagcgctcgggcccgtgcccagtgcgcctgcccctgagcctgctgcacccagggcccatactgtggtccaattggactgtgagccctgggggcccagtcacgaacctgcaggaccctagccaagggcccacctctatggttcctctggtcccagggacacccctcgggacctggcctcagactcaccaaattgctcacggtttttaaaactctgatggggagggtgtcgggggcaccggggcacaacaagaaagtcctatttttctaagctc

SEQ ID NO: 35 - protein, 618 aa, Mus musculus
MAVLPLLLCLLPLAPASSPPQPAISSPCPRRCRCQTQSMPLSVLCPGAGLLFVPPSLDRRAAELRLADNFIAAVRRRDLANMTGLLHLSLSRNTIRHVAAGAFADLRALRALHLDGNRLTSLGEGQLRGLVNLRHLILSNNQLAAAGALDDCAETLEDLDLSYNNLEQLPWEALGRLGNVNTLGLDHNLLASVPAGAFSRLHKLARLDMTSNRLTTIPPDPLFSRLPLLARPRGSPASALVLAFGGNPLHCNCELVWLRRLAREDDLEACDPALGGRYFWAVGEEEFVCEPPVVTSPPLAVPAGRPAALRCRAVGDPEPRVRWVSPQGRLLGNSSRARAFPNGTLELLVTEPEDGGTFTCIAANAAGEATAAVELTVGPPPPPQLANSTSCDPPRDGEPDALTPPSAASASAKVADTVAPTDRGVQVTEHGATAALVQWPDQRPVPGIRMYQIQYNSSADDILVYRMIPADSRSFLLTDLASGRTYDLCVLAVYEDSATGLTAWVGCARFSTEPALRPCAAPHAPFLGGTMIIALGGVIVASVLVFIFVLLLRYKVHGGQPPGKAKATAPVSSVCSQTNGALGPVPSAPAPEPAAPRAHTVVQLDCEPWGPSHEPAGP

SEQ ID NO: 36 - DNA, 33362 bp, Homo sapiens
cactccaatctgggtgacagagtgagaccctgtctaaaaaaaaaaaacactatgcaaaaattagccaagcttggtggtgtgcacctgtaatcccagctacttgggaggctgacgcaggagaatcgcttgaacctgggaggtggaggttgcaatgagccaagattgtgccattgcactccagcctgggcaacagcagagactccgtctcaaaaaaaaaaaaaaaaaaaaaaaaactaactaataatgcttgctcattataaaaaatttgaaaaatgcagcaaaataaaaaagaaaaagaaaattcacctacttctaagagacagcttctattaatgtttaattatatttcctgtcttttactgggcatatttgtatgtattctgaccatcctgtatatagaaatttgcatcctgaccatactctatatgcaaatttgcatctggcacatttttgcaaacaatttttattaacttggaatgaacagctgtatttccttcaactactcaaatatgacctgacctcactattgtacaccacctttttgctctggaaagtaaccaaagagatgatcctcacagtccttagggcagaataaattatgttttttcttttttttttcttttttcttttttttcactctgttgcccacgctggagtgcagtggcgcgatcttggctcactgcaacctctcactcccaggttcaagtgattcttctgcctcagtctccccagtagctgaggttataggcgtgtgccaccacacccgcctaatttttgtatttttagtagagaccgggtttcgccatgttgcccgggctgatctcaaagtcccggactcaggtgatccacctgcctcagcctcccgaaagtgctggaattgcaggtgtgagtcaccacacctggccagggcacaatacattttttgttttgttttattttttgttttttgagacgcagtatcgctctgttggccaggctggaatgcaatggtgtgatcttggctcactgcaacctccgcctcccaagttcaaacgatcctcctgcctcagccccgctagtagctgggattacaggcacgcaccactatgtctggctaatttttgtatttttagtagagacagggtttcgccatgttggccaggctggtcttgaattcctgatgtcaagtgatccacccaccgcggcctcccaaagtgctgggattacaagcgtgagccaccgcaactggctttttttttttttttttttttttttgagacagagtctcgctccgtcaccaggctggagtgcagtggcacaatctcggctcactgcaacctccaactcccaggtacaagtgatcctcctgcctcagtctcccgagtagctgggattacaggtgcccaccaccacgcccagctaatttttgtatttttagtagagacggggtttcaccatgttggccaggatggtcttgatctcttgaccttgtgatctgcccacctcggcctccctaagtcctgggattacaggcgtgagccaccgtgcctagcccagaataaattaaacattaaagcttagatttcatttctcagttcacttgtatttagaaagagctgtgggggcgaatctgtttcccttttcctcttccccctgcctgggagccatcctggatctttcaggccagtgctttcccagggatagtagcacaaaagtggaagccacctggatctctgactccgtgaagccttcacaccaattctgcattctttatgtttggtcaatttgtaggagagaaataaagttcgattttgcttaagccactattatcaatttcagctacttgtatttcttgtctaacaaacagtgctcatgaaacatgatccatttctcatattcctgaatctctttagaaacaccagtcttgaggctgggttcagtggaaggccaaggcaagagaatcacttgaggccaagagttcaagaccagcctgggcaatataacatctctacatacatgaaataaaaaaaatacgacgtgagtggatcatctggggtcaggagttcgaaaccagcctggtcaatgtggtgaaaccccgtctctaccaaaaatacaaaaattagctgggcatggtggcacacaccagtaatcccagctactcaggacgctgaagtgggagaattgcttgaacctgggaagtggaggttgcagtaagcggagattgcgccactgcactccagcctgggtgacagagtgagaccctgtctcaaaaaaaatacttaaataaataatttatggcgtcataaaaatccttgtaatgaaatcttttcctacttgctggagtacttccaggaagtaaattcctagaagtagaaataatggaacaacagatatgcgcattttcaggctttggatgcaggctgcccagttcttccgaaaggtcatcctcgtttgcagccagcaatgggagtggggtctcccatgtcgctgtgctctccttggctatagggaaccagatttctgatatctttgctgatttgacggcaaagaggagggtttcagtacttcaagttcagttattactggtggtaaacttggctttgatcaatttcagctatttgtatttcttttgtgatctgtcttttcctctcatttgcccatttctcttttggctgattggcttctcatattaaatttattaatgttttcattaccttaaggatgttaactatttttttcttttgtgatctgtcttttcctctcatttgcccatttctcttttggctgattggcttctcatattaaatttattaatgttttcattaccttaaggatgttaactatttttttcttttgtgatctgtcttttcctctcatttgcccatttctcttttggctgattgccttctcatattaaatttattaatgttttcattaccttaaggatgttaactatttttcttgttttcctttaaaaaaatttttttttaaagagacacagtctcaccctatcatccaggctggagtgcaatgacagatcacagcttgctgtaatctcctgggcacaagagatcttcctgccccagccccccgagtagctgggactacaagcatgcaccaccacacctggctaattttcgtattttttattagagacaggatttcaccatgttgcccaggctggtcttgaactcctgagctcaagggatcctcttgccttggcttcccaaaatgctggaataacaggtgtgagccaccacacccagcctcttcccacattttactctagtccatctggaatttattttcatttatcagtctccaaattaatatttgtacctcaaatggctaagacagaaatccaactgctgtgacattatgcttctgttctataatgcattcttgctcttctgctctgtctttggccagtcattctggtacattacccatcaagattgttcttacactgaaacacactttaaattatgtgagcttcatgatgttactatcttgtaaccaggctctatccacagcacctagagcctggcacatggcaggatctcaagaaatatctggcaaaagaatgaattactgaatgaataagtgggaaaataaatgaataaatacaatatgcagctgagcgtggtggctcacacctgtaatcccagcactttgggaggccaaggcaggaggattgctcagccagttctggccccactcaacagcccagctgagctcgaaaccaacagccagtgacattgccaaccatggacatcagccaccttggacatcagcctggttgaactttcacatgactccagctccctccaacatctaacttcaccacatgagtaacaccaagcaagaaccaccctgctgagcccttcctaaattcctgacccaaaaactcagagggaaactaaaataagccacttcacttggggataatttgttacgcagcaatagataactgaaacactgggtttgcaaactcaaccctcactctaaccctacagcatccagatgtttaatgtaaacagtgagttgggcctggtgcaggtgagcaggtgcggtgggagccctgaggcactggggaacctgtgctgcactgccctgagctgtatgtctccccagatttgttccttgccctcccctttcttcccccatcctaggctgctatttccagtcttccctccagctggggttcaatcaatgggaagctcaggtaggaggctggaggaccagaacaagcagccagggtcattccactccccaagggtcattctcctccttctcctggtagttatgcctcctctagagccccagctcctgccagccagacaatcccactgtgttcccagcttctactaggaaaccttatctctgggctccggtgacaccacctcctccctttgttcctccaacttacggtggaggcagcttccctctgctgctaatttccagtttcttcactgactcccactgggcccctcagctcctccttccctacttaaccatctccatctccaggtgttcatgtccccctgtgtttttgtcattgttgttgttgtttatttatttatttattacagacagtttcgttcagttacccaggttggagtgcagtggtgcaatcatagctcactgcagcttctaactgctaggttcaagtgatcctcctgcctcagccttctgagtagctgggactataggcacaggccaccacacccaggtatttctatttattttatttatttatttattcattttgtagagacaggatttcac[131 bp omitted]tgcgggacatgccatgcagagaatgaaaggtgggtgctgtgtgaacgtgggtacaaggaagttaggctttcactggggtggcacaatggcagctctgaggcaaaggcatcagagcaaaagagaaggaaaagagggagcctgccctgcaaagatctgggagaaccgtgctcccagaagaggaatggctatcacaaagacccaaggcaggaaagagctgggagtgcctgaggaacagggagaaggttgagcaaaaagagcagcaacatggggcaaaaagagcaggatcatggggagatgatacgaggatggagaagttgctgtggtcacaggagccatgggcaggagtttgtgcaaccagtttgtccattacccgatgcacacagcaaatcaagacagccagttgcagctgagaaagaggattagttgtagggtcaacaaataacaacatgggagagaagctcaaattcatctccctcaggaatctggagcaaggattttttttttttttttttttttttgagatggagtctcactctgtcgccaaggctggagtgcagtggcgccatctcagctcactgcaagctccgcttcctgggttcacgccattctcctgcctcagcctcccgagcagctgggaccacaggcgcctgccaccacgcccggctaatttttttgtatctttagtagagacggggtttcaccgtgttagccaggatggtctccatctcctgacattgtgatctgcccgtctcggcctcccaaagtgctgggatcacaggcgtgagccaccacgtggggcaaggatttttaaggatttgggggtgagacaaagtgtggatatcattgttggaagactgccgggtgaagtttagggacatggagaggaagaagcagtattctcatactactggcagtcctctgtgggggtcttcacattggttgctggaatttgggggtctgataaacaactcaagtgatcttttttaaaaaagccttaagattctaatgtcagagatcctgcctgtgggaacaatggagatgcaagtcaattaaatgatcttatgaccctaatgtcagaaatcctatctataggccaggcacagtggctcacccctgtaatcccagcactttgggaggccgaggcaggtggatcacctgaggtcaggagtttgagaccagcctggacaacatggtgaaaccccgtctctactaaaaatacaaaaattagctgggcgtggtggcagatgcctgtaatgtcagctactcagaaggctgaggcaggagaatcgcttgaacccgggaacgagaggttgtagtgagctgacatcatgccactgcgctccagcctaggcaacaagagcaaaactctgtcagaaagaaaggagaggagaggagaggagaggagaggagaggagaggagaggagaggagaggaaaggaagagaaagaaagaaatcctatctataggaacaatgggggtctagtaccacctgacttttagcaacaaggaagtggac[139 bp omitted]gtgaaaccccgtctctactaaaaatacaaaaattagccaggcgtggtggtgggcacctgtaatcccagctactcgggaggctgaggcaggaggatcacttgtacctgggagttggaggttgcagtaagcggagattgcactactgcacttcagcctgggtgacagagtgagactcaaaaaaaaaaaaaaagacagacaggcatggtcggcttgttaacatgcagactgctgggtcccccagagattctggttcagtagatctagaacaacagagaatttgaatttctgacaaattgtcatgtgatgctaatgctgctggcagaggtcacactttgaaaaccactggtctagaaaaacaccttttttttttttgagacagggtcttgttgtctcacccacgctgcagtgcagtggtgcagtcacggctcactgtagcctcaatctcccgggctcaagtgatcatcctgcttcacccttctgagtagctgggactacagggtgcaccatcccacctggctaattttttaaagattttttttttaatatgtggggtctcactaagttgcccaggctggtgtcaaattcccagactcaagcgatcctcctgtctgagactcccaaagtgctaggattacagctgtgagccactgtgtccagccacaagtgaaagtaatttaataaaatatttcacttgaatttaattattttgctaataattaatagatatgctgggcatggtggctcacatctgtaatccctgcactttgggatgccgagccgggtggatcacctgaggctgggagtttgagaccagcctgaccaacatggagaaacctcgtctctactaaaaatacaaaaaattagccgggcgtggtggcacatgcctgtaatcccagctattcgggaggctgaggcagaagaatcgcttgaacccaggaggcggaggttgcggtgagccgagattgtgccattgcactccagcctgggcaacaagagtgaaactctgtctcaaaataataataataacaatactaaatagataatatttatataaacatatccaaaatactatttcaacatgttatcaatattttataaatgactgagctacttttttttttttctttttatttgagaccgagtttctctgtagcccaggctggagtgcagtggcatgatctcagctcactgcaacctctgcctcccgggttcaagttattctcctgcctcagcctcctgagtagctgggattacaggtacatgccatcacacccagctaatttttgtattttcagtagagtcagggtttcaccatgttggccaggctagtctcgaactcctgacctcaaacgatccacccgctttggcctcccaaagtgctaggatcacaggcatgagccgccccacccggcttacattcttttttcctattaagtcttcgaaatccctgtgtatattttatatttgcaacacatcacaattaggacttgtcttcaatagccacatgtgtgactagtggctaccatactggacagcacaggacaggcctggaatggtggccactgttgcggggatagtgagttgaaggtggagacttgcctcttgaatttagcaacgaggatgagctttggcaataaaaagtttcatttttgtgaaatggagagagagagagtatatgaacacttccttcctgaagtttgggtgtggttttaacaccaatagagagatctggctaacaaaactcaaaaccaacaccagatattagcagcacaaaaaaagacaaccacatattatgtcccttctgataggagatcttaatattatccctgaagtatacttaaccccaaactgaatgtgtatctgactcagcctctagatctaccagtttgcaagacatacagaggatggcagaacatattaaaggacaccaagaggggaaaccagtcaaatcagactgagaagagattatttataggtggatagtgtcaaaaagaaaggaaaaaattaaaatttgtaaaaaaaaaaaaaaaaaatcacactttgggaggccgaggcaggaggatcgcttgagctgaagagtttgagaccagcctgggcaacacagtgagaccctgtctctattaaaaaaaaaaaaagtataaaattttggccaggtgcggtggctcacacctgtaatcctagcactttgggaggtcaaggccagagaatcacctgaggtcaggagttcgagaccagcctggccaacatggtgaaaccctggtgcagtggcccatgcctgtaatcccagctactcaggaggctgaggcaggggaatcgcttgaacctgggaggtggaggttgcagtgagttgagatcgtgctattgcactccagcctgggtgacaaaagagagattccatcttaaaaaaaaaaaaaagtataaaattaaaaaattagactgagatgaatgagagggagagggaacagttataaaatagaagacttaaagaggtaacaaacaaatacaatgtacaatgcaggcaccctggtcggattctaatttgaacaagccaacagtttaaagacatttctatgacatttagggaaatttggagacaggatgaatgttaagacactactaaggatttgttggttttttaggtgcgataaaaatgttatagtaatgtttttttaagaaccttatattttagagatacataatggatgaaatcatgtgatgtctgggatttgctttaaactaactttgggggaggtggaataaataaaacaagattggccatatgttgataattgttgaagctgggtgatgggtacttagaggatcattacattattctatttctgtgtacgactgaacattaataaggctttaaaagggggactgctgtgaaaaagagaaaaaagtagggaaattgtgtgttttttccccccaggatcgaagcgcctttaacaggctccacagctgacaaggacgttgggatgcaagagagtgagaaggcgccagggtggctgcagggcacattcaatagtcggtctagctcttgctcccgcggctgccttctctgcagctctggaggctgcagcttctggtcctggaccgggacttaggtccacacccacgtgctgacgtcgggcaggctcagcggcctcccgcgcctgcgcagcaccgcccttttcgggcgcggcgcccagtccctacaccccacaatcccccgcgccgttccggaggcgcgctaggagtgggtgtggcctctgcctccacattggaacaaggtgaggcagagggtgtcgcgtggtcttctgggaaatgtagttcgtctgccaggccggaaccaccgctcaaccggctcgcgagactatgcaccccacaatgcgccgcgcgcgcagcggctaagcgatgcgttgctgcctccacgtggtggctgagtgatcatgctccggtttgggaatggggcccagaagggtagggttaggggcggggacggtgctggggatgctgagggtcgccctggaaacctctgggaagattttccagagggtaagtcccctgaacctggcccacgaaagggtagtagtaatgaagaaattggaggtggggcccgctatgaggaccgaatgacagagcagcacctgttggctgcatatgataatcaggctactgttacacctaagactcacacagtaggcacttcctaggccacttaccgctccctgcgcttcaggtatcttagcccattcaatcctcccagccaccattcgagatattatcagccctcctttctaggagtgaagctgaagcccagaaacgcgaatcacttgctcaaagttattcaacatgtcagtggcagagctgggatttgaactaggctgtcgggctaccaagtctgggctcttcttcataggaatatctcatcaccctattcagttatcctaaaattgtaattagcacatgaatcaagtcaagatggtcattaacatgtgaatctctttgagtcgctgattaccagcgcttgttcctgcccaaatttgtgacttagacctgcttcaggacaaagttgacaatcaacatagatttatagttagcacatgaatcagcacaggtttctgttcacagggatcagatttctgattagcacttgaatcagcagtggtttgtgtcaacagctggagtctttaggttcctgatttgcacagggatctccatccagggattattttcttgcctaaataggcctgttcctttatgtccaggtgaccttctcttcaaatgttgtcccagctgggtgcagtggctcacgcctgtaatcccaacactttgggaggctgaggcgggaagattgcttgggtctgggagtttgagaccaacctgggcaacatagcgagaccccgtgtctccatgaaaaataaaacaattagcctggcatggtggcatgctcctgtagtcccagctacttgagaggctgaggtgggaggatcccttcagcccaggagtttgaggctgcagggagctatgatcatgccactgcatggcagcctcagcgacaaagcaagaccatttctcttaaagaaaaaaaaaaaagggcgggcacagtggttcatgcctgtaatcccagcactgtaatcccaggttgaggtgggcggatcaactgaggtcaggagttcgagaccagtctggccaaca[138 bp omitted]tggtgaaaccccatctctactaaaaatacaaaaattagcagggcatggtggcacgtgcctgtaatcccagctactcgggaggctgaggcagaagaatcgcttgaatccgggtggcggaggttgtagtgagccaagatcatgccactgcactccagcctgggtgacagagcgagactccgtctcaaaataaaaatcagccaagcgtggtggtgcatgcctgtaatcccagctactcaggaggctgaggcaggagaatagcttgaacccaagaggtggaggttgcagtgagccgagatcatgccactgcactccagcctgggcgacagagcaggactctgtctttaaaaaaaaaagagatgggggctgggcgcagtggctcacacctgtaatcccagcactttgggaggccgaggtgggggtatcacctgaggtcaggagttcaagaccagccttgccaacatggtgaaaccccatctctactaaaaatacaaaaattagccgggcatggtggcacatgcctgtaatcccagctactcgggaggctgaggcagaagaatcgcttgaatccgggcggcggaggttgtagtgagcaaagatcacgccactgcactccagcctgggtgacagagtgagactccgtctcaaaataaaaatcagccaagcgtggtggtgcatgcctgtaatcccagctactcgggaggctgaggcaggagaatagcttgaacccaggaggtggagattgcagtgagccgagatcatgccactgcactccagcctgggcgacagagcaggactctgtcttaaaaaaaaagagatgggggctgggcgcagtggctcacacctgtaatcccagcactttgggaggccgaggtggggggtatcacctgaggtcaggagttcaagaccagccttgccaacatggcgaaaccccatctctactaaaaatacaaaaattagctaggcatggtggtaggtgcctgttatcccagctacttgggaggctgaggcaggagaatcacttgaaccaaggaggcagaggttgcagtgagccaagattatgccactgcactacaacctgggcaacaaagtaagactctgtctaaaaaaataaataaataaatagg[140 bp omitted]gcatggtggcagacgcctctagtcccagctactcgggaggctgaggcaggagaatggcgtgaacccgggaggtggagcttgcggtgagccaagatcacaccactgcactccagcctgggcaacagagctagactctgtctcaaaaataaataaataaataaaataataataaaatggggttatttgttttttgcttgttgcattgtttaagtcccttatagactgaattcctctttatgtctctaaatacatttgtctctttggtacacatctgcggtgctacatgccctcaacccaccaggttttagcatagctgttgtggtagacagttccgtgtgcagtgcagatagccctggttcagcccagctgttctcaaaatgtggtccctgaccaggtgtagtggctcacacctgtaatcacaacactttgggaggcctgggagggaggattgcctgaggccaagagttcaagaccagcctgggcagcatattgagaccctgtctctacaagaaattttaaaaattagctggatatggcgatgcatgcctgtagtctcagttactctggagcctgaggtgggaggattgcttgagcccaggaatttgaggttgcagtcaattatgattgcaccaatgtactgggtgacaaagcaagaccctgtctcaaaaaaaaaagtatggtctttgaaaagtcacattagcatcacctgggtactcgttaaaaatgcaaatgtttgggtcccacctcagacccactgaaccagaaactctgaggttgggacctggagatctatggtgcccccgggtgatcctggtgggctgcactgcaaggacacctggcctggctcctgcaaggcaaggcatccctctctgcttttctttctttctttctttcttttaaagacagagtctcactctgtcacccaggctggagtgcaatggctggatctcagatcactacaatctccacctcccgggttcaagcaattctcttgcctcagcctcccgagtagctgggattacgggcgtccgccaccacacccggctaatttttgtatttttagtagagacggggtttctccatgttggccaggctggtctccaacgcctgatctcaaaagatccgcccgccttggcctcccaacgagccgggattacaggcgtgagccaccgcccccggctgtcagtgtgtcttgaggtctttccctaatcccagatggcacaagttttccctcttgcaggcagagaaaggagccttgggaaggagcccctctggcctgaaagatcaagcctattgctgggcatggccaggtaaggaaactccaaccgtggaaaggacattccagggaggtggtgctgagataaggggggcagaaagagacaggtttggggggccagtggctctggaatgaagcgctacactcaaggctaggaatagttactgaatgcacatacacacataccattctcacagcccaggtgctgcgtcttagagcgtgtgagtgtgtatgtgtgtgtctgtgtgtgcgcgcgcacgcacgtctctatctctgtttctgtctttctctgacttgtccttatctcttgtctctccatcactctctgtgtctcgctgtctctgtgcatttccatgtctcgaatatgtgtgtgtttcaatctgtctctctgcctctttccattttctcctctctatccatcaatctaagcctgcccatctttttgtctgcctttctgtatctccgttcttctctgtctctctgtctcagtctctctgtatccagggattctctttcccagcagcgccagtgcgactccatgggaggtggggccggggcgcgtctttgagagaaggggcgggtgcctacgcctttaagcgcgggtgcgcgcggagcctgcgcctttaagcgccggtgcgcgcgctgccctgggttcccggcgaggaggccgcgggagcgcctggacccggcccgcccagcccggcccccgcccggcccccgcctcggccccggcgggggaggggtctctgagcgcggcccctcccccctgcgcccccgcctgcgctgcggtgcccccatcccgcgtgtcccagtctgtctgaccgtccctccgctcccaggcctcgccccacccggccctggggctgcccggtcgcccccctccccaccgcagccggtcccctccctcccagtcagcctccgccgcagcccaggaagccagccgggacgccgccgccccggaccccgcgccctaacctccacctcgggggcctgcacccccagattgaatcgggaattccggaaacccgagcctggaaccctgatctgggaccagcaccccgagatccggccgtggaaccccaagatctggagcctgaaccccagtatatggggctggaatctcaacatcggtcactgggacctcaatatttggagccggaaccccacaatttggaacacagaccccaatatttggagcagaaccccaagatttgacatctaaaacctcaagcctggagctgaactctgaattctgggcctgggaccttgaaatctgggactggatttccagtactgtaccctggaacccactcttggggacctgaaccctgggattcaggcctcaaattccaagatctggactgtgggattccaaggggcctgaacccgagtttgggcctgaagtccttgctgcagacctgagtgcttaaatctggggcttgagacctcccaatcttgactcagcaccccaatatctgaatgcagaaccccgggatcggatctcagactctaaaccccaccgtttggctgcttagcatcccaagactggacctgggagaccctgaccctgaacaacccaaactggacccgtaaaactggaccctagaggcccaatatttaggggtctggaaccccgagtattaaggtctggagactccgttgccacagatttgagccgagtcaggacacagtccctctacagaagccttggggacaggaaaagcatgaccagatgctccctccagagccctgacctctgactcccctggagctaggactctgctccctggggctgcttctagctcaggtaaggctgctgaaacctcaaggtggggacgggctgggaggagcattgtggctgcgggttacggtaccaggtaccctttgacactcttggggtttctccagaaaaaaagacattcccccatgggtctgccttcagctcctgctctgctccaaacactctctggacactggccatccttgcccctctctgaccttccctgcctcagttgatgggacctccaggtctctgacccctgcaacccttacagcctttcgctgtctatccggtccgaccgtctccgccacctctcttgtccaccactcctctctctgggctcctttctccacctgtcctctcaatggccatctctgttccctttttctctctctgatcatctttgtgacacccctgtccacaggtcctctctccagtcgcctctgcctgctgcttctcagtgaccatcgctgacatctgtgtccactgtgcctctctctaatcatcattcaccagctctcttgctccttctccacccctgaatctaagcctaggtctgtgaccgtccccatccatctttgacattgctgtccaccactcttctctccagcagcctctgtccatctctcctctctagcttcctctggccacctttccctttctctggccatctctcccactgctcttgccctcctcccacccctgaccctaactcccagtctgcaactgtctgaccatctctggccacctctcctctctctctcactcactgatgccctctgatcatctctggccacctcttctctctctctcactcattgatgccctcttgatcatctctggccacctcttctctctttctcactcactgatgccctcttgatcatctctgcccacctcttttctctcgctcgctgatgccctctgatcatctctggccacctcttctctctctctcactcactgatgccctctgataatctctggccacctctcctctctcacttgctgatgccctctgatcatctcgaacatctctgctgcctttcctctctccgatgacctctccccgcaccatcctcctgagcagctgtcctgggctcccactgactctgccatgtctgtccttttcctcctctctgaccaccttgctggctttgggccgtttctgaccacgtgtctctgacatggtcatctcccccagatctgagcccaacccatgccctcccttctctttgtccactgctcatcttcctgaccatctgtaaccccttctcttctctggtcatatctgaccacttctgatcattgttgccaccctggctgccccgtctccccatggccagcttttaccatctctgaccacgtctaaagccctctggttttcctgccactcacccagaccagctgtcatttctctgaccatttctttacttttttcttttggagagacagagtcacgctctgttgcccaggctggagtgtggtggcgcaatcatagctcactgcagcctcaaattcttgggctcaaattgatcctcccacctcagtgtcccatgtagctaggaccacaggtgggcgccaccatgcctagctaatttttaaaaatttttgtataatagatacacggtctcactttgttgcccaggctggtcttgaactcctggcctcaagccatcctcctgcctcagcctccccaaatgctgggattacatgtgtgagccaccgcgcctggccttcctctggcttttggtcacatctgacggtctttgaccagcccttctgccctcagcccactgtgaccttctctcctggtctcagaccacccccagcccctgcagaacccctcttctgccctcacgcctcccctcttctccgcaggacacccctgcccgcgatggccatcctcccgttgctcctgtgcctgctgccgctggcccctgcctcatccccaccccagtcagccacacccagcccatgtccccgccgctgccgctgccagacacagtcgctgcccctaagcgtgctgtgcccaggggcaggcctcctgttcgtgccaccctcgctggaccgccgggcagccgagctgcggctggcagacaacttcatcgcctccgtgcgccgccgcgacctggccaacatgacaggcctgctgcatctgagcctgtcgcggaacaccatccgccacgtggctgccggcgccttcgccgacctgcgggccctgcgtgccctgcacctggatggcaaccggctgacctcactgggcgagggccagctgcgcggcctggtcaacttgcgccacctcatcctcagcaacaaccagctggcagcgctggcggccggcgccctggatgattgtgccgagacactggaggacctcgacctctcctacaacaacctcgagcagctgccctgggaggccctgggccgcctgggcaacgtcaacacgttgggcctcgaccacaacctgctggcttctgtgcccgccggcgctttttcccgcctgcacaagctggcccggctggacatgacctccaaccgcctgaccacaatcccacccgacccactcttctcccgcctgcccctgctcgccaggccccggggctcgcccgcctctgccctggtgctggcctttggcgggaaccccctgcactgcaactgcgagctggtgtggctgcgtcgcctggcgcgggaggacgacctcgaggcctgcgcgtccccacctgctctgggcggccgctacttctgggcggtgggcgaggaggagtttgtctgcgagccgcccgtggtgactcaccgctcaccacctctggctgtgcccgcaggtcggccggctgccctgcgctgccgggcagtgggggacccagagccccgtgtgcgttgggtgtcaccccagggccggctgctaggcaactcaagccgtgcccgcgccttccccaatgggacgctggagctgctggtcaccgagccgggtgatggtggcatcttcacctgcattgcggccaatgcagctggcgaggccacagctgctgtggagctgactgtgggtcccccaccacctcctcagctagccaacagcaccagctgtgaccccccgcgggacggggatcctgatgctctcaccccaccctccgctgcctctgcttctgccaaggtggccgacactgggccccctaccgaccgtggcgtccaggtgactgagcacggggccacagctgctcttgtccagtggccggatcagcggcctatcccgggcatccgcatgtaccagatccagtacaacagctcggctgatgacatcctcgtctacaggtgcagggtccaggcactggggtagcttgggtgggggagtgaggcaaggggagggttgagggtacacctactaataccctacaccgaagcacaactgataagtgatgctggaaggttccaaaagaaatcagagagcaaaagtaaaagaaatcaggcagcaaggataacaagactctggcagaaagggtcaatgaaatctgacagcagtgataaaaagaagtcagacaagaaggacgaagtaaatgagacagcaaatgttaaaatatatcaggctacagggctaaaaaagatcaagcaataaggataaacgaaatcaggctgcatgagtaaaaagaaattaggcagcaagaataaatagtagtagcaaacataaaaaggaaaccaggcagcgggaggagaaagtaatcagggcagaagaataaaatgttaatgggcaagggtgggtggggaagataaggggataaaaataaatttaagttgtaaagataaagagagaaacaccaggttttccagatgacaggactagatactagctgggctgcaggaagaaaaggagatcaaacaggaaagcacagggagcccagaaacaatgaaataagcagctctgttagaaaaagaaatcagaccagaggttagaaggaaattgcagggaggaggttcgatagagactgggcttcggtgtgtgtggtgtgaactattccatgtttcaagttctaatatagtgacatccagatttttttttttttgagacagggtctcactttgtcgcccaggctggagtgcagtggtgcaatctcggctcactacaacctccacttcccgggttcaagcgattcttgtgcctcagcctctcgagtagctgggattacagacgtgcaccagcacgcccagctaatgtttgcattttatttttagtggagacggggttttgc[135 bp omitted]agtctcactctgttgcccaggctggagtgcagtggcacaatcttgactcactgcaagctccgcctcccaggttcatgccattctcctgcctcagcctcccgagtagctgggactacaggcgcccgtcaccatgcccggctaattttttgtatttctagtagagatggggtttcaccatgttagccaggatggtctcgatctcctgacatcgtgatccacccgcctcggcctcccaaagtgctaggattacaggcctgagccaccgcgcccgacagattttttattttctaaatcaaatcaaacctagttcaagttccttttgccaggtaaacagaaatatccagtttgccacacttgtgggggattctcttctctctcctgttgttgcaaacacagaacctggggtttacacactccaagaggtggctcagtccaacttgttcccccaagctggagagcactcagcacatctgcagtgaccgcatgtggtcagcagtggtggctgctgacctaggtgctgttgacacctcttaccaaagtccaaccttgcatggatggactgcggctgtgggtgagtccctgtcctcacggccaggctgggccaagggtgcagccccaaggctgactgtaaagactggacctccccagggttgaggactgttccttggggacctagtagtacctggatgtcctttccctcccttggggccaacacctcaagaaaaggccacttgatttccatttcagtcctggcaacccactgagctcattctactccctttctcagacatgactcggaagattgcacggaagtcctgcccctgaaaatcacacaagtcggccaggcgcggtggcttaacccctataatcccagcactttgggaggccgaggcaggtggatcaccaggtcaggagtttgagaccatcctggctaacacggtgaaacctcgtctctactaaaaatacaaaaaattagctgagtgtggtggcacgcgcctgtagtcccagctactcaggaggctgaggcaggagaattgcttgaacctgggaggcggaggttgcagtgagccgaggctgtgccactgcactccagcctgggtgacagagtgagactccgtctcaaaaaaaaaaaaaaaaagtcacacaagtcctggccaccttgccaggtggggaatgggatgaatgctgtcctagacagtcaccctgccccaggcggccacggagttccctgtacctctctcattagaatagcctaggaataaaacaggtgataagtcaactctccaacagggtgcccaactacaaaagaaactatagtgaaattgggtggtaaggattaaaaggaaacaagaaagaaaaagataaatagaaaccagccaacagagataaaagagaagcaggtgacagagccggaaagaaataaggcaacagggagaaaaagaaagcagtagtgacggaggcacattagtttaatgaaaagggaatcagacgacaggactcattggaaaacaggctatcaatacagtcatcataataaggcaatagggctagggggacatttattggcaggttacaaggaaatcgggcaacaggggtacagggagatcaggtggtttgattggagagaatcctagctgtacactagaggaaaatcaggcagctggaaaagggaaatttggcataggctgcaggaaataggggaaccagagggaaattggcaagcgtctggaggagactgggaggtaaaatgtgggggaaattggatgggggtggctagaagacaaaaggattaaattagatggaaattggacagggttagagcagaattgggtggtgaactggagagatgactggcagtgggaccagagtgaaatcaggcagaggattggggcaaaattgggcagggaggctagagcggagctgggctgcaggctggagggaaattgagtgggcagtgcaaaagggaaattgggcagttgggtataaaatgaaaccggcaaggtgtggtggctcacgcctgtaatcccaacacttaaggaggccaaggcaggaggctggactgccttgaggccaggagtttgagaccagcctgggcaatatagcaagagcctgtctctacaaaaaatttaaaaattagctgggcatggtagtgcacacctgtagttcctgctactcaggaggctgaggccggaggatggcttgagtccaggagtcagaggctgcagtgagctgtgatcatgccactgcactccagcttgggcaacagagcaagaccctgtctataagaaaacagaaagaaagaaagaaaagaaacaggatggattggaagaactcacgtggtgagctgttagagaaattgggtggtgggactagagtgaaaatgggcagcaggctatgaggacgtgtgagagggtgggctagagtgaaattggccaacagactggaggggtatcagtcaggtggctgaatgggatgtcagaccaaagggaattgggatgttggtgagagggagctcattgggtagaatgaaatgaaggagtggactggtgggaagtctagccccgcagggagtttggtgggggaagcacaggttgggggctgggcagcctgagacctgacccccacctgcctgccctgcaggatgatcccggcggagagccgctcgttcctgctgacggacctggcgtcaggccggacctacgatctgtgcgtgctcgccgtgtatgaggacagcgccacggggctcacggccacgcggcctgtgggctgcgcccgcttctccaccgaacctgcgctgcggccatgcggggcgccgcacgctcccttcctgggcggcacgatgatcatcgcgctgggcggcgtcatcgtagcctcggtactggtcttcatcttcgtgctgctaatgcgctacaaggtgcacggcggccagccccccggcaaggccaagattcccgcgcctgttagcagcgtttgctcccagaccaacggcgccctgggccccacgcccacgcccgccccgcccgccccggagcccgcggcgctcagggcccacaccgtggtccagctggactgcgagccctgggggcccggccacgaacctgtgggaccctagccaggcgcccccccctctaagggtcctctggccccacggacagcaggacccggacaccctgtgggacctggcctcaaactcaccaaatcgctcatggtttttaaaactctgatggggagggtgtcggggacaccggggcaaaacaagaaagtcctatttttccaagcttgggcgaagacccttgccctcgtctctgtctatgggggttgggggacggagcaggggtctggagctggggaatgcctcctttggggagacaccccctccccgcccagttcagtctgaggaccccggaggaggctgaggatggcgatccattcagacaatagatgttccctgcgtgtcggctctgagcatgccctgggttgggggatgctgtggtgatccagatagccctgagccctgcccgcaggggcctaaagtcaaatgggagacagacacatccccagacagtgatagcacagagtgaccagggatgtggggatgagggaagcctgggggattgtgacagtccagaagaggtacccttgctcagccccaggtgtggtcagggagggcttcctggaggaggacacatgtgatctgagaatgacatatgaaggagataactgggcaaagagcagaaggaaagctctttcaggcagagggcacagcacaagcaaggtggtggtgtgccctgggcactgggggtgctatggtagaggtgaggcaggagggttgagcagggtctaggacctccaggctgaggagctcagactctggcctgatgataccagggagccatggagggttgtatgcaagggaggaatggggtcagtttggggcttcaggaagatccttctagtgctatgagtagggtggacccaaggggaagactgaagctgggagccccaggggaagctggggcagggacctgggtgggtgaggacgaagttggaccagctgggctagggaacaagaaaagggagtgggttgacagagacactcgggaaactgtgggaagctgaggcggtgggttatggagctgcggggccatggggtggggcaggaagatggtggggactgccctcatataggaccagggaggaggagcaggtttgggaaagatgatatggccagtggggaacttggtaggtgtagggggccctgaggatgtccaggatgtggcattcaggagggtgcaggacccctggtctgaggctgaagctggaaatagaaatgagggctttgtcagcagagatgggaactgacgctgctggggttaagacggcttcttgtgggggatgattccaagtccccactatgggacattttttcttttttcttttttttttttacagatggggtctcactatattgcccaggctgatcccaaactggcctcaagtgatcctcccgtctcagcctcctgaattgctgggattacaggcatgagccactgcccctggctagggactttccatatttaagggtgacgcaaagaaaaacctaaccaagactaaacaggaccagcaggcagagggacagggggaagaagaccaagcaattcagacccaagaaactcttgtgttcaatgatataaataaaggctgcggtgaccccccagagagcagtgttagggggtcagttggggcagatggcagattcagctgatttgagaggagggggtaagaaaatgtagctagagggtgcagcccctgtcaacctgtgggcctggagtcccatgtctttgcagggtgggtccttactctgtcttgggcagccctaggccccatgagacaccaagcctggaggtttgcagaaccaaaccccggtctaggagatgttgagcctccttggagatccaggaacggggttggcagtaagaggaatagcaccccctgaactcagggcttcactaatgatgtccccagaggcaggagagtggagggaagctgggtcctgtcacctggagggacactggtgtgagggcatggtaaagagagcccaagactgaactggcccttttcatgacctggggcacatgattgtgacctcgtgggatgacatatcctagattctgccacagcttttctggggggtctaggccttgaacatgttatgccatgagtcatgggaccagcctgagtcctgggggacctcgtctgaccacaccctactccccaagtccccagcagtatcatgagatccttcttgttgtttgttagccttggacagctgaagtcaggtgacgtcatcaagaagagtgagggcatgagtcctggggaaaggggcctaggagcaggggcatagtgtttcgagactgtggtcccagctactcgagaggctaaggtgggaggattgcttgagcccaggagttcgaggctgcagtgagctaggattgcgccactgcactgagcccaggagttcgaggctgcagtgagctaggattgcgccactgcactccagcctgggccacagaacgacaccctgtctccaaaaaaacagaaaaggagcctaggaagtgaggatgctgggggcctagtgctggctacaattaccagttgctcccatgagggggagccagagggcactgttcgtgtgtgtgtgtgtgtgtgtgtgtgtgtgtgtgtgtgtgtcgaagtctcttgtcgcctaggctggagtgcaatggcgcgatctccgctcactgcaacccccgcctcctgggttcaagcgattctcctgcct[450 bp omitted]ccacacccagctaatttttgtatttttgtagagatgggggtctcactgtgttcccatactggtcttgagctcctgacctcaagtggtcctcccaccttggcctcccacagtgctgggattacagatctgaccgtagatgttaaataatcacaccagcaagtgtaagcatctgcagtgaccaaggggcgccatgcaggagacacatacagaagtgcgcgaccctgtaaccaggggccctgacccaacaagagagattgaggaaggcttcctggaggaggggaggcctggcggagacctgaaggatgcgcaggttggagttaaccatgaaaggggtgggaagggtattccgtgcaaatggaagagcctgtgctgagggaagcatgagtgaaagagctgaggccagggggctgaagtaggggagggaagggaagagagtgaccttgggttgaggctggaaagcaggaagggagccgatgacgcaggaccccgtaggctgctgggaggagtgtggattgtcctctaagtggcatgagaagccattgaagggttttttggttttttttttttttgagacggagtctcgctgtcgcccaggctagagtgcagtggcacaatcttggctcactgcaacctccgctacccgggttcaagtgattcttctgcctcagcttcccgagtagctgagattacaggtgccctgccacgacgcccagctaatttttgtatttttagtagagacttcttcaccatgttggccaggctggtctcgaactcctgacctcatgatctacctgcctcggcctcttaaagtgttgggattacaggcggcatgagccaccccgcctggcccattgaagggttttgaggtctaatgagagtagcagtccctgatctcaaggaagctctgtggggaggaggatactgcaatagtccaagcagaagggtgatccggaccaagttggggcctgaagtggttgaagagagatttgagacgaccttactagaggcctctgccccccacccagcagacagtgtgccctactgtacagctacccagttctgcagcaagattgcagagatgggaagaagagttgtaagacactgggctctgatatccacagctccaccccttagatgggggagggacttctgtgtagcatgggaatgacggaccttttccaggctcaagtagcaggcagacagtggatggaggctgagaggcagtgggtggtcagggggaatgtggacacaggaaatgcagggctggaagggggacacacacttggtagtagcttattacaaatatggaagcaggaaggatgggaggagggcagactggtccctctagcatgggtcccccatgttcccccacagcatgcctggaccacccccacccgcctgcagaaacacacaatcacatgtgtctaggatttaaagttaaaattttgcttgtcagctaggcacagtggctcatgcctgtaatcccagtgctttgagaggccaccctcagggaggattgcttgagcccaggagttcaagaccagcctgttttcaactccgtggaccctgtgaggcacacttcactctccccagccctctggataaaacagtagttccttaggaactttaacttcccccaaaatgctgtggcctcccaggcaacatagccataccccatctctacaaataataataataattagcttgtccaactgcctagctaagtccatcaatttcctgagctcagggagtacaactacttctactgtcaattcctcatcaattcctcatctgcttttggccccacacattttttagaccaaagctccggctgctggagcattatcttgaagtgactgtagacccaataccaggattctgccctgtctgtgtactgccagatccaacccatgtgtcttggggtggctaaatctgacaaaggccctgagtgtctggggacacctgtgatctcctgcaaggctgaggctaatgccacgcttttgcagctctttgcatgggcacatatgtgagagaatcagataaaaggtgttcccaaaaaggatgtttgtgttcagggtggaacctgacgcctgcctcctgcctttgggtcctccctgatggctgtgccctctcatacctcgcaaaagcaaagataggtatcagtgctgcctgtcgtcctgacctgtgcggagtgacgttgggaacattgtggtgaccaacacagccctagcccttgccctcagagttccagttcaaggctgggagcagtggctcatgcctgtaatcccaacactttgggaggccgaggcaggtgggtcacttgaggtcaggagttcgcaaccagcctggccgacatggtgaaaccccaactctactaaaaatacaaaaattatccgggtgtgatggcaggcacctataatcccagctacctgggaggctgaggcaggagaatcacttgaacccgggaggcagaggttgcagtgagccaagattgggccactgtagtctagcctgggcaacagagcgagactccgtcccaaaacaaaccaacaaaaaagagttctatttccagtggaggaaatagataatcacaaaacaatggcatcccagagtggtcggggatggggaaagaacaggcaagaatgatcagggcttttgcagaagcccaggggactcccagagccagagggttctacacttgatcttagccaaaaggccaagaagcaatctgaagtttctaactgggcctgggatgggaggtggggagacagtccaagatttcctgaggcagggccagctttatggcagtgtgactgtggggttgcaccatgccccaaacttagaagtaccctatgcttgctttaatgccctagtgtcactatcttgaaattaataatttttgaacaagggccccacattttgattttgcactgcgccctgcaaattatgtagccagtcctgcccggaggagcgaacacttgagggatttacagagagagccgaggcagagagggtcttcccaggagagagagcattgggtacaaaagccaagagagggccaggcgcagtggctcatgcctgtaatcccagcactttgggaggctgaagcgggcgaatcacctgaggtcaggagttcaaaaccagcctggcaaacatggcgaaaacccgtctctactaaaaatacaaagaattacctggacgtggtgtcaggaacctgtaatcccagctacttgggaggctgaggcaggagaatcgcttgaacttggaaggcagaggttgcagtgagcccagatcctgccaccgcacactagcctgggtgacagagtgagattccgtctcaaaaaaaaaaaaaaagaaaaaagagaggactgcacactcaaagaatgagccagagttcagtgtggctggcgcaccatgggagaagggcgcactgtggggccatggagggtggagggtgataaggtggagggacagggtcaggtttgcactttagaaaaatccatctggcagctgggcgcagtaactcacacctgtaatcccagcactttgggaggccaagacgggcggatcacctgaggtcgggagttcgagaccagcctgaccaacatggagaaaccctgtctctactaaaaacacaaaattagctgggcgtggtggcacatacctgtaatcccagctactcgggaggctgaggcaggagaatcgcttgaacccaggaggcggaggttgcggtgagccaagattgcaccattgcactccaacctgggcaacaagaatgaaactccatctcaaaaaaaaaaaaaaaaagaaagaaagaaagatccatctagctaccatggggagggtggatgggggcacaaggccagggagaagatgggggactcagctgcctgtggaaggagctgggagtgtgggtgattctgaggaggagaggccagcatgggcacgtttaccagaaccttgggtaatagacatcccagtgcaggagacgagctgggagaccccaaaaccacgggatgaacccagagcctcattttcacttgcaaatgtttaccgtgggtggcgggggatgcagaagggtaggttacagaatgtcactcactggtaagtacttgaaaatctttttatatgaaaactcgcatggatagactgatggaggtgaatgcaaaattggcaagaatttcgagtataaaatgtgagatttcaaaggactttcttctggatatgttctggcttcaactccatagacccccggggtgcacttcactctccccagccctctgggtaaaacagcagttccttgggaacttcctcttcagcttcccctaaatgctgtggcctcggggagctgggaatgagccccttcctgcctctgtactcacattcagggacatcgacccctaacacctgtttttcttctctgttggcaaccttcatatttcttttcttttctttctttttttttttttttttttttgagatgaagtcttgctgtgttgtccaggctggattgcaatggcgagatctcggctcaccacaacctccgcctccctggttcaagtgattctcatgcctcagcctcccgagtaggtgggactgcagacgtgtgccaccaagcctggctaatttttgtatttttagtagagacggggtttcaccatgctggccaggctggtctcaaactcctgaccttgtgatcctcccgcctcagcctcccaaagtgttgcaattacaggcctgagccacctcaccaggctacaacctccatatttccatcctcaaccccagcatctctcctaagtccagacctggcttacctcagtttcccggacccctcttcctggacatcccctggggcccctcacacccactggatcccacacccacctcggcttcttctcggacctatgcctccttctaggtcctgtctgggagagcaacccccatgcagcctcctgaatgtcccccacctccccttcctccctgccccggccccatcctgggctagttctggcctcacccatctgggtccttgcactgggctcctggcctcagtctcttctctggtccaggatcttcctaaagccaaaccctcctctgtataggcacccccatggctccccagggttcctgggacagtctgagctcctcagcctctagcatcccagcccttcccacgccatccctcttccccagctctgtttctagcacatatgtttgttccccacctcaggcaggaaggaaacactaaccacatcctctgcttgtgatgaaggaggatcttaagcaagtgacagatgaagctattgaaggaaagtgggttccagctgggcgtggtggctcatgcctgtaatccctgcactttgggaggccgagttggatagatcacttgaggccaggagttcgagaccagcctggccaacatggtgaaaccctgtctctactaaaaatacaaaaattacttgggcgtggtggcacgtgcctgtggttccagctaccccggaggctgaggcaggagaatcgcttgaacccaggaggcggaggttgtagtgagccgagatcgccccattgcactccagcctgggcaacagagtgagactctgtctcaagagaaaaaaaaagaaagaacatgggttccttcttgaatgctccccttattcctcccaccaaaggtaacgttctgggggagaaggaggcctgggtgcagctactagcatctgggggagaggcagttggtaactgtacccagggtcccttgcttctccatttctggagatccatccttgccctcctctccgagatcctcctagaaggctgtagctccattgttctcagcttctgggaagccgagaggacgttctgggaagaagaaagtgatgtataggccattgttttctcacgggaacctctgtccccaaatcctccagacctccacatccaggcacctggtgccctctcctgcctctgtctctggtcacttccacaatccaggagcccaggcgtctagcttcctccttcctcaggagttcaggtctgcagtcccctccttcctcaggcacagaagccccatctccactcccctccatcctcagaacacaggctcccggcccccttcct[137 bp omitted]cggtgaaaccctgtctctactaaaaatacaaaaaaattagccgggcctggtgacgggcgcctgtagtcccagctactccggaggctgaggcaggagaatggcctgaacccgggaggcggagcttgcagtgcgcggagattgcactactgcactccagcctgggccacagagcgagactccgtctcaaaaaataaaaataaaaaaaacttctctctcagcaggctcaggagtcctccccctccccgcactggccctgccacctcttttctaatttatctatttattttttattttttttgaggcagagtctcgctatgtcacccaggctggagtgcagtggcacaatctcagctcactgcaacctctgccaggttcaagcaattctcctgcctcagccttccaagtagctgggactacaggcacccgctaccacgccaggctaatttttttgtatttttagtagagatggggtttcaccgtcttagccaggatagtctcgatctcctgatctcgtgatccacccgcctcggcctcccaaagtgctaggattacaggcgtgagccaccgcgcctggccttacttttttatttttagagactgggcctcactctgtcacccaggccagagtccagtggcaccatctcagttcagtgcagccttgatctccctgggtcaagcaatcctcccacctcagcctcccaagtagctgggaccacaggtgtgtgccaccacacccggctgtgcccctcttgtcttaggatggtctt

SEQ ID NO: 37 - DNA, 2495 bp, Homo sapiens
tctctgagcgcggcccctcccccctgcgcccccgcctgcgctgcggtgcccccatcccgcgtgtcccagtctgtctgaccgtccctccgctcccaggcctcgccccacccggccctggggctgcccggtcgcccccctccccaccgcagccggtcccctccctcccagtcagcctccgccgcagcccaggaagccagccgggacgccgccgccccggaccccgcgccctaacctccacctcgggggcctgcacccccagattgaatcgggaattccggaaacccgagcctggaaccctgatctgggaccagcaccccgagatccggccgtggaaccccaagatctggagcctgaaccccagtatatggggctggaatctcaacatcggtcactgggacctcaatatttggagccggaaccccacaatttggaacacagaccccaatatttggagcagaaccccaagatttgacatctaaaacctcaagcctggagctgaactctgaattctgggcctgggaccttgaaatctgggactggatttccagtactgtaccctggaacccactcttggggacctgaaccctgggattcaggcctcaaattccaagatctggactgtgggattccaaggggcctgaacccgagtttgggcctgaagtccttgctgcagacctgagtgcttaaatctggggcttgagacctcccaatcttgactcagcaccccaatatctgaatgcagaaccccgggatcggatctcagactctaaaccccaccgtttggctgcttagcatcccaagactggacctgggagaccctgaccctgaacaacccaaactggacccgtaaaactggaccctagaggcccaatatttaggggtctggaaccccgagtattaaggtctggagactccgttgccacagatttgagccgagtcaggacacagtccctctacagaagccttggggacaggaaaagcatgaccagatgctccctccagagccctgacctctgactcccctggagctaggactctgctccctggggctgcttctagctcaggacacccctgcccgcgatggccatcctcccgttgctcctgtgcctgctgccgctggcccctgcctcatccccaccccagtcagccacacccagcccatgtccccgccgctgccgctgccagacacagtcgctgcccctaagcgtgctgtgcccaggggcaggcctcctgttcgtgccaccctcgctggaccgccgggcagccgagctgcggctggcagacaacttcatcgcctccgtgcgccgccgcgacctggccaacatgacaggcctgctgcatctgagcctgtcgcggaacaccatccgccacgtggctgccggcgccttcgccgacctgcgggccctgcgtgccctgcacctggatggcaaccggctgacctcactgggcgagggccagctgcgcggcctggtcaacttgcgccacctcatcctcagcaacaaccagctggcagcgctggcggccggcgccctggatgattgtgccgagacactggaggacctcgacctctcctacaacaacctcgagcagctgccctgggaggccctgggccgcctgggcaacgtcaacacgttgggcctcgaccacaacctgctggcttctgtgcccgccggcgctttttcccgcctgcacaagctggcccggctggacatgacctccaaccgcctgaccacaatcccacccgacccactcttctcccgcctgcccctgctcgccaggccccggggctcgcccgcctctgccctggtgctggcctttggcgggaaccccctgcactgcaactgcgagctggtgtggctgcgtcgcctggcgcgggaggacgacctcgaggcctgcgcgtccccacctgctctgggcggccgctacttctgggcggtgggcgaggaggagtttgtctgcgagccgcccgtggtgactcaccgctcaccacctctggctgtgcccgcaggtcggccggctgccctgcgctgccgggcagtgggggacccagagccccgtgtgcgttgggtgtcaccccagggccggctgctaggcaactcaagccgtgcccgcgccttccccaatgggacgctggagctgctggtcaccgagccgggtgatggtggcatcttcacctgcattgcggccaatgcagctggcgaggccacagctgctgtggagctgactgtgggtcccccaccacctcctcagctagccaacagcaccagctgtgaccccccgcgggacggggatcctgatgctctcaccccaccctccgctgcctctgcttctgccaaggtggccgacactgggccccctaccgaccgtggcgtccaggtgactgagcacggggccacagctgctcttgtccagtggccggatcagcggcctatcccgggcatccgcatgtaccagatccagtacaacagctcggctgatgacatcctcgtctacag

SEQ ID NO: 38 - protein, 466 aa, Homo sapiens
  VARIANT (1)...(466): Xaa = Any Amino Acid
MAILPLLLCLLPLAPASSPPQSATPSPCPRRCRCQTQSLPLSVLCPGAGLLFVPPSLDRRAAELRLADNFIASVRRRDLANMTGLLHLSLSRNTIRHVAAGAFADLRALRALHLDGNRLTSLGEGQLRGLVNLRHLILSNNQLAAAGALDDCAETLEDLDLSYNNLEQLPWEALGRLGNVNTLGLDHNLLASVPAGAFSRLHKLARLDMTSNRLTTIPPDPLFSRLPLLARPRGSPASALVLAFGGNPLHCNCELVWLRRLAREDDLEACDPALGGRYFWAVGEEEFVCEPPVVTSPPLAVPAGRPAALRCRAVGDPEPRVRWVSPQGRLLGNSSRARAFPNGTLELLVTEPGDGGIFTCIAANAAGEATAAVELTVGPPPPPQLANSTSCDPPRDGDPDALTPPSAASASAKVADTGPPTDRGVQVTEHGATAALVQWPDQRPIPGIRMYQIQYNSSADDILVYX

SEQ ID NO: 39 - DNA, 3035 bp, Homo sapiens
cttgggaaggagcccctctggcctgaaagatcaagcctattgctgggcatggccagtcagcctccgccgcagcccaggaagccagccgggacgccgccgccccggaccccgcgccctaacctccacctcgggggcctgcacccccagattgaatcgggaattccggaaacccgagcctggaaccctgatctgggaccagcaccccgagatccggccgtggaaccccaagatctggagcctgaaccccagtatatggggctggaatctcaacatcggtcactgggacctcaatatttggagccggaaccccacaatttggaacacagaccccaatatttggagcagaaccccaagatttgacatctaaaacctcaagcctggagctgaactctgaattctgggcctgggaccttgaaatctgggactggatttccagtactgtaccctggaacccactcttggggacctgaaccctgggattcaggcctcaaattccaagatctggactgtgggattccaaggggcctgaacccgagtttgggcctgaagtccttgctgcagacctgagtgcttaaatctggggcttgagacctcccaatcttgactcagcaccccaatatctgaatgcagaaccccgggatcggatctcagactctaaaccccaccgtttggctgcttagcatcccaagactggacctgggagaccctgaccctgaacaacccaaactggacccgtaaaactggaccctagaggcccaatatttaggggtctggaaccccgagtattaaggtctggagactccgttgccacagatttgagccgagtcaggacacagtccctctacagaagccttggggacaggaaaagcatgaccagatgctccctccagagccctgacctctgactcccctggagctaggactctgctccctggggctgcttctagctcaggacacccctgcccgcgatggccatcctcccgttgctcctgtgcctgctgccgctggcccctgcctcatccccaccccagtcagccacacccagcccatgtccccgccgctgccgctgccagacacagtcgctgcccctaagcgtgctgtgcccaggggcaggcctcctgttcgtgccaccctcgctggaccgccgggcagccgagctgcggctggcagacaacttcatcgcctccgtgcgccgccgcgacctggccaacatgacaggcctgctgcatctgagcctgtcgcggaacaccatccgccacgtggctgccggcgccttcgccgacctgcgggccctgcgtgccctgcacctggatggcaaccggctgacctcactgggcgagggccagctgcgcggcctggtcaacttgcgccacctcatcctcagcaacaaccagctggcagcgctggcggccggcgccctggatgattgtgccgagacactggaggacctcgacctctcctacaacaacctcgagcagctgccctgggaggccctgggccgcctgggcaacgtcaacacgttgggcctcgaccacaacctgctggcttctgtgcccgccggcgctttttcccgcctgcacaagctggcccggctggacatgacctccaaccgcctgaccacaatcccacccgacccactcttctcccgcctgcccctgctcgccaggccccggggctcgcccgcctctgccctggtgctggcctttggcgggaaccccctgcactgcaactgcgagctggtgtggctgcgtcgcctggcgcgggaggacgacctcgaggcctgcgcgtccccacctgctctgggcggccgctacttctgggcggtgggcgaggaggagtttgtctgcgagccgcccgtggtgactcaccgctcaccacctctggctgtgcccgcaggtcggccggctgccctgcgctgccgggcagtgggggacccagagccccgtgtgcgttgggtgtcaccccagggccggctgctaggcaactcaagccgtgcccgcgccttccccaatgggacgctggagctgctggtcaccgagccgggtgatggtggcatcttcacctgcattgcggccaatgcagctggcgaggccacagctgctgtggagctgactgtgggtcccccaccacctcctcagctagccaacagcaccagctgtgaccccccgcgggacggggatcctgatgctctcaccccaccctccgctgcctctgcttctgccaaggtggccgacactgggccccctaccgaccgtggcgtccaggtgactgagcacggggccacagctgctcttgtccagtggccggatcagcggcctatcccgggcatccgcatgtaccagatccagtacaacagctcggctgatgacatcctcgtctacaggatgatcccggcggagagccgctcgttcctgctgacggacctggcgtcaggccggacctacgatctgtgcgtgctcgccgtgtatgaggacagcgccacggggctcacggccacgcggcctgtgggctgcgcccgcttctccaccgaacctgcgctgcggccatgcggggcgccgcacgctcccttcctgggcggcacgatgatcatcgcgctgggcggcgtcatcgtagcctcggtactggtcttcatcttcgtgctgctaatgcgctacaaggtgcacggcggccagccccccggcaaggccaagattcccgcgcctgttagcagcgtttgctcccagaccaacggcgccctgggccccacgcccacgcccgccccgcccgccccggagcccgcggcgctcagggcccacaccgtggtccagctggactgcgagccctgggggcccggccacgaacctgtgggaccctagccaggcgcccccccctctaagggtcctctggccccacggacagcaggacccggacaccctgtgggacctggcctcaaactcaccaaatcgctcatggtttttaaaactctgatggggagggtgtcggggacaccggggcaaaacaagaaagtcctatttttccaagcttgggcgaagacc

SEQ ID NO: 40 - protein, 620 aa, Homo sapiens
MAILPLLLCLLPLAPASSPPQSATPSPCPRRCRCQTQSLPLSVLCPGAGLLFVPPSLDRRAAELRLADNFIASVRRRDLANMTGLLHLSLSRNTIRHVAAGAFADLRALRALHLDGNRLTSLGEGQLRGLVNLRHLILSNNQLAAAGALDDCAETLEDLDLSYNNLEQLPWEALGRLGNVNTLGLDHNLLASVPAGAFSRLHKLARLDMTSNRLTTIPPDPLFSRLPLLARPRGSPASALVLAFGGNPLHCNCELVWLRRLAREDDLEACDPALGGRYFWAVGEEEFVCEPPVVTSPPLAVPAGRPAALRCRAVGDPEPRVRWVSPQGRLLGNSSRARAFPNGTLELLVTEPGDGGIFTCIAANAAGEATAAVELTVGPPPPPQLANSTSCDPPRDGDPDALTPPSAASASAKVADTGPPTDRGVQVTEHGATAALVQWPDQRPIPGIRMYQIQYNSSADDILVYRMIPAESRSFLLTDLASGRTYDLCVLAVYEDSATGLTAWVGCARFSTEPALRPCGAPHAPFLGGTMIIALGGVIVASVLVFIFVLLMRYKVHGGQPPGKAKIPAPVSSVCSQTNGALGPTPTPAPPAPEPAALRAHTVVQLDCEPWGPGHEPVGP

SEQ ID NO: 41 - DNA, 2963 bp, Homo sapiens
cccaggaagccagccgggacgccgccgccccggaccccgcgccctaacctccacctcgggggcctgcacccccagattgaatcgggaattccggaaacccgagcctggaaccctgatctgggaccagcaccccgagatccggccgtggaaccccaagatctggagcctgaaccccagtatatggggctggaatctcaacatcggtcactgggacctcaatatttggagccggaaccccacaatttggaacacagaccccaatatttggagcagaaccccaagatttgacatctaaaacctcaagcctggagctgaactctgaattctgggcctgggaccttgaaatctgggactggatttccagtactgtaccctggaacccactcttggggacctgaaccctgggattcaggcctcaaattccaagatctggactgtgggattccaaggggcctgaacccgagtttgggcctgaagtccttgctgcagacctgagtgcttaaatctggggcttgagacctcccaatcttgactcagcaccccaatatctgaatgcagaaccccgggatcggatctcagactctaaaccccaccgtttggctgcttagcatcccaagactggacctgggagaccctgaccctgaacaacccaaactggacccgtaaaactggaccctagaggcccaatatttaggggtctggaaccccgagtattaaggtctggagactccgttgccacagatttgagccgagtcaggacacagtccctctacagaagccttggggacaggaaaagcatgaccagatgctccctccagagccctgacctctgactcccctggagctaggactctgctccctggggctgcttctagctcaggacacccctgcccgcgatggccatcctcccgttgctcctgtgcctgctgccgctggcccctgcctcatccccaccccagtcagccacacccagcccatgtccccgccgctgccgctgccagacacagtcgctgcccctaagcgtgctgtgcccaggggcaggcctcctgttcgtgccaccctcgctggaccgccgggcagccgagctgcggctggcagacaacttcatcgcctccgtgcgccgccgcgacctggccaacatgacaggcctgctgcatctgagcctgtcgcggaacaccatccgccacgtggctgccggcgccttcgccgacctgcgggccctgcgtgccctgcacctggatggcaaccggctgacctcactgggcgagggccagctgcgcggcctggtcaacttgcgccacctcatcctcagcaacaaccagctggcagcgctggcggccggcgccctggatgattgtgccgagacactggaggacctcgacctctcctacaacaacctcgagcagctgccctgggaggccctgggccgcctgggcaacgtcaacacgttgggcctcgaccacaacctgctggcttctgtgcccgccggcgctttttcccgcctgcacaagctggcccggctggacatgacctccaaccgcctgaccacaatcccacccgacccactcttctcccgcctgcccctgctcgccaggccccggggctcgcccgcctctgccctggtgctggcctttggcgggaaccccctgcactgcaactgcgagctggtgtggctgcgtcgcctggcgcgggaggacgacctcgaggcctgcgcgtccccacctgctctgggcggccgctacttctgggcggtgggcgaggaggagtttgtctgcgagccgcccgtggtgactcaccgctcaccacctctggctgtgcccgcaggtcggccggctgccctgcgctgccgggcagtgggggacccagagccccgtgtgcgttgggtgtcaccccagggccggctgctaggcaactcaagccgtgcccgcgccttccccaatgggacgctggagctgctggtcaccgagccgggtgatggtggcatcttcacctgcattgcggccaatgcagctggcgaggccacagctgctgtggagctgactgtgggtcccccaccacctcctcagctagccaacagcaccagctgtgaccccccgcgggacggggatcctgatgctctcaccccaccctccgctgcctctgcttctgccaaggtggccgacactgggccccctaccgaccgtggcgtccaggtgactgagcacggggccacagctgctcttgtccagtggccggatcagcggcctatcccgggcatccgcatgtaccagatccagtacaacagctcggctgatgacatcctcgtctacaggatgatcccggcggagagccgctcgttcctgctgacggacctggcgtcaggccggacctacgatctgtgcgtgctcgccgtgtatgaggacagcgccacggggctcacggccacgcggcctgtgggctgcgcccgcttctccaccgaacctgcgctgcggccatgcggggcgccgcacgctcccttcctgggcggcacgatgatcatcgcgctgggcggcgtcatcgtagcctcggtactggtcttcatcttcgtgctgctaatgcgctacaaggtgcacggcggccagccccccggcaaggccaagattcccgcgcctgttagcagcgtttgctcccagaccaacggcgccctgggccccacgcccacgcccgccccgcccgccccggagcccgcggcgctcagggcccacaccgtggtccagctggactgcgagccctgggggcccggccacgaacctgtgggaccctagccaggcgcccccccctctaagggtcctctggccccacggacagcaggacccggacaccctgtgggacctggcctcaaactcaccaaatcgctcatggtttttaaaactctgatggggagggtgtcggggacaccggggcaaaacaagaaagtcctatttttccaagcttgggcgaagacc

SEQ ID NO: 42 - protein, 620 aa, Homo sapiens; identical to SEQ ID NO: 40

SEQ ID NO: 43 - DNA, 3053 bp, Homo sapiens
atggggcccagaagggtagggttaggggcggggacggtgctggggatgctgagggtcgccctggaaacctctgggaagattttccagaggcccaggaagccagccgggacgccgccgccccggaccccgcgccctaacctccacctcgggggcctgcacccccagattgaatcgggaattccggaaacccgagcctggaaccctgatctgggaccagcaccccgagatccggccgtggaaccccaagatctggagcctgaaccccagtatatggggctggaatctcaacatcggtcactgggacctcaatatttggagccggaaccccacaatttggaacacagaccccaatatttggagcagaaccccaagatttgacatctaaaacctcaagcctggagctgaactctgaattctgggcctgggaccttgaaatctgggactggatttccagtactgtaccctggaacccactcttggggacctgaaccctgggattcaggcctcaaattccaagatctggactgtgggattccaaggggcctgaacccgagtttgggcctgaagtccttgctgcagacctgagtgcttaaatctggggcttgagacctcccaatcttgactcagcaccccaatatctgaatgcagaaccccgggatcggatctcagactctaaaccccaccgtttggctgcttagcatcccaagactggacctgggagaccctgaccctgaacaacccaaactggacccgtaaaactggaccctagaggcccaatatttaggggtctggaaccccgagtattaaggtctggagactccgttgccacagatttgagccgagtcaggacacagtccctctacagaagccttggggacaggaaaagcatgaccagatgctccctccagagccctgacctctgactcccctggagctaggactctgctccctggggctgcttctagctcaggacacccctgcccgcgatggccatcctcccgttgctcctgtgcctgctgccgctggcccctgcctcatccccaccccagtcagccacacccagcccatgtccccgccgctgccgctgccagacacagtcgctgcccctaagcgtgctgtgcccaggggcaggcctcctgttcgtgccaccctcgctggaccgccgggcagccgagctgcggctggcagacaacttcatcgcctccgtgcgccgccgcgacctggccaacatgacaggcctgctgcatctgagcctgtcgcggaacaccatccgccacgtggctgccggcgccttcgccgacctgcgggccctgcgtgccctgcacctggatggcaaccggctgacctcactgggcgagggccagctgcgcggcctggtcaacttgcgccacctcatcctcagcaacaaccagctggcagcgctggcggccggcgccctggatgattgtgccgagacactggaggacctcgacctctcctacaacaacctcgagcagctgccctgggaggccctgggccgcctgggcaacgtcaacacgttgggcctcgaccacaacctgctggcttctgtgcccgccggcgctttttcccgcctgcacaagctggcccggctggacatgacctccaaccgcctgaccacaatcccacccgacccactcttctcccgcctgcccctgctcgccaggccccggggctcgcccgcctctgccctggtgctggcctttggcgggaaccccctgcactgcaactgcgagctggtgtggctgcgtcgcctggcgcgggaggacgacctcgaggcctgcgcgtccccacctgctctgggcggccgctacttctgggcggtgggcgaggaggagtttgtctgcgagccgcccgtggtgactcaccgctcaccacctctggctgtgcccgcaggtcggccggctgccctgcgctgccgggcagtgggggacccagagccccgtgtgcgttgggtgtcaccccagggccggctgctaggcaactcaagccgtgcccgcgccttccccaatgggacgctggagctgctggtcaccgagccgggtgatggtggcatcttcacctgcattgcggccaatgcagctggcgaggccacagctgctgtggagctgactgtgggtcccccaccacctcctcagctagccaacagcaccagctgtgaccccccgcgggacggggatcctgatgctctcaccccaccctccgctgcctctgcttctgccaaggtggccgacactgggccccctaccgaccgtggcgtccaggtgactgagcacggggccacagctgctcttgtccagtggccggatcagcggcctatcccgggcatccgcatgtaccagatccagtacaacagctcggctgatgacatcctcgtctacaggatgatcccggcggagagccgctcgttcctgctgacggacctggcgtcaggccggacctacgatctgtgcgtgctcgccgtgtatgaggacagcgccacggggctcacggccacgcggcctgtgggctgcgcccgcttctccaccgaacctgcgctgcggccatgcggggcgccgcacgctcccttcctgggcggcacgatgatcatcgcgctgggcggcgtcatcgtagcctcggtactggtcttcatcttcgtgctgctaatgcgctacaaggtgcacggcggccagccccccggcaaggccaagattcccgcgcctgttagcagcgtttgctcccagaccaacggcgccctgggccccacgcccacgcccgccccgcccgccccggagcccgcggcgctcagggcccacaccgtggtccagctggactgcgagccctgggggcccggccacgaacctgtgggaccctagccaggcgcccccccctctaagggtcctctggccccacggacagcaggacccggacaccctgtgggacctggcctcaaactcaccaaatcgctcatggtttttaaaactctgatggggagggtgtcggggacaccggggcaaaacaagaaagtcctatttttccaagcttgggcgaagacc

SEQ ID NO: 44 - protein, 620 aa, Homo sapiens; identical to SEQ ID NO: 40

SEQ ID NO: 45 - DNA, 83719 bp, Mus musculus
  misc_feature (1)...(83719): n = A,T,C or G
ggcctttgtcatttattgaaatttcctgctctccctctttgggtcagctgcacctcggtcctcactctttccacgcagctttctagttataatgttgctatttataacttccctccgcaggcttctttgttaccccttttgcagtgtttgttttcctgttttctcagtactctgcccagcactgcttggttcccgaggcctcagtgatcccacaggcattgtcagtaggcgattgtttcttttgctcattaatgaaatgttcccagatgcttcagcagctgaactctgtggcttaccttctgtcctggactgtgcgatgctactcggttattttctccgagccttcaaactgtgctctcccaaaaggaggacgcactgaactgttccccaacttagaaacattattgggggaggagactcctacctacaccacagcatgtatgtggcagtcagaaaacacttggtaggaattgattctgtccctcctccatgtgacttccagggtgaggggggtgggggtcgaacaggccatcagaaggatagctgttttatctacccactgagccatctcaactggccctgactcagattttcttccacgacaaagtttccatcttacagaactgtatggcttgctaaagagaatgcctctgtgctgttagagtgggtttacaagcttgggaaggagcagctcttgagtgaggcatgagttgtgacctagcaaggttcctggaaggatgctatgatcacctctcagagtattgtctcagggcatttgaaaacctaagcatgcttactgcattcagtcgacttatttggtccgagctgactctgaggagcctgtagtcttttgggtcttgttggtctggttggtctgatgtcacagtcatttcctatcaggtaagccatgttgactgtgcatctttcagaagagaagcttctctgttagtgtgcaactttgcagtggctcttagagataccaacaagatccagcctggcggccaggcagggtggtccacatctttaatcataacactctgaaaatggaggcaggtggatccctaagttcaaggccagcctggtctgtggatcgagttccaaaacaaccaaggctatacagagaaaccctgtctcatgaaaaaaaaaaaaaatctagtcttttaaatttgtggcagaaaaatgtccatgagacttccattggctacaactcaatagaggacactgagttgatacatattatttctctagtatcacttgtatgcacgaggcggggctcttcggtgtgtatgttactttgttttgtcctctagatttagggatatacctcaagagagtagaaaagggtagtagggcttttggtttatttcttccttatggttgcatgcttaaaaagaaaactagcatgcaagcaactcccctgcagcatgcctttcagacagcagagaggctcagaagccgtccacaccacgatgggaagatgtgtggagaggctgctgtcatctgttggggactctgagtgtgacacccaacaacggcacagcagcctgatcctcttgcatgagttctttaatctctccgatgtctccagtttgtccatctctaagtgaaggatgcctaccctttgtgattatcaggaggattaaataatgcatataagtaacacacctaaagtgtcatcaggcatatgggaaataacactgaaagttaactccgtattaataagcagccttgtattttgcctttgtggtataaattggatttatataagagagactcagacagctattgtggaaaggctgacctgggagatctcagtgattagaggctcagaatgagcctgcagagtgtgggcatgtccttacttttgagatctgagtctgagcaagttaccctagccgtggcagaccacatctttcagtctcagcatattccacactgattcaaatgatcctgtgctgttagaatagggttgcaagcatgtgggagagagcagccttgccccgcatgtgccagaccttcatggagccctgaggagtgaatgctgccggaaggtcacctgggaaaccagatccaaatgagtgctgtctccgcattgaggggcaccgcctgcaaacagtgggcttcccttgggctgcttggaagactgtctaggggttttgcagatgtatttggaattaagatggggacctgcctgtgactctggccgtctgtgactggaccatgctgcctgcagagcagccctgcaactttcaaggtgtggaaagcaaagggcaaagccaaaggggagcaacaatatgtgacttatagccctttatatactccccaagaatcaagaaactgcccaagtgcgggtgcactgttcagggctcttcttaggaagcaagctaacccagagcagttgaaaatcctttgaaagtcaataaggagaaaatgacttacagcatcagctgctggaaaagttaggagctctcatgactagcgtgccaacaggtcaaaaaagcacgcggtcctgtcctctctctgtccagcttgctgtgctccaggagtgttctgctcagggtccgcttttctctgtggaagttctccatctgtaacagcctttctgttcaaacagaaactgaaatagctttggattctggcttaaaatgacgtctcctctggatctgcctaccgccccgccacaaaaggagattgctttcgtttggttcggattggtttggtatggtgtggtttggtttggtttttggcattaggcagagaatacttttaccaatgtgatttttcggcctgggcttttaagacactgtttgccacgtgaagttgcctttgctgtgtgacagactatgcagtggctacagtcttccaggcagacatgcttagacactgttttaaactctggatgcttgctcagtagtgaggcagtagagttctccttttgacgttgcaaagaccataagtatgttttaggtccttgtcttccttttggagaaagcattctcctttctcctcattcttactctgtctctgactctcccaccctcgatccctccccctggggggggggggcgggggggagaagcactatttagtttgactttgtgagttgagccacagattttgctaggatgtaacccagtgactgactgagtccaagaagcaacactcaccatctattccttatgaggtatacttatcttacctgatgctggttagtttataaagaaaatactttttcatagttctggagacagagaagtccaaggatgtagtgtcagtctctaaggagggcattcctattgcattatggcatggccaaggcatgacttgctgagcttgcctgcttgctctgtctgtctctgtctctgtctctctctatatataagataaaggcactactaccacaatgatgtcccaccctagtgacaccatacaatcctaattctctcccaaaggccttacctccaacatagattagatttggtttggttagatttagttagtcttaccaccacaccataatgacaatagtcaaattgcaacatgtaatttttgtttcagaggtacagtgaagtcatagtagtacctttatatgaggagattggagtggggaaaggtatgtgaagagagatagtggaggggtacattgaagactaataaactgaaagcattgtgatgcttgtaaggtggacacagcacagacccccagctgggctttttctccttgttcttgccattggtcccctgctcctcctcagtcaggcacagttcctgccaacagagatactcattctttgaaaactggaacttccatccaaactatgaggagtcctgagttccctggcctatctttgcctttcctgaaaggtagcaaggcatgggagcatcatgagcatcctccttgctggttaacctgaggacaaaacagaaggcatggccagccttggtgatactctgcccttgggctcctggtaccatggttgtgtctggaaagtcttacaagtacattatcaggaaaccggggaggtggctcagtggttattcacacgtgttgctcttacaggggacccaggttaggttcccagcgcaaacataatgtttcacaatcatctgtaactccagtttcccagaaatctgacatcctcttctaacctctgggtaccagacgtaaaagtggtacatacacacacacataaagtagaatgtataaatctttataaacaaatacatgtgacggccctgagtattacatgtcctcttgccttggaaagggccaaattgaggaggaggaggaggaggaggagcagcaggaggaggagcagcaggaggaggaggagcaggaggaggaggagcaggaggaggaggaggagcaggaagcaggaggaggagcaggagcaggagaaacaggaggaggaggaggaaagaaaaagaagaggaggggcaggacggaggaggcttctgcatgtttaagtactgggcaggatgctcccaagattagccacgagtctatttcaaggcttatccacacactcctccatagagtgcttggttgggttaatgaaatgagaaaggttcctttggaggtaggccactagagcctgaagacaggtcttgttggcttagtttcgaactggggaagcccatggaaatcctaggtgtggtgtttcaaataatatgaagattcttgccagagagacttacggactgatagcaaatggctttttaactctgttctagagtttggactacagttgaatacgatgttcggaaccttactccccatgggctctgacagtcacccagagcacctgttacctcccccttccctcactggcctctgtgttcccaccagtgttttccactgccttgtctaatgcttccatccttctcttctgcggtctcgttacttcttcttcccacgttggactcggaagctttagcttgctcgcttctcggagctttcgatcatgaaaggattcactgacagaagcaatcacgggctaaagggaaattagaaagaacttactaaatgcaaggaccaagctgatgtgcgaggcttgtttgtcctctcttaaagaaatgaagaggagttttaaaacgtgtggcctccgtatgcacgctgaccctggacctgtccttctgatggctgacacaggacatgttgtagcttttctgactgtttcaataaggttttgtttttattgtcttcgctgattaatggcaaggaatagaacggtctcatgggcaaaatcaatttgctttccttcgtgccctagttcacagcttccgtttcctctttttaaggttggactgccctttaaccatgcctgtgtgcccctcctctggagtggcgggggaggtccccttctttccccccatggtgctgtaattggaaatttggttactgcactaaattttaagttttggcactcatggagagcagccatccatctgctggcgagacgcactgcccggggcttttcaagaaatcccttaatagtcctgaacactaataatatttatatacatcgagatgagacaaaatttacagcaggcttctgaagctggctccaggactgtctaatcccagccctgcgttctcctgcttcctcctggaatcctctgtgctggagagagagccacacccctttcctccctgtagccacacacagatctctagagtcagtcccctagcaagcaggtcggccttcctccatcttctctctccctctctgcataccccttttttgtcctcttccacccacagaatatcagatgcgcatttgttcacagttggcatcactgagtgttaagggactcatggatctggtatatgccttaaaagaaccgttctatctgtaaagacagtgtttttaactttatggttcttagttgagaagaagttcccatcacaggcctggaacagggctcaacatgtctcaaatttagcaaatcctttgtcaaggatttctatttctctttctcatcctggaaagatgtagcatttgcatttggggggtaactgattcaagacagtgtacaaggttatttccccctgcttttatatggtatgggctttgactactatgtagctatttgacttcatcatctattgtgatgtatcattttctttcctatgtaagtaagtaaagggctccaaagttggcatctagtcctcattgataatctctgctgataacgtcgagctaacgaatcacagagcaatggtgttggcggatggctgggacagctgcaccagggagcctttagcgagttacattgaactttatgtatctgtgtgagccatagatggacagtgtaatcagtagcagattcctctcctctggctgttcttctgcccttctgcccactctggttatcatgccttcgctatacagcatgctgacctttctagtgtgagaacctaacccttgcctaaagcagggtgatttcctgctgtccgtcaatcggtgtgcctgtggtacctccctgagctggtccattttgtttccagcaacatctcagcctgtatttacatctgaggacctctgtgacgggtggtcctgatgcccctccccatcggccttcctttttcagtgccaatctcactgtctctgaagacccttccaggaacccacagtactaggaacaccctgtgcgtggtctttcctgcttccctggtgtggtatcctttccttgaggtcagggactgccaccgtacaattgtacaggatgtccagttgcctggcacacaggtgcagcgtttatccagtaaattctgggtgggtacgtaaatgccaacagatcgttgacttctgtcattgacagatttaaaaaaaaaaaaattaacacaaataacttcagtgctcatttagaccccaaaccttgatgtaacccgtgcagtgcatatgtttaattaagtcatcagactatcatcttcaactgtgtcatatattgatgtgtttgagtgaaaaaagaatcagtggtagtgtgtgaagctaaaaacatggtaggctgttaaatcagtgaactccattttactgtctttgaggtaattgctgtggtagacagtgtctgaattctgatattaggggctcctgcaggtttttgtttgtttggtttgatttttggtgtttttgttgttgttttatgttttttgtttgtttgtttgtttgttttttggtgtgaccagagataattaacttctgcttgttcctgagctagaatgggtgtccaaaaacagcctgaagctagttataataaatgaaggtcataaaccagctgagaaggctttccgtcttcacttgtgtgtggctctgaagataggtcttctgtgtggatggttcagttgcatagataaaagttggtttctcttcacctgaagaagttcaaaggtcagcagctgcagtgttagtctagagcagtggtttcagccttcttcatgctgtgactatttaatacagttccttatgttgtggtgaccccaaccataaaattattttgttgctacttcataattataactttggtactattatgaatcataatgtacgtatctgatacccatggtgtctgatatgtcacccctcaagaggatcacgacccacaggctgagaaccactggtctagagacaccagccatcttgagaggccaagttgaactcactatgttgcctcatgttccatctgagatggctgcgtgaatatctgtgcatcatttctatgtttcagccagcaagaaaaaaggagacacacactgtatttttaaaggagtgttccaggaagctctagtaaaacttttgctttatagcccatgggatgaacgaacttcaaacacagagcagccacgctctagccacagtggaggctaggaggccttggagccaaagagcatacccagcagaacacctaaaactcctacagggggagataaccagggaggggaaatgccccgatgtttctgtggagggatgactttagagtcaaatgcaagattatgtcgatttggcagtgtcacgagaactccggtctccttactgggtcatgctgctgatttaactgtttttaagggcagtgacacaggaattcttggatgtgacttagagctgtgtagacagactggtgtaaggctccagagcacatactgactccgtgcagtcagttctgaaaactgatcccagtggcgtgcagaggtgcccacaaagatggccgtactcatggaacagtaatgtgtgggcatggagggcgcgtttgatgctggggcacagctgtaacggtgagacgtagcgagattgctgtatggtggtatccactccaagtctatccagtgctttctccgtagtccaaggtttaacattcaggtatgtgtagtcatacacctgtgcacaggaagaacccgggaaagaccacgtcatgaagggttgacaaagcggctgttttgggtgcagatgaacttgtgtgttctttatgttaacctgtggttactggggcttatttggcttagttttggttttagagtagttttttttttttttaataaaacatggaatcttgactctttggtacatcacagttaaaatatacatatttatgtagttctgtagtatttccaaacaatcccttcccccaattgggtacatgtactgttagccagatttgtttgtttgtttgtttgtttgtttgttttatatgttgttcacaagtaaggatcataggcgtgtgttcatcatgacatatttacagaagtgcatagcagagtacctgttcagggtgtgattttagatctgtgattactggacctggcctttaacttaacaaggcttatagcaggtggcccctgggtacagaaaccctgtgtactaccatcctgtaccgtccagcagcttgcttgtgatctgaaggttgtgttgtgaagagacgttgcagatgcgggcattaccaaagaccttctataagcactgggcacttcgattgtagcttgttcctctttagagaccataattacttctgtgcccatggcaaagagtagtccctccgtagcctggatttctttttctggagtttgagaagagagaggccacagtcacgcagtgcttttgtaaagggtatggttaacatttgctgcagtaacctagaggttttgactagttccctgttttatttggaactttcctgttgctgtgataaaataccttgacagaaaaatggagccagagatagaggtttatcttggtgtacagtcctagaggggacagagtccttgtggtggccggggggaggggggaaggaatggctttagtcttgtcaggcaggaaacacaaagtgatcgcattccacccacacacaggaaatagagaagtgggccaggctgtaaaaccccaaacaaactctacccccagcaaaggacttcctccagctccctgctaaaggctctgtaaccttcccaaacagaccaccaccaccggcctggtgttcacatccatgaacctgtgtaggacatttctccttcaaaccaccgtacttgttatgcctcctctcttcatcactttgtatgcatgagggagaagggggtgtgcacaggccagtgttctgtgcgtggttcaggcatccactggggtcttagaatggaattctcatacagaaggagagctgaggagcacagtgccttgtatagtcctagaggcccatattgtctgtatttctctctgttcaccagtaccatgggctcccttttaatgggtgtggccactgcattttgaagagtccatgggtgttaaatgttaatggctcatcccatagcaaaccaggagtctaaaggagagaatggacttgggttgggttgtgtctttacccaagtggaattcacagacggtaagatctacgcagatttcagaggaggtgtgcttttctagccagtctccggtacgccacgctggtggtggcagcggatgacccaggggaggctgtgtagcccatcatccttaccaccctctctccctctgtcctcacagtgtgcccaagtgtgtgcgggaagcgagcctgcaccgagaacaacgagtgctgccacccggagtgcctgggcagctgccacacaccggacgacaacacaacctgcgtggcctgcagacactactactacaaaggcgtgtgtgtgcctgcctgcccgcctggcacctacaggttcgagggctggcgctgtgtggatcgcgatttctgcgccaacatccccaacgctgagagcagtgactcggatggcttcgttatccacgacgatgagtgcatgcaggagtgtccctcaggcttcatccgcaacagcacccagaggtcagcggctcttgtccctaggcccaggagggttctctgctgcatagcccctaagtgtaggacctcccaggggttcacccagatgggtctgtcagagggtgatggctgagcttgttttaatgcgaatcttggagtggtgggtctgtttcagcttgcttttttatttctaaactttgagggtgccttgctagcactagagcgtaagaattagcttgctggccaggtgctcccgagccttgctccccgtgcacctgcaaagctgaagcatgagcggtggagactttaactacagatactccttcccagcttgctactctaggccagtgaaagctttgcctctcagtctgagagagagtgaagacaaccctcaccagcattcatgaggcctggaaacaggtctcccatgtctcattgcaagcctgggctctgggcatgaactagtagtctgatctgccatgttttctgccagaacctcctttctctaagccttccaccatctttgtggcctctggttttccttcctggactctgaggcttcactgtggaagcagagctgtttctgactgaacaagctgtacttccacaaactcgtcatgggtgatgttcgtgaagacaggattttataactctggaaacacaggacagtcagaggtctgaggttgttgtttcctcccctgaacagagcagaggactttgggggaaggttccattgtaattcattccctgcctccggtactgtacacacatacacatttctgagcctctgaaaatacaactaggaagttctgaatactgcccacacttgtgagatgccctggatccagtccccaccttgtagaaggtcctagatccaatctctggcacatagaaggacctaggtccagtctccagcattgctaacaattctgtaagtatataaaatgtatagttttgctacagtcactctctataaaagatgttcagtacatcttcaaaaagaaattccattgctgctatagtatttggagatgtctctaactgtaagctgactgctggatcaaaccaaagattacattttctttcataatactaagatgaaaagtaaattcctacctgtttaatttctgcaccattatcacagtaaaaaggaaaagatcaaatatttttaaatgatttggtaagccagggactacaatgactcagaattgtataatacagtctactaaaaataagtctgccatttttttattcatgtgttggcagtctctgttagtcaactctcggttactgtaacaaaatacttagggtgatcagtttatgaagaagaggaagaggaggaggaggaggatgaagaagaggaggggggaggttggttttagctcttgggtccattgcttttggcatgtgccaaggacagacaggccttctagtaaaccctaccttgttgagctgttgactaagctgttactagataagcctttagaggccctttacatctaaataatcacttttagcatagaaaaggggtgtatgtacccctctacatcttgagccaaagacctttgtctggcagtgtgaagttgcttacccacagtccagacaatgccttccttctggggctgggagcagcaagggagagctggctggtaagagggagagctggtctcttgtgagactatgccaggggcctagcaaacacagaagtggatgctcagagtcagctgttggatggatcacagggcccccaatggaggagctagagaaaatacccaaggagcttaaggggtctgcaaccctataggtggaacaacattatgaactaaccagtaccccggagctcttgactctagctgcatatgtatcaaaagatggcctagtcggccatcactggaaagagaggcccattggacttgcaaactttatatgccccagtacaggggaacgccagggccaaaaagggggagtgggtgaataggggagtgggggggtgggtatgggggacttttgagatagcattggaaatgtaaatgaggaaaatacctaataaaaattaaaaaaaaaaaagagggagagctggccatcaaactcactatatcatatttgacctgcaagtttatttcctctccctactgaaaggcattcaactgtcctgtaacacacagtgaggatgctgtgtcttcataggagttgggtctccttccctccagtgtgctcttaaagcactgggctgctgctccctgcccgttctcacagtctctcccattttaaattaaaatactatcaagaaataatagctgtccctctgctggcctttgaagcctatttagcacttgcttgaaagtattttgaaaatactgtttgtgctctgtctatacaagagtgggttttaggaaacttaagctataatcagaacacacccttatagacatgttttcaattgctaaatgattcctagacattttaacaaagcgggaggtggctccaggttttcctatttggataaaaaaaaaatggggaaagaataaacatagtcatgttgaccctgaacgtttatttcatgtacttgtctgtagcctctttgtttgtaataccaggaagtgaggacaactcagatatctggtacaataagtaggaaagcaggcctccccacagaacatcaccaggagaggtaaaggaaggtttaacttcaagggtgttgtacattgggaagcacatcagcctcagaagccatgtgctatatgactgcctttctgtaacatttcccaaggtggcagtagaagacaccttggcagttaccgggagttagggatagtgaagtctggggcaggtcagagggcagctacaaacaggcaacacacaggaggactttgttgaagttgtcctcgaactcgattgcagtagggaatttacaggtctatgtagacagatggagaaatgcacagaacctgacacgcgtgccaggtcactgtgttatcgttatgttggatgtagcagcagttgggagcgttgggtggaaagtacacgggtgctctgtactgtctgcacgggtctgtgtatgaagctgcagttattccaagtatgtttttgtttgtttgtttgtttttagagagagctgggttttatgcgtcatgtagttaaatgagaaaaacacaaacagagcacaaagaaagttcagaaggaaacccctctccaggctagaaatgagagctgtcttagtttcttctctagtgctgtgataaaatgtcatgaccttagctgcgtatacagaagtatgtctaatttggcttgtgatttcaaagggcaggatcccagatggtggagtgaaggaaataactgagagctcagcaccagacgcctcctaatccttcccaagcagttctgttagctagggactgagccttcaaatgcatgagtctatggggccattctcgttccaacaccacaagcatgttgcatgtggtattataggaagccagatgtcccccactttggctagctaggtccacttcccatgggagcctgtgaaaacctcagccccactctcctaataggaaataggaagataacagagaactattaaggtttttaaacaaaacagactatagatagtattttgggaacggatggaagactttagtaaaggcagctcttgctttaccctgattttctttcttttcgtgaggtttcacggactcatttaagagcagtaatttgaatataacactgtcccacccattccagaagattgggtcatttttctcattcagaaatcgacccagcttctcggcccttattctgtatacaggctaaggtctcagaaggtatagccccaggcttagcatcttctctgccgtttcctaaatgatgggcaggaagcaggaagcatgccactgcttctggctccaggttgtgtgtggcactgagggtagcattcggacaaggacctcattagagagctgcggaggttcctggcttttattgtatgtgcagcaaaacaacatttggatcaatttacaagtttctgcaaagcactgtcaagatataaattcacttgtgctttagcaagaaaataatggacctgcactgcgccaggtacctgttggaatctctccctgggctttgggaattagactcctgttagtgacaaagatgcggctgtcccttccccagcgctgccagcttgcccaacctcctctggcatgcaggcaggcgagggtctcatcagtgagcagctccatttattcagagccccagagtgcctgtgagtctgtgtctcccaggtagaccagctggctccccagccacaagcctatgatacccacatgcttcttgcatgggaagtgtattctgtctaaaaacaagcgacatgctttcctcttctgcagtctgtgttccctctgtgtgtttgcagcttggatggcttgccctgggtaggagattatactgtgtgattgtttggatgtttcagcctggttctttcatgaaatgctgctgtaataacaaacaaaaagcctccttacttttctgttttgttttcttttttgtttgtttgttttaatgcaagaagataaactcacttttgtggttttggtccactctttatcttcaccagcatgtactgtatcccctgcgaaggcccctgccccaaagtctgcggcgatgaagagaagaaaacgaaaaccatcgattcggtgacttctgctcaaatgctccaaggatgcaccatcctgaagggcaatctgcttattaacatccggagaggcagtaagtactccaccccaccagaccagtggctggaccgcttcttggtttacttgcgtcgatgctcttcctggctctgtccctttagtcacaagcagaatacaggcttagaaaagcagcacgggatgtaagtaagcctcttgtgtgacgcctcccctgtgagtttctcggaaacataaaatccagatagaaagacagtcgatgtttgagccattagcccagaatatactcctgtaaagaggatcagccctcgtctttctttaagtcacatcttacgcaggaaaggcctgttctctctctctctctctctctctctctctctctctctctctctctctctctctctctcacactctctcacacacacacacactctcacactctctctcacacacacacacatacacacactcaccctctcacactctctctcacacacacacacacacacctctgatggctcagacccatggctggctcatgctagctgctgcagagtccacacttctgtaaggccagagtttgggttgcttgcctccgttgaggagactgagcaaaggaaagattaaagagtgatctcctgttttacctctcagagccagaaagatgtgccatccacacctcaagctgtggtctgagcctgcagactccctttcttcacttggtgtagacagcgctcctgggatgttgcttcagaattgtattcatgaacaacatctcccatggtggcagcagagccctgtaatcttatcttctctagtcttggactgacagagaaagtcccctagatagatgcccttcagttcctgccactagaacttctaggttgagctactagtagtttcatgaggtaaaatactataggcagaagactattattttaatctttactggtaaatctttagggaaagaaagtttttctttacttcagagacaaagtgtcctctttatttatagtggattgcttgcccctaagtatttgttaaataagtgaattatattcttagtctgtagaggtaatagaaacaaggtgggtttttttgttgtttttttttttttttttttggtttagggtttctttttgtatgtatggttttggatttttgtttgtttgtttttttctttatggggttttttgtggtagtgagtttttgaggcttgggcatttgtctgtttgtttgtttgtttctttaagattgattgattgattgattgattgatttattatatgtaagtgcactgtagctgtcttcagacaccccagaatagggcatcagatctcattatggatagttgtgagccaccatgtagttgctgtgatttgaactcaggacctttggaagagcagtcagtgctcttaactgctgagccatctctcgagcccccaagtccttagtttttattgcccattctctacccttccacaatggagggccctgttccccacacaagaacgctgacccttatgttaataaccaaattgtagttttgctcataccagatctattaattttctttgagtttattgatcccaagacatgccttttaaaattcataaaccttactgtttttatatcttcctgtcatgggagatcaatgtgattgggaaattcagcccatgaagaagaattacttactgggtgtggtgacagacaactttcatcctagtgcttctgaggcagaggcaggcagatctctgaatttgaggctagcctggtctccacagtgaagacacctttcatcctagtgcttctgaggcagaggcaggcagatctctgaacttgaggctagcctggtctacacagtgaagacacctttcatcctagtgcttctgaggcagaggcaggcagatctctgaactcgaggctagcctggtctacacagtgaagacacctttcatcctagtgcttctgaggcagaggcaggcagatctctgaactcgaggctagcctggtctacacagtgaagacacctttcatcctagtgcttctgaggcagaggcaggcagatctctgaattcgagactagcctggtctacagagtgagttcagggcggccagagcacttgtcttgcacacaggggttatagattcaattcttggggaacaaaacacaggcttagccgcagccactctttttttcaggttgaattccctgtagcccttacatacaactagcactgtatgtattttgcaagtgaggggactctgtgaggctcagacttagtataaggcttttgtcctcttctttatatcaaaccataggagaaactttcaccaaatcaaccttcaagaatcagatataataaaaatcccattcacctaatttattatagtcttagaattttgtcatgaaccaaagtttatgttacttgctatgtgaaaggtgggtaagcacgataaaagaaattcactggctctcggtcctgttacattagcaacttttcctggcaactttctggttacagaagtaattatgagcaggatagaaaacttagagatgcagaaattatttatagagagagagagagagagagagagagagagagagagagagagagagagagagagaccaactgaccctcaggcctctgaaaccaaaggaagctactttctccttaaacattaaaaatatatatatatttacttattgtagtgatttgaatatgcttggcccaggaagtggcactgttaggaggtatggccttattagggggtgggctttgagactctcctcctagctacctggaagacatactgctcttgactgcctttggatcaagatgtagaacccttagctctcctggaacatgcctgctcagatactgccatgcttcctgccatgatgataaatgggttgaaccttagaatcagtaaggcagccctaattaaatgttgtccttataagagttgccttggtcatagtgtctcttcacacttagttaggaaaccctaagactcgtgtgtgtgtgtgtgtgtgtgtgtgtgtgtgtgtgtgtgtgtgtgtgtgtgtgcaggtgcatctgagccatagtgtgcatgtgcaagtggaaatcaggtgacaactcttgggagtgtctcctggcaccttgtatgatctgggattaaactctggtcacctagagacatgtaggggacctgttccagcacctgcatgttccctgtttggtagcctagcctctctgagccccatggtcccaggttagttgactctgggggtcttcttgtggtgtccttgactcctcccgagttgctcagttgctatccccactcttccacaagactgttccagattcagtaggaaagaatgtgcctgcacctgctacgactagatgccccagggggcannnnnnnnnnnnnnnnnnnnagagagagagagagagagagagagagagagagagagagagagagagagagagaacaaaacaaaactgcctgcaggccaggaatagggatcagggagaggaagcaggaagatcaggagttcagcctcatcttaagtctagcatacatgaaaccctgtctcgatccagggtggggaaagatagatcaactacctgcatgcatcattgctgtgatattggagtgttttcctgcagccctaaatggagtctttaaatatggaactccaggtccagcaaagaccattcttaccaggctgggacaggtttgcccagtcctgccatggcactgtggagccaggactgcctgtcactgagcatatctaagagatgttgcctccatttgtcagctggggctaattagcagcctggcatttctgatttcacgttctgttaatcagcttggcaactgcagcagccagcctcctagaagtctgctttcccgcctcagaggccttgtcccggtgtggcttgcggagagtggagacagggacggttggtgctatgccagccttctcactgcaattcccccacgcaagacctgcttccccttcgcatccacaccagtgtgtgtgaatctgagtatagtgcgccacctgaccagaggaagactcggtgacatggactcctctttctctagataacattgcctcggagttggagaacttcatggggctcatcgaggtggtgaccggctacgtgaagatccgccattctcatgccttggtctccttgtccttcctgaagaaccttcgtctcatcttaggagaggagcagctggaagggtaaacactccattctcctttcacagaactgtggcgtgctgcgtcttaatagtgtttgtgtgtgtgtgtgtgtgtgtgtgtgtgtgtgtgtgtgtgtgtatgtgtgtcagaatacaacttgtgggagtcagtctctccttttgtcaagtggctcctgggggttcaactccactcgttgtaggcacctgacagcagctgcccttacccttaggggctgagccagctcccagccccgattagtgtacttttcaaatatccttgggtttgttacgcagaatgaaggtgaaaccctgggcctgctcctgctgcctaggtggtcacccaccttcctgctctaagtcctgtggagttgtcacaggatactaacaatttggcaaatgggtgtcttcattcttaaggtgcagtcatcaagggttgcatatcgtagtagttacactttttgttgccgtgatgagacaccatgaccaaaatgccttagggaaggaggagcttataatggggagcatccgtaacggtgggagaggcatggcaataagcaggcaagacaaaaggttagagctcacatctcaaactgcaaacatgagacaggaaatgaggtaaggccctgaacccccaaagcccactcctggtgcacttcctccagcaaggcagcacctcccagaggttccacagcctccccaagtagcaccaactcctggggccgttcgttcaaatgtgtgaccccatgggtgacatttctcatccaaaccaccacacgagtctaagctagggcgctgagttctagcagtccaaggtattcccagggaacctttcctgcaggagtgacagcagcctgcctgtggtgcttaactcccagggaaattgtgattcatctgacacttaacctgcctcagcctactgtgctctggggtgtgtgtgtgtgtgtgtgtgtgtgtgtgtgtgtgtgtgtgtgtgtgtgtgtgtgagagaatgcatttgtatgcatgtatatatttgtgcacaccctctggaggttcaaggagacacagggtgtcttttttctctatcttatcttttgagtatgtctctcaatgaacgtggagctcaccagtttgtagactaactggctgacaagcctcagagatgtccctgtgtccaccttctaagtgctgagatttcaggcacatgttacgtgggttctcttgtacagcaagcacttgagcacctgacacccaagccatctccttttcaaacagagaagcagaaagaattgcaaagtacggacagttcattttattacagagatatttcagcttgcagagcttgtacattgattagcttacagcgtctgtgtattgatcagctttcaggatttggagtattgataggggttgtgccttctgcacagaaatgctttgcaagctgggttttaaagcagccgtgggtttctcagcagagagtaaagctggtgcttactgcatgtgcacacagcttctttccagactctggcctgtgtgcccttgctggccccttcagacatttgctacggctctggtgtagctctgtgttaatgctttgaagttttatacgtgtattaactaagcaatcagggcccttagaaagacagtgacgggaagatccggagaaggcttgtccccaggctggtatgtctggatgaggtttctttacaacctccagtttttctcacaccaactctggcctgggtcttcccctggtacatacagccagaaacagagctgctcaccccgtccatcttcccattgcgagcagagaagcttcagaaaaacctccttctccttgcgaatccttctgcatgtgccaggtaccctgcccagagtgtcgcaatcattctggggcctcccgtacatgaggccgtggtcacccttaattcattgttgcttgtattaaattttaaagtgaactgtaactccatctcgtttcattatgtccccccagtagatctgtgccctatactccctgacatcgggaagcacgttttccttggcggattagtagctgtcagatctgttagttactggaggataagctcccccaccccttttttccacactgagcaagcgataggcatagaaagtcaaaaggaggctttgattatttcttatcaggattattacatggtatgattatcttatcattatgccttaactaaaagtatcatacacttagatgttgctgaaaattgaaggctggtttttatttccaagaatatttatagcctattttttcattattcaaaacttaggtatgaagtaccagccaagtcttttttttttttaaatgagtattttatttgtttacatttcaaatgttatcctttttcctggtttcccctctgcaaaccctctatcccatcccaccttaccctgcttctatgcgggtgctcccccacccacccagtcccacctcactgccctagcattcctctacactagggcatcaagcctttacaggaccaagggcctcccctcccattgatgccagataaggccccttcagctccttcagttcttcctctaacttctccattggggtccctgtgcttagtctgatatttggctgccagcctcttcatctgtattggtcaggatctggcagagcctctcaggagggagctgtatcaggctcctgtcagcaagcacttcttggcatcagcaataaatagtgtctgggtttggtgtctgcgtgtgagatggatccccaggtaggacagtctctggatggactttccttcagtctctgctccactctttgtccctgtatttcctttagacaggagcaattctgagttaaaactttgaagatgggtgggttgccccatccttcaacgggggtggggggcagtctaacctctggatatggtcttgacaggttctccttcccctttgtgggttatttcagctaatgtcatctccatggggtcctgggaggctcttgctttcctcgcatctgggactttgtggttgctacctccagttccccatcccctctgttcaatttcctgaccctctgtacatctcctctagctccttcaatacctgactctgcaccctcttttcccctccccctcctttcttcttcccaaatccctcccaccctctacttcccttgattatattgttctcccttctaagtaggatgaagcatccactctttggtcttcctcttgagcttcatgtggtccatgagttgtattgtgggtattccatgctttctgcctagtacccacttatcagtgagtccataccatatctgttcttttgtgacttgagttacctcactcaggatgatattttctagatccatccatttgcctgcaaatttcaagaagtcattgtttttaatagctgagtagtactccattgtgtaaatgtaccacattttctgtatccattcctctgttgagggacatctaggttgtttccagcttctggctactataaatatcagccaagtattgttaaggattctggtattggggaagcttccctggaaagctgacgccagccctgctgttagcatttgagaagggagtggagggcaggtgaggcctggagacttgtgttaaaaaacagtgtttctcagccttccagtactgccaccctttaatacagttcctcatgtagtggtgacccccaaccataatctattcattgctacgtcatatctgtaattttactactgttatgaattgtaatgtaaatgcatgatatgaaggatgtctgatatttgacctcaaaggaatctaaacccacaggttgagagcctcttgcttcaaggatatctctggccaggacatttgagactctttagtagtagctttctctggtaactgtgatgaaatccaaagctttgaggggccacccatagcaacaactcacctttgtctctcgttgtatagtattagggctcagctggttcacttcttcctcacttatttaataaaggagagaaagatttgtaataagcagatgaacacaggtagtgcaaagcacaggcttcagagagccccagaggagaggacagaaggtgctctgggtaccaaaaggaagactctggtggagaaggccacacaggcttctgagcaaagctggcctggaagggtttgggggactagaaagcacagggacagaagaggagagagcacagaatgacatttgggcctgtcttgtgttcagctcctgggggaggtaggcagtactaggattataggaggcactgttgcatgcagatgtagaggttatcatttaggtaagccttgggacgcactggagattttgaggaggggtgtattagcagagttatctgacatttaatttcagggtgctgtcgtttatactgatagcctcctccccctccccccagtgtttcccagaatgtgtggatacatcacagttacagggaaaggggagccctgtggaacttcaccaggttcacctcaccccaagtcagacagaaaacttggggtgggggagttgccagcataagctcgagtaactttctgagtatttctgtgtatgtttggcacatggcaaagattagaaatgacttcgctatccctgtgatccttcaaatgtatatagtcccaggccacttctgagtttttattttattttatattttattttatttttaagcaatcttgcctcaactcagtgttgaaggaatctatttcttgagctttttgtatggctactgaaaatggcataaatgcttccgtgcggctcaggaggattctgaagacttctgtcttgatggaaagaggaatatttccccccaccccaccccccacccccatgaaggtatccttcagccttagctatccaggaaagcactgcagttgatcttggccttctcggtagccccccgtgggaacacaagtgttttgcctggcgtgtagttcctgtgttttctttctgggcctgcttacctgggtcatgcatgctcatcaggccacatttctgtacactgatttccaggccgacgacaggtgaagcagaatcccagcagagcagacatcagggtgcacagccacagaacggtacttgggtagcagcaggaccctttggtctcagccatcactctctctgtagtgtggcatagctgtagaatcccaacttcagataagatcataggagttggagagatgactccctagctaagtgtacttgcttggcaatcatgaggcctcgtgtttgaatcctcggcgtgactgagcctagctgcacccaggagtagctccaggtggtgagctgagacagactgatcccaagaacttgctagtcagatgacctgcctgacctgagccatgaggagcttcagactccgtgagacagcctgtttcaggacagtggggtagagagtaacaggaggatgcccagtgtctctctcctgtgtccagaagcctgcacgtctgtgtactcaaggacagacacagaaaggaaagggttttctcagaagtagtggtgtggtgtagtgatagagcacttaacctagagtgtgtggtgcttgctacctgatctctagcaaagtgtgggggtcatgggggggattaagaaggaaaatcaagttttgtctggggatagggatatgtggttctccttgaataagagagaaaatatttccattatctgaaaaaaaaaatgctctgctttggacaactttggtttgggagcaatcaaataaatgaaaagttcaagctcttaggtgctgccaaagattattgtcttgaacagaacaaaaatactggaagggggccagtataaagttagaattcttagtctgtttaggcatctctaccctttgcagactcagggttttgtaatgtgccctgcatctctggaactagaccctaacataaccacattttagcacatacttgggacttttaaaatacatacaattagttactttgcctagcaagtctaggctgttcctagagatatggaagcatgtgtatgcaaatatcacatgtgaatgctcttagcaacattttccatagtattttctcaaaatggtgcgttagatataatctaggggttcctcagtataagcgcaaaacacacagtaagatactagccaatggtacatgtagcatcctgggtgaacagacaggggaaatgccttggatgggagaagaatgggggggggggcttcagtttgatataaatgttctgaatctggatgattgaaagatgattggccatctgtataaatttattgaagcccatggagctgtatatttatagtgggaacaattttagaaggtaaaacgtacctcagcaaagctgtttttaaaaagcactcaggaacaaacggcctattttgtcaatctatgtggtgcttggtttagttttgcctgggtatatatttccatactaactgagcctttgtagatggtataactgtggacctgaagtgaaccaatattctacagatgggctaagtagtgttataaatgactgtactggtgacagcttcagtgtactggcttctgatgccctctagagacagctgtcacaggcagtagtagtgtctccttgcaaaaatggatatgagttattggttgtctgtgcttccaggatgccagtaagagcttgaaagaggggtcctgtgtaggctggagaccttgagctcagccctgcctgtatcaaggtgcaggacttacctattttctgtgactttgttctgggggacttttgacagttcagagagtagcacaggtcatcctgtgcctttgtgaggtgattcaaagcttataacgtccttttatatttagcatccagttcttctcaattggcctcggggcccgaagagaccagaaaagatagctccatgggcagctgagaaccagcagccctagagaagctgagtaaaccattcaggtgccacttcataagcagtggagaaggtgcttgggcctggttatcagttcctacatggaagactctacactcggtcccctgcagtcttcacttaaaagggaggcctagaaatggtagccacagatcatagctaagtgttggctgtgagcttatcatgtgacagggcccccaaattgttgactaaccatcctagtaggtctatgcattggcaggtgaaacccatccaatagaggggatttttttttctaatgttgaaaaagctacaagctaccaggcagtggtggcacatttctttagtcccagcacttgggaggcagaggcaggtggatttctgagttctaggccagcctggtctacagagtaagttccaggacagccagggctacacagagaaaccctgtcttgagggggtggggggggtgcagaaaggaaggtaggaaagaaggaaggatcgaactaagagccaaaataccactcaataaaactccgggagatcatacagcgtgtaggagccaaaggaaaaaaaatgaacagtttggtttttaaaaatattctgtggatgtaaaaaggcagtgagcttagaaacgatttatgaagtcgcatttattgagtggttcccttaactagtcatctccctgagaaaacaatgaccattcaaggacattagtatcttgaaggtgtgtagacaaatctccacctggggatatctcttaactctcactattgcagaaggtgttgaggaggcaggcctcgggtgggggttgggaagcaggcactgtgtggacgggccctccccagcaggttgattattattttggtgaaggtttttatttttctttaccttctgtaggctccacaatgcctggattttattgatattggtattctggctcccagccttctctgcattgtttaaagagagaaagtttgtgtttactgtgaaaagataatcttgcttttcaaagtgattagtcaaataccctgagtttctatgtgcctgccattcatttgtcaaattcctggtttctaattcatgctccctccctggggagaagaatgtgtggctcagaaggaaggtattttcagtacaattctgtttcctgcttgagaaattagtttactaagaggccttggcctagatggagatgggagtttgacctgattagttggcccttgtatccggcctggaggtgtcttcaataacaggagatttttgtctcctgggactctcaagacttgggagcagccagaccggtgaggttagcgttgaggcagcagtttaagaatggcccatggttaggcaagacacctaatgggacccaatctttccaccattacacctatccttcagttgtctgcctatcctgaccacccccatatcaataagagtgaacattggtgggtcccgtaggtggcagttctgactgacaggtatccaaggacctccctaggacatacactcttaggtactacgatctggattcctttgatcagggtctttgtttcctactccaataaacaagcatggtaggggaacactccttaccaaaggctagcggctcattgagcccgtgcgtgtgcagaccctgcgctgaagcctgcgcagaagtgctcaaggagggttggggcttccattcaactgcttagctcacacttgagctccgactcctccatgtgaggactcttacctatgagagggatgtatgtgcagaggtcagaggacagccttacacagtaactgttcttccttctcggggtcctgatcaccagacttgtgatgtaagtactcttgcacgcatgagccatctcactggctctcataaggaatcttaaaaccaacgagacctcagacttcacctacgcacatgaacgctgctcttcatagcaccgaggaaactgcctgtggcttgtcctgtggggaattcatggctcttccggtcctgggtcctggcctctgagctccctaatgagttctccaggaagtgtcgggagaggcttggcaaccctgcagctgtaactcatttctcagtatgtgaaggtcatgttgaaagcagaccccctaggcagtagttctaatgtgggtgaggactctcagcaggtggtgcctaggtggacacagcctttagggcagaacaggactttgggacatgtttgtctggtctgtgggtggatttagaaataactgtttaaaaaaaaaaaaaaaacttatgcagacacccaagtagaatccttgctctccccttggccccctaagatagctatcttccctttggccatgcccatatctcccctctagtggaagttaggccttggaaacagtgccgtggccggcctggtagtttctgggtggacccaggactggtgtttatcagcattacctgctagacatcgagattcctggtgcactctggacctctgcaccagaagctctagcggtaggggatactgagaacaagctgtgtacatactaaatgtggaaagccaccatgttacacgctgcatctagctaccctgatgtgagagcccagggagacactggatgtctgtcctctcccacgtactcagggactgaaatgaaggcttcttgcagcgagaggcaaatgtacagagagccaggctgtctcccatcccatcatgcactgctgattgggcatgggtaggatttattcctagggataatggcagcctttgctgctagtatgtaagctgttccggttgagtagcggagcatgtctgttcgcctgtaggctgatttcaagcacattgtccatacctggctctgagagaaataaccaaaggcattttcccagggaatgaatcaaggaacatcctttggtgggagaagctttgtgtgttggtaatagaggtcatgaaattaattagtgtccagtcgatttcaaaacattgtccttggcacatctttttgccagtggctaccgccactgtctgctgttataaagccccagtaagcaagcaaaccccttgttggtatggaactacactggccgcagagaggctctctgtcgcctgagggggctgtgggctcagtgcgttgctaatgcgcatttctgtgcttccaggaactactccttctatgtcctagacaaccagaacttgcagcagctgtgggactggaaccaccggaacctgaccgtcaggtccggaaagatgtactttgctttcaatcccaagctgtgtgtctccgaaatttaccgcatggaggaagtgaccggaaccaagggacgccagagcaaaggggacataaacaccaggaacaacggagagcgagcttcctgtgagtgacagcatctcagacccctgggactgccacagtccagataacagtctttggcatccgtgggcgggctctttgtttcaccatggactgtcaaaccactgcagccagtgcctggcctctgcatattagtgggcgggtgcctgatacactcatactgatatatttttctaagggtccatttgagtctattaaacatccaagcaggttcttagagcttgcacagttaaataccttttcaatatgagcaaacaatatttaccgaagagccagtccactccaggtcagctctgcctttctctcctgtgccatagaaggatcagggtagatgctccactataatacttccgtggacgtccagtgtccttgtcctcacacttggcctcctttctctgccctgctccttctagaacaaagtgagcccatgtctttgaatcggaatgcttttcacatgttggacaaagtaataattccatcctggtgatgagagttttcaccctaagatctcatagcctagagttcaacctgttaacccagcccctctccaaatgtggtcccagacctggatgtcagtctctcctctagcactgtatggagctaggcatgatggtacactcctataatctcaccacttaacaggctgaggcaggaggattgtgagtttgaagccagcttgggctacatctaaaaccctgttttaaggaaacaaaaacaaacaaacagaaatactaaagctctatttgaccctccgtcattatatagcattagtggggaatcaggagctgtgtgaccaacagctagtcagacgtgtgcatacatgtggggggagggctagccttgtcttttgagtatccagatttatctgatactctacggatccaggaggcatcttgagaagagtagttaggcagaggtggtaagtgtgtacacagccagcaccctcacctttctgcagagccccctgacctgttccccatcaagaacatagcagaagcctgtgatcggagcatttcaaagggcttctcccttaggggcagccagcctgacctgacaggtcatgagtgcgccagccatagatttgcctttggaagcacagtcagggttttctctcagagtgacatcacagagacggatgggtttctgtcactcatggatgtgcctctgtgccccaggtgaaagtgatgttctccgtttcacctccaccacgacctggaagaaccgaatcatcataacgtggcaccggtaccggccgccggactaccgggatctcatcagcttcacagtttactacaaggaggcgtgagtttgggcctctcactctgatgtcaagcttgagggtggggacggccaggtggcagtgtgacttggctgaatagagagtctttggtgtacctataaagaatcaagtcaggcgaccgtcacctcatcctcatgtgacctctctagttgtcatattaaactgtcccaacctgagacagcagctagtcaggagagtgtcccgcctcagccctttcattgtttatatggtgtttgagtaagttcaccccaaggggaaaggggatgaattttaagagaactgaatgcctccaaactgtcataagccattatgtggacttggttaaatattgtcttagcctctgtcccccaaaataccccatggggtgctctgttctcaccaaggctaccctgaactgacccattgtcttccagtcacttgatgcatgcatggccttgccaagactttgctctgggccatgagccctctagcattaaagaatagtgagggacgaacctaggtgtcagcagttcctgataggaccatcctgcttactccacatcacagcttcctgagctgtcccattttcctactcagcctcctgtggccaggtggtttccccagtctgtgtggtcatccgttttcccaggcactgatctttccagaagcaaaggtgctggtggcagtgcctggtatcttcgctgccacttgacctagggtcctgggaactgttatagcccagggaaaatagaaagctcaaaatcactcagtgtttgtgtaaatgggggccacccctctcccatcgtgatcgaacacaagtcatgtcagcataatttcagaagccagtagctagcagcccttgcatctcgtcaaagtagacaccccgcctaccatgcatctgtgcagagccctcccttccctttgaaagtgctgccagtgcactggcgatgctaactggtggtatcaccaatgccactctctgagacaatcaggaaacaaagtgttggaatattatgagatagttaagcatcgaaaatagctattatctcagccaccaaacgcagacactattgcatacaccagcaagattttgctgacatgacccagatatagctgtctcttgtgaggctatgccagtgcctggcaaatacagaagtgaatgctcacattcatctattggatggaacacagggcccccaatggaggagctagagaaagtatccaaggagctgaaggggtctgcaaccctataggaggaacagcaatatgaactaaccaataccccctgagctcgtgtttctagctgcatatgtagcaaaggatggcctagtcggccatcgttgggaggagaggcccttggtcttgtgaagattatatgccccagtacaggggaatgccagggctaggaagtgggagtgggtgggttggggagcagggcggggggagggtataggagactttcaggatagcatttgaaatgtaaatgaagaaaatatctactaaaaaaattgtttaaaaaaaatagctattatgagccaggcagtggtggtgcacatctttgatcccagcacttgggaggcagttcgaggtcagcctggtctacagagtgagttccaggacagccagggcttcacagagaaaccttgtctcgaaaaaccaaaaaagtaaaaataaaaataaataaaaatggctattatcgaattacattttagagttctagggggataggaaagttagttttgtccaaaagttgtgttttattagtttattgtttgcattaaacagctctgcttgttttttgtttttttttttttcattagttgggtttttgttgatgttgttgttgttgtttttaactctcacttaagaagacaatgagcatccgcatgtcttagacgcagcattttcagtccctgtgaatgagggacttgctgtctctaaggctgcttgtcagttctgcggttcatagctgtcgagctcccgagtccagatgcttgattttatttttgtatagaaatctaattgatgatgagttttatttggagttcccaatagaaatagaaagtgtgacacgttcagcccctggggaaggttctggggagttttgatgccagagcccttcaacgttctctggcctgtgttgactgtctttcagaccatttaaaaacgttacggaatatgacgggcaggatgcctgtggctccaacagctggaacatggtggatgtagacctgcctccgaacaaggagggcgagcctggcattttactgcatgggctgaagccctggacccagtatgctgtctatgtcaaggctgtgaccctcaccatggtggaaaacgaccatatccgtggggccaaaagtgaaatcttgtacattcgcaccaatgcttcaggtatccacgcaccggaggaacaacctccaacccctgttccctgaatttttataagcttgctttatttacataggcacagtatggctggagggctagcaatgagatgcttgttgttgctgcttaacactgtattaacattctcactgccaacaccttaagttctcctgagccatttcctagacttggtaccatcttaaatgtcaacatctctgctctacgcaattgaatcggtgtcctccagagcagtaggatggtttctctgaatgcccaggatgtagccacttgtggctggtctcctctctctcagtgcagacttccagggactgagacgacaatgaccggtgcaccccttgcctctagtggcttgctggctttccacctttattccgtagccaccagctttctcaacaggcgaacgcaggcttagagtactatgatatcggattattgactaatcccttctcatcttcttcatgtgtttacgtactagttccccagctccagaacctagaagtggggaaaagcaaaggtgtgagtttgtatccaaagacgagagaggtagaaagatatgcttcactgtaaagataatgactgacctcttacaacaaaaaattccatcgacttgagtggcttacaacacaatgaaacatattcaccgttccaagagcaaagcaactgaatacatttctcatcttaaagtttgggagtaatgactcccagtgaatcattgcagcagatctgagaggaaaaaaaaaaaaactaagcaggaatttcttatcattatagcagattcttaagaaatcctattcttcttcctaaatattaaaaactgcatttggtccctgacctcaaaagtgcttgggaccgatagtgacgtacttagtccatcatgtgcctctgcttcatctgggaaacttgtcattgaaatacctagtaagaaactgttttggaaatacttattgaaaacgctcacgggaccaggcatcaagtgcttgtcttctctgcatcagtcttggtcttccaacgtgttgtccctcagtggttctcagagccttgagcaccgcatacatcctaacagccctctgtccattcgcttcctgttggtgtggtggtatatgacctggcaaggaaaggatttgacttccacatcaggatcacagtctgccgttaaggaagccagggtagaaactccagcagagacaggaactttggagaagcactggcttgctcccagtggcttgctcagcctgctttcttagagaccccaggaccaccagcccagaggcctcctcaccacaatgagctgggcatttcctccaccaaccattagttaagaagatgccctgcaggcctgccttacagcctgatcatactgagccatcctctcagttgaggtttttttctgtcagataggttgtgccaagttgtcataagactgaccggtacaagcttgttttcacctttcagattcaaaaacagcttggttggaccttattcttaagtgtcataaccacggttctgtctcttgcactttggaaactgccaaaaccagtgggcctcattctttgccatgtgcatgtgtgtgtgttggggatggggtgcgcttcggctgtggtatctcttttgctatggtgaggacacagcagtggtcctgggatgttttcctttttacgtaagttagttctacttttgagcctgggcatcagtagtatgtaagcctccgtcgttttgttaaactcatttgcttgtaacaggactttgcatagaatcagggctcaggcgtactggctttcctgaatcatgacttgcttacaagatctgtgagtccctgctccttgtttcacagtcctttcacccaggcacataaccaccccacacactgtccatcccccactcccactcttcattttggctccctgtcatgtttatcaagtttttatcagagattaaaacttgcaatcacaggtgaagtactaagccgtccaatttgccatttcctaatacacaccggagaatgacagttgtcataactgaatcaactctaggtttttttttagagtcccctttaaccccagctatgccctcgtagccccttcagtcccaggtcagtgagccatgtgtgtttgcacatagattatctaagagcaagtgctctgagagagggctggcctcccagttggtaatctttccaaagctctggttcacctcatgctctggttggtccgttgctatctctgtgcccaggtcaagcctgcagcttcctgttggtttgcatcgagcccctgataacctcaacctcggattccggtctattctctgaaatgttctttgttcttctttccagtcccttccattcccctagatgtcctctcagcatcaaactcttcctctcagctgattgtgaagtggaatcctccaactctgcccaatggtaacttgagttactacattgtgaggtggcagcggcagccccaggatggttacctgtaccggcacaactactgctccaaaggtgagctgggggctggcaggcagcaggcaggcagtgccactggccttgtctgttgtctgagagaacctgagccccagggtcacacctgtcacgttgcagggcttgcttctcagcagtgcacaccagcacccctcccctccaccagcaatgctaacaggcacttcctgcatggctttcattcccatctctggtcttccccaagcagacaaaatacccatcagaaagtacgccgatggtaccatcgacgtggaggaggtgacggaaaatcccaagacagaagtgtgtggtggtgataaagggccatgctgcgcttgccctaaaactgaagctgagaagcaggctgagaaggaggaggctgagtaccgtaaagtctttgagaatttccttcacaattccatctttgtgcccaggtgagtgtgccctttggaaaggctacatttgatgccttaggctgtgcatgctcccatctgccccacgcggagcagctcctgttggttggcaggctgctgggctgctattgcagtcagctgacaggaggcgctgctgttttggcttttacccatgttcccctctgtgtcatgtctgtttctttgaatttaaagacctgaagacaggaaacaaatcaaaaggtgctttaaaaactggatgcagtgacctctatcctcactaacttactgtctgtttgagtcttgggtctcagacctacattctccaacaccaaacctccgtcccttcattgggttatctatgtggagcattccacctgaaccaacactcagtaagagtagccatgagagtggccaggtatggagcgtcccaaagaggccaggcagaggtcctcccatacccacccctatactgggtgtcagtcaaatccaggactcctgtaggcatggccagaggtttaggtcgttctttcattgttgctaacaaattgcgtgatgcttagtggtgtgcatagctcaacagttttaaagttagaagaacaaggagccagtgtggcttttgttgatgaaggcatctttgggtgtgtcgcatggccaaagtacttatggcacagcagcgatttcagggcagacaggaagctgaacagacgttgagcacttagcttgtttgctacatcaggatctccccctaacaggaccattccctaaaggttcctcctgcagctgccccactagtgaccaaacatctaacaatacagcatgagaaccaagggtagaccgaccatagcagaaagcccttggtgtttagttatactcagatgacatcactttgtgactgctgttatcatcagctgtgtaacgctaggctaagtgattgggcggcaaggctgtggttgacccagatgggaccgtgcagggcttgtactgtgggtttgaaacgaattttctctcggtcacattccttcgtgtaagtgtcctcacctcagtgtcctaaaacagacccagcatgcagataggggtcaccacacctggccattagggtttggggggttgttttttacctcctaccgaggcaaggatctgacatctatacgaggtctcgcaaggtcccataaaggagcaccctagatgacaggagcaactctgtcatcatacaaccgagtttacctaaaacctattcctaccttcatgtcattctaggtgcacgtttatctgggggctgaaggcaaatatatcagatttagtctttctgcattgtctgactttgcctgtgagtttatagtagagtggaggctactatttataaagttacttcctaaacttggtatcagtaaatggctttcattggccgccatcttcatttttgaagacgcttcaaaaatgtttctgtcactaaaacattctcagatgttaaacagtacaagtttttccagtagcatcaggatactttatggagtaaggaaagctgatagtgtgctgtttgccaccccctggaccactctgtttgaatcatccctagccttctgatgcctatattgcctcccttcatggtcctgactctgtgtccacagtaactgttgaataatatgcaagagtgcagtgtttataagtaaggaggccactgagtctgcttggtgctatagcccagtttgttgggggtgggtcaaggcaagaagtggaccagtatcattttgcaataaatcaaacacaagcaacttcttacatgaaggcacacgtttgtgttgctctggtttgaaagggaggcaggaaatttaataataatgttttgaacatctgcctagccgccacacacacacacacacacacacacacacacacacacacgcacacacacatgcatgcacgcacacacatacctgaaaaagtagtttcctttatctttccttccatggtttgttgattggtcggtttatggtttgctgggtgtgagcatggtagaatagtaccctcatttcctatctctttccccagcattatgataacaaatccccattcctaacttttgagatgggccctggtatggcagttgatatactttcaatggaaactggcatgtcagtacccgacaaagaactatggttttggtagcagatccatctgctgaagaccagggagcatgcggccctttcccccaactccctactgtactctcccagatgttggcctagggagcatccataggccttgggcatggcttccaaggcgcctcgagcaccgtactctaggctcccttttgtcttactctgtcatgttcttaccagacgcagtgcagtcccacctgttcctctcatcctttgtcctgtcacaagcaatgccagcaacagcctcaatacccagcttgcccactgttcacctgcagacaacctgagggttgcttccagcccatagggctgcttatctgatgtcatatttttatttattttttttttcagtttttatgaatgttagaagttttttctggaagagagggagccccagactctgttcctgttgcttttctgtagtttcttaagctaacacaagtcagtgagtaacagaggctccgctcctatcacagacaagctcactgccaaggaggatgcaaagccaggtttgatgaacctccaagaccatgctgtgtactagggactgggggcattcatcaataggagaccctgttcctcaggaaaagcgctgggatttaggtacttgctagctgcttaaactagggcatcttcatttcagagaagatcaaagaagccactactgttggactttgggtctcttctaccttgtgtgtcttaggcctcacctttcccaaccagtcttatgaggctgatggtttgtcgtgttgaatgctcagttatcaggcctgaccaagtagcactgtctggtaaaacagagcactgtctggctaaaaatggctggcacactgtttcctagaaccatgtgtgcacatgtttctctgaggatgtctcaagagagtacaggatgggttgtgaaggcgaaaatcctggttatttgttggttcttatccaaggagcctaagtagtttcttttagttcaaggctaggactttcctattacttctaccctagccatggaaaagacaaagaaaactaaagaacttagcagctgaccttctttctcctccttgcaggcccgaaaggaggcggagagacgtcatgcaagtggccaacacgaccatgtccagccgaagcaggaacaccacggtagctgacacctacaatatcacagacccggaggagttcgagacagagtaccctttctttgagagcagagtggataacaaggagaggactgtcatctccaacctccggcctttcactctgtaccgcatcgatatccacagctgcaaccacgaggctgagaagctgggctgcagcgcctccaacttcgtctttgcgagaaccatgccagcaggtacggcaggtagccccgccgccaacttacagccaaggcgggggaggctgacagcccttagattcaggcctacgaatgtgtggttgttggtacacaacgtcgtccgtcaggtgcctaaggaacagagaatgtattcctagtgccagctcccatccagacttaaccatagacactctttacaagcccctttcagggctctcactccttggcttggttcacgatgcacatgctcacacccacccctgtgcccttctgtgcacagctgaatgagttagctttctgttgctattacaaaatacccaaggcagttgtcttaccagaaggaaaggtttattttggtctcagtgtttcaggagttttagaccacaggcacttgcctctcactgctttggggcttgcaatgaagcaacacatcgtatttcatcacttctttcattgaagcccaatctcctaaagtcctgtcttctctcagtgccagaggctacagactgagagcacaaaggccttagcacaccacagacctgtgaggggccctccaggtctcaaagcttgatgcagaggaagcgttgtcctcgtggtcagctagatcagcctgtgggcctcctcctacagttagatactgcctgtcaccctgccagccatttgccacttctcattcgtggaggaggtgtcagtcagtggggagaacaaagcatgctgggaactggggcagtaagagcttctgagatcggctttggcactcccgtgtagccctcagccacccgtgcctcagtttcccaatcctagaagagacagagaacagcttatctccccaggcctctctcggctgtcatcagctgtcacccaacagctgtggttcaccaccagaagtgaggccagcggtggctggaagagacagtggccggaacagctgcctcagaggccagcctcggaactggcccttcctccctcccgtgtgagggtgtgggctgtgaatgtgtcagtgccacagctggaggctcagcacgctgtcgctcactgcccttccccagggccgctctgtttgaagggttcttttttttttttttttaactttttaggtaggaaaatggacctggagaatgttacataggtttttcaggcgtgatcacttgtacttggccacaggttttttcagtcagaggggatggaggcgctgtgccagcagccatctcaggaaagaactcctacaaggtcccctgtccagagtcctgtatatacaaggattgggggaacagttgttctcaagttagcacaccgtttatcattctttctggggacctaaacccaatttgactgcttgtttacattaattatgcagaaggagcagatgatatccctggtccggtgacctgggagccaagacccgaaaactccatctttttaaagtggccagaacccgagaaccccaacggattgatcctaatgtatgaaattaaatacgggtcgcaagtcgaggtaagagggataccatggcctgcagctgcatgtgtttcagcgctgagagcacgtgctatggcatactggttgtctgctgactgctaagcagacaggggagaaagatgggcagtcgggaaggataaaggtcttcctagcaacgccatctttattgagtagtaacttgggtgcatggagctggctggacttcatacaaacaatgaaactgtagctaggcctccagccgcagactagacacgtcttgatgatcttttattcctctggagttaccaacatatttgatttaattaccaacatatttgattaccattttccatgtgccaacctgaaaaccacttttccggtatccttgcttcctttatgttgatactctggacaatgtaaggagaggttgggcagctggagtcacagcatgatgacttgagttgacagatgtcagatctcacccatgcttgtaggaaattaacgccttatatttccataggatcagcgggaatgtgtgtccagacaggagtacaggaagtacggaggggccaaactcaaccgtctaaacccagggaactatacagcccggattcaggctacctccctctctgggaatgggtcatggacagatcctgtgttcttctatgtccccgccaaaagtaagtcttattgagggagacgcacggtaaatttcaaagctggctgggccagaactcagaagccctgagcttctggggctctctggttttctgttagaacagagctggctgggttgaggaggtggcttactagggaaagtgcctgcttaaagatctaagttcaagtccttgacggaaaccaggggcggtagtgtgcttcctcggtgctcaggagatcgacagtcaaagttttgcagatccctagctagccagaatggtccattggtgacctttgctttcagcgagaagccgtatctagaaaacggaggtgtcacgccagaaaggaagacacttggtatttactcacagtggacacacatctgtgccaccatcaccttccccccaccccaacactcgcacgcacgtgcactcgcacgcacatcccagagctgggaaggtgctgagccttggagccttctcttgtgagtaacagaagagtatcgtacaacctagaagatatcttgttctcatcgtggctcaggtgtggaggcattttgcaaagcattgagttgagtatcaggtctcctgcctggtcggtgagggtgacccagcgctcagcgtctccccagggatcgtctggtgtcactgctccgggacaggaatctgcaggacaacatcccagtcagagtcttcccctcctctgtgctcttcaccatccaccaggatgcattgaaagatactctgtgcgttattttgcacagacccaccctagtggataatgtttcacagttcacagaaaccactgagtgagctgttaggattcagatttaaaagtaaatgttgtgaaatgttaaatgcaagggctgcatgcttgtttgaccgaaaaaaaaaaaaaattgagtctttttggtgaaataatacatagtgaatttttacgtgtcttatgagaagccaaatttttttagattatttcgtgttcatgtaatatccaaacaaatacaggatcaaatgtgaattccttttgcactccccaccccccaaaatctcagctcagctttgaggctagaatctagggtgtggggaactgttgtttcctaatgtcttatgttcttcgtggtctcttctggattcttgattcagacaaggtctcaacagatccagcaatcccagtccaaaagaaatggaagttagttgtgttgaaatctacaccccccttgtttttttggcccactagtcacagtagccaaacaatgaagtatcctccagcaggtgcctgggtaaaaatgtggtccatatatgtaatggaatactgttaatagaaggtgcagaaagggaaacaccacgtgatctcacgtatatatgaaataaatctaaaagggtgaactcagagtcttgcaggttaccaggggaacataacttagggggtgttgctcaaaaggtacacaattttaggtagatagaagagtgagctttataacacactagctatggttaataaagcattattgaatattgctaagaaagtgttaccaccacagaaatggtaacaatgcgacttaatgctgatgctgattgggttaatgtacacatgctttaagatatgttgtatgtggtaaatatgtatacatgtataactttatgtcagttcacacttcgatagcccacctagccagttccagatattcaaagatacgcaagacattcgaaaatcctcatcgtgactgcacaaagacagaagtaaatagaaccgtaagcaggaagctaggattccctgtatctgctgctactgtgtctagattgagagatgatgagactgagagttctgtcaggtagactctgaattttctcatttttttctgggtagcctagcgtcatcagttagcttatgtgctaactctccattgtgatgttactgtagctctccgatgtggcaaaacccagagatgattagaggggtggcccccacagtttcgggggttgtcgtgctctgtctgttgattctattacttttgggctgttctgagacaaaatgtcagaagcaggaagcacatgatggaaccaagctggttacctccaaaaggcagaaagggcccgggtttcacagttctctcacaggacacctgcttccagtgacctgacttcctctagaacccagctcctaaggttacctgccactacttcccaataacgtcacaggccggcaacgaagccctgagcatctctgccttggggtacatttccgcttatctgtagcacgtcgtgctactaagccaacactggagttctggaaattgggtggtgttctctgaaggagcagtcttgacttctgaagctaagtgagtctggcttttcttaggagagggcatgtttgtagctgcctttgtaaagctaagactgcaatgccactggggactcttaagaggtcctctaatggggtttctccagtggaagttggcacatcccacagggggattgaagctgcgtgctagcgctcttggcttctgggaaattttcccggtgtccgacaagacgcagtttagcacagttttcttgggtctaatcctcagagggggacattgaaagctcggcatcacctgctgtttttaaggaaatcttggtgcgtgaattctattaaactcctcttcagacttcttccctcccgattaaatattctcaggtctttgggccctttcttgaaagccagttgcatagacaattttctgtcagttttgtccttctggatgtgttccagttcctctgtgtccctgttgaaatgtgaaactcaaaaagaacacagaacaacctgacccgtagaatcaggaacacaaaaccacgaattctcctaggggaaaaggaaagctcggagcttctctctggcagggaggcgcacgtgggagtacttttagaaactggaaggtgctgaatcccatcgattttgaaaaagacttaattttggcttttgtagtatttcaggattaagaatagagtttagaggtagaccaaccattggtgagtggctcgcggtccaggaacatgtctccactgagtccccagctcctttccaaggagacatctctatactgttggtgtgtacttggtgtgcacatgtgcagaggtcagaggacaacattgaagagttgattctcaggttccagggattgaattctggttgccagggtaacatagcaagtgtttttacccacaacgccatccttattgtgtagacatgtcaacttgggtgtccaatagttgctatagactccttataagcctgaaatctaaagtgctttcatggaggcacttcggtccgtttcattccctgatctgcattccgttgggctctcagatgaaagctcacagcccttcgcttcttcttctccgcatactcatttttgtttgtttgttttcccatattaactggagtcttactgattctttctggtacatgacgggaatccagcctcccagttactgggttgcggctgttctgagccagggctgcaggaaagccaggctctgactttggaacttgtcagttatccgtgcaaccctggcaaagttaggacgcctctctgatcttgcttatggaaaaggatttcttcctgaggtctgactggagcgatgcatagcatgccacaggagactggtacgttcccttaactcctctagacctggcagtgtgcagaggcccccagtgtgtcctcagacacactcatcttcccagtacatgaatccgttttcagtctggccttggaagagttcactgatgcttcttcttcattgttttagttttagccttttagaacttctgacatgagtactgtatttacaccatctggctcctccctctcccagcttcttccatgcccacctctctcagttccatgactactttaattattgttgctaagcaacttgtgcgcacattgatacatatatgtctatatacatatatgcatatacacctacatacatatacacacatgctctgccaagctcatttagtgttactggtacatgtatgtgtttagggatgaccacgtgggattggctaacctatcagcaagcttatgcctgataaagactgatcctccttctctctcagcagccattaactgctggtaacttctcatctaggggtggggcttcagagattccccacacttcaaagcatgtgaactggtattgtcattacgcaagtttaggtaaccgcgttgttgggattcacgcatgcgggtggtgtcttacataaaaggtggcatccctcagcagacaccctgggcttctggatcttagaatcgtaccacgcacttattttgcagtgttccatgagcatttgttgtgggggttgtggtgtgggtctatcatcagttgggcatgggtaccccatggtcagtggttccctgcattttgaccagtcatggttttctctaatcctttccatctgctgcagaaagaggcttctctggcgaggcctgagagctagttatctgtgggtagaagctcactgcttcagaaaagtgctagtagcaggttcttctctagtgtccacgacactacagagagtcagctaggtttacagaatcgggcaagaatttcctcccagtgctcaggccttcagtgcacttagacagctgttggttgtccccagatcaaggtgccagtgttacatactgaggaacatctcaatatcctggtcactgctgcagttcataggcttaactgctgaccactgactcctctcaatctgaagaatggggcggaaaccacttagctggaaccaaaccccttcatcattcaatacactctgcaagacattcctctgcacgggaagccgtttccctaggggaagcaaccctcgctcccccatctcttcttccccctatgcccagcgtacatccatgttaatccacctgtccacagactgagttcttgaatctggcagaattctcaggattttcagaggtgtagacctgaacccctggaggccatcctgtggtacttaccacccaggtactggtagcaagttcagacttgaattggttttacatatttgtagaacactcagagcaacattggcagggagtgtcatccagtgctttggggggacgggagtggcgagcaagctgtctgtgggactttcttaaaagataagaatagcgtgagcaactagtaagtgtgtgagtgtctgctcattttccttcagctaaacttccacaaaactacacacaggaagggcttgccttcagaattacttgctgtattcagaatatgcagtgctttaaaggagtgtgtgcttcagtctgtatttatttacctttctccaaacaattcagtttgtctgctggtcttgtcccagcactagaagactcctcgaagactcctcttgtgagatgagggagtaaaggctattccagaggcggttttatcatccttccaaccatacacagaaatgaagtgagccagttattcacctcgtgcgtgacgtcttcctgtttcttccttgtctctgcagcgacgtatgagaacttcatgcatctgatcattgctctgccggttgccatcctgctgatcgttggggggctggttatcatgctgtatgtcttccatagaaagaggtgagtgcctgggccagcggaagacagtacttgtggcgcattggcttgatgatttgaacttgaacatagctcgtctgtgggggaaaataccatgcagactggacagccagagttcctagtcagacattcttcagaggggaaaaaaggacatttcctaatgactaacagcaacaggagaggggttgcttccttctctgtacccgtcgtctgctttctggctgttctagcacacagattgctgccttgtaagagcttctccaagcatgccagtttagcttcccatggagtgggccttgttatttccagtgaagcaaagaaacaaatgtttctttagaagctctaatctgaggccagggcaaaagtggaaagatttgtcctcagataccggggcctggatcaggagtgcaggcaagggtcccgtcagcagtgatcatggtttgcgtcccttgctcaagataactcgtgagaaagaaaaaaaggaaaagaaaaggtatttacagaaatgtatagagatgggatttgttgacctggttttcatctttttttttttgacagaaataacagcaggttgggcaatggagtgctgtatgcttctgtgaaccccgagtatttcagcgcagctgatggtaagcgtcctggccaaggtgtgggaatatgggagctgtcaggtgctgactggagaaaagcgttgcgtaattttgagatacctttgtcccaggatctgcctttggtaccatttccttcttgtcttttaataacatctttagcactcagtgactgtcagacattctgggactctcagatgccccagtagaaaccaggctctggagatgccggtggccggtctgctaagcagttcagttagccgcttgaagtgtggcatcagagtgaaaggagcattctaattactaccgtctagtcagaggactgctgtagccagccaggcatcctgagtgggtatcaactcagggtggggctgcaggcgttccctggccagtgagggctatatagcgttgtatgatcttggaatccctctgctgttctatcctgattagggtcatacagcctatgcacccatttacattccctttggcagtaactaatgaaagtcatttaattaaatggctcagaagttctgactcggaacctgtgttttagctactggtctctttttttcccctagcgcttatgcttggcttcagaccttctaagtaagctggggaggggtcctctcctcgattagcccttggagctttctcatgtctatctagatgcaggcaaaaaaagaatctctgagaaggacttgttcaggctcccacagctgagccgtgggaagtctgcacaagggacatcccaagccttcctcctgaatcctcatgatgtggtgtatggaagagctagctgtgaggttgctgggctatgtagggaatctggttagatgggggtctgtgcagcgcaggagtttgttcaggaggaatgtttctttgctccagaagtgtaagtagatgcggcccagataagacacagtccgattgattatcctgctcacatgggaaaaaaaaaaaaaagagaaaaccctttgtaatttaaaagcaccatgtaagtgcgtatggttttactatggtttctttaatcatttataactggattatgtgtatagtaaagccagtcaagaacagcctcttctgaatttgaatcaggtgcagaataatgatgttatttctgtttgcaaaaggtcttgcagagttattttttaagtaggcatatgtgcatacgtttgtgcctataaagcatagaaaatacactagaagggtaagcaccacacttgaaagcatagttacatagttacttacggagactatctttctcctaaaaacaaacaaacaaatgaagtgagtttggatatgtagtttagtgatagagcatttgcctacggtgttccagaacgggttctgtcctcacaccaccaaaacaaacaagaaagcaaacgggcaaaaatcaagaaactaaatatgcattgtttatacaggccagcctcaaactcctggcctcagatgatctgaacaccttgcctccgtcccctaactagccagaaccgtgcagccattgtgtctaggtcaataattataaaagagaaaagaggtgccagagaaatagtctccctccccccttcaaaacaaagcaagaacaaacttgtcactacccaggtcaacaggtgagaacactgtcacctcatctgcacttggtttgtttggccttttgacaagcacagcagcagcacaagccttttgcctcaaagagctacaaagtgacattgcatctgaaaggtgctttaaaaacgtctttctcccagagttaatctgcatgttgctgttgtcaagagtgcactgagaatgccctacaggaaagtgctgataacattgtacgaagtttatgaacagctctggctggcaaagctgaggtactctggctaaagtcggcagctggattgagtttagaaaaagggttgagaccactaacttcagggacctcccagggaatggatgtgatgggcttttaactccatgctctgcagcaagcaagccgtgtagttgattctcattaaaagccagcctggatccttagaggtaataaatggagacagtggtccccatccttacagagaggtgttataaagacctttccccctctgctctcctcagcaagctcagcctctgcagggtcacaagttgtctgaggcccatggaagacagaattctagttgagaaattaccagacatacatattccatgaaatacaaaaacatgcacaggagccaaatgtggccacacaaacctggaatccacgtactggggacactgaggcagaaaagttgtcaattcagggctagcttggattacatagcaagttcaaggcaagtatgaacaagatagagcagtcctgtccccaaatcagccagtaagtaagagtaagtgagtagacagataagtatgtgtcttagtgttctgctgctgtgaagagacaccgttgaccacagcagctcttctcatggaaagtggctggcttaaaggagcttacaggttcaggggtttaggcccatgttgtaatggtagcaaacatgatggtatgtaggcagacatggtgctatggtgctggagaggggttaagagttctacatctggatcaggcagcaaaaatagagcaagacataggcctggtatttgaaacctcaaagcccaccctcggtgccacacttcctccaacaaggccacacctcctaatctctgtcaggtatcactgctccctaatgaccaagcattcaaatgtgtgagtctgtgggggccactcctattcaaaccaccacaagatgtatgttccattcttcaaaatacaagtcaatggggtccccagccccgaatttataataaacacccttcccttaagacatcacttagaagtaagggcttgtgctctgagggtgactgataaccgtgatgacctgctggtggggtctcccacctccaactgcagctcggcatctaaaagcataaaaacaaacacagccgtgattcccctcccaggcctgtctctaagctagggcttccttcttgccatgcctgctggccatcctctgttagacagggctgtcagtaactctgttaggttatggttctcatggagcaggtattctctttccagatcttacgtattaatttgatatgatttcagttctcgctgtacccactggcgttatgggatggagcctgtgtttggtctttcttacttgcctctcttattttctttccttctcttcccccttccttctgagaactattcgtttatttatttttctcaaaccagatcaagcataaccaaaaatggaagctggagaaggaattctgttcaggtccgtgtcagggaggttcctggcattgcagagtgcaggccaaagccgtggggtcactactgagtccccctccatcccagcgctcacttccctcactagagatcccctggaagggggctcctaggcttcacctgtgttaggcaagagtttggcttcttgtgttaagttttaatactttcatgcattccggggctagagagatggctcagcagttaaacacactggctgcttttctagaaggaccctgatttgattcccagaacccacgtgccagtggcacccaggtgctatgtgcgtacagtgcagatgcatgcagggaaaacagccattcacaaaattgatggttttaaaacagtatgcattccactaagtcaaatcacttgaaaaacaacacagcacagccctgggattaaactgcattttacagcctgtagagcaccttgaatcatctgggatttgaaccctgggtttcatctcccaaccctgcttttttcttcatcaacgtgtgagttctccttcctctcaggtggaaaaggcaggcagtctgtatcgtcactagatctcggtgaaaggggcagcagggtgtgttaaactggatccaacctctgcagcttccagagttaaacagctgtatggaggaatatagggagacagtgcttgtagtgcacaagacctacctcagcgctctgcgggggtgggggtgggggctggcctctcatctccttttctgcggtttcttttgatggctgaggactcttctcttgagtctctgcctttagtgttgactgagtttctccctctcagccaccttgagcttgttgtcggacatggctatggaagaagtggaatgaagtgcgtgaactgatagacatcccaggcggctgacacattgtcttggtgttttgaaacacaatctgaagatgcctttagttcagcagaccccatctccaacctccatgcccagtgggctggggtgggactgcagcttcctgttgccacacccagctagtagccatgtttttttaagtgtaaaagctgatgagataaatctgttagaattttcatttagcccacaacatccaacagttaatataaaagctatctttttaaacttgttttaaccaagtctttggaatacaaagctggaaaaaaaaaatggcccagcagttgagagccttgctggccttctggagaactctaattcagttcccagcacctctgtgaagagacctcccgccatctgtaactataggtccgagaagccaacactgtcttctgggtttcccaggcacccaaacacgggtggtgcctcacatctgtgcatgtgtgtgtgctcatacacacacagagagagagagagagagagagagagagagagagattttcacatgtatacgtaaattttaaaatcttttaaaagttatctttttttacttgttttaagcaagtctttaaaatgcagtatatgtcttacttccagcacgacttcaagcgctgaaggcctacagtggggctgggtggcctgtaaactggcacccaggccatgcagaggatgtttctcacctctggcttcatccagggaggaggagatttgaccccctttggtcctttcccctcccactgttctccccttctgacctacatttccatcccttgatgaagacaggcaaaacagaagtcccactttctttgtctcttagggctaatttgctttttttattttgttgggttggggttttgccaaggatatgaaaaaggaaccactgttgtttggtttgatttggttttcctatcttaggtttcttggtttccttctggttcttagctacgagtaccaccctcaaagtgtcatggagtcctcagagattgagtacccgtgctggactgtttgtaccttgatgttctccttggtaggtcttagggaacagcatcttgtaatctctgtctaagggccgtttccatcctgtctgttactagtgtacgtgcctgatgaatgggaggtagctcgagagaagatcaccatgaaccgggagctcggacaagggtcctttgggatggtctatgaaggagtggccaagggtgtggtcaaggatgaacccgaaaccagagtggccatcaagacggtaaacgaggctgcaagtatgcgtgaaagaatcgagtttctcaacgaggcctcggtgatgaaggagttcaattgtcaccatgtggtaagaagccaagatgagacatggacagaaagtatggacagaaaggaccaccctgtatgtccttggccagctacggaattgttgccttgccctcttcccagtgggtagtttccccgttgcattcttgccacccacagacccttgaggtgggagcctcgccctcgccctcccaccagaactctgctcctggctacaggccccagcaccacccagttccgagaggcgtaggtcatcatgtgggatgcccccctccccctctgagtccttttcttgattcctccaggtccggttgctgggtgtggtatcccaaggccagcccaccctggtcatcatggaactaatgacacgcggtgatctcaaaagttatctccggtctctgaggccagaagtggaggtcagttttgttcctcgctgtgttatcttgcttggtccacttttttcaggagctggcttgtaggaaacgtgtctttaagtccatttgcttctcagccttgagtgccttgagatatgctttcttgtcagttccctctatataggattgtccaagtgtaggcagactgggatctttggaaggtctgtctctgcatcccacccattcaacctccagcatctctgtgctcttgtttctgcatccccgctacccctgcctacatcttacaccaaccccagctgctctaccacgtgtcatggccaacccttcccacagcttcccactcaggccgggctggcctcccccactgactttccagtacacttgactgcctagcatacgtttactctcgaggtcctcggggtgagcctcttctttacctcagggtcatgaccgtggctggtaaccttttcagtaagtactcaataaaggtcactcttcaggttgtcagaggttttggccagagtgactcgcagcccggtctgtgcacgagaccactgtttcctcaggagcccattacacacacacacacacacacacactcacacacactctcacactcgcatacacactcacaaacacactcacacacacacacacacacacacacacacacgtgtacatgtgagcatgctatccttaccttgatggcacacactgctctccccttgccccgacactgcttcagacacttctcaaaccctgaacctactccccaggctaggcaataagccagtattgtgcctgcgcttttaaatgataaccattccagctgcatgattctgcttaaggctagtgagattttcaaactgtgaacctgagtaggtcctgtgtaattttttgattagtcactgtggagtgtccccttctgttgtgttagcccacagccagctttttagcatatgtgagtctgacttcttttttgttgttgttatttttgtgtttgtttgtttgttgttttttgagacagcattttgttttgtttttttttctgtgcagccccggctgtcctggaactcgcttcgtagaccaggctggcctcgaactctcagagattcgcttgcctctgtctcccaagtgctggcattaaaggtatgcaccacaagcacctggcttaagtttggcttctaagtcctcactaagagttaactgatgggggtgttgagaaatattgctggaccaaatgcctttcatggggctgcctcaggctctgaggctctcacttcggccctggctttgatacctgtggctaactaagcagcttgtctctgcattcgctgtaaggggaacttcctcttctcgggccctttctgggtttgctccccttctctgtagaagctttcgttttcttttcctccacaacgtaatcatctaccaagtgatggatggttccttcattttagttctgagtacctgttcacaaatgtcctcatgtgtgtttctgaagtttcaggagagagccacaaggcggtgtatgcattgatagcagagccacaaagctatgcctgtttctcccagcagcagcatcctaccccagtaatacccagtctacagaaggagactggagagtggtcctttaaggcacctcctaacatcagaatgtgcttaatgcctttgacacatgcccagagtaaacccgtaacttgtgctctcggggctgtttttgccattggttacctccagtcctcagttaacagatgcctctgggcctccgcttcctcatgtagagagagaaagggctatagagatggctcagcagttaagagcactggctgctcttccaaagaaccctgggtggattcccagcacccacgtggcggctcataactgtcggtattcactgttctgctggcctccatgggcctccgtgggcaggtagtgcacaaacacacatgcaggcaaaacacccacaaacataaaacaaaattttaattcaatgtaaagagacaggttggattacgaaagtctctttcggaagtaaaacttaatctttaaattcatcagatctaaattttgtctaactcatgtcagaattttttaaaaaataacttacatatatcttagcatcaatgtatactccacagttcagtgtatataccctagctccagtatatatacccagcttcagtgtatacaccccggcttcagcgtattctacctccccccattgctgtttgcttatttacttagataagtgtatggatgtgtgctcaccttaagaggctctaacaaaactaaagatttcttctttctcgagatgaagaaaagaatgacaacatattaccatgaactgacaaaatgtcagcccagccctttcctgcacataattaagtccccattgttggttgtttttcacatgttaagtgacagctctttgttgaacagttacacaacattacacacatacactgcagtatgtgtcatgagcctataagtacatgtcacggaactgcagaggtcctgctttgccatgtgtatgtaagaccctaacggtgctaaaggtcagcgtgacaaggaagcacctgtgatggcacatcctctgaggacatcccctagattataggaagagaccctggatcagagtgaaaatggttaaatagataaatgagctcaacttggtcctcacatgccatgtcgtctggagagtactcctggacgtgctagagggctgttgctggcctcctagagtctggcatctgctgagaacttagcaaccctggccaagagccagaatgctcttgagtgttcatcgtggtcagagcacaaagggcctatatactagcccaaatagtgtgatctccaagcctggtcatgctctcctgtgacttgagatacattaggaaatgagatggcttcatagtgttgtatgagaaggttttcagttagggaaactgaggcataagggtcatggttggttttgcacatgggagtggggtgacggagctttgggaattttttatgtttgtatgtgtgtagtgtgtgtgtgtgtgtgtgtgtgtgtgtgtgttcatgcatatgcatgtgcatacctacttagaccttgagggagttggttttcatcttttaccatacctgtcttgggacatgaacataggccccctgtcttgacagcaggtacctttcccactaagccattctcatcagcctcttagacataaatcttatcttattttgtttgtttgtttgtttgtttatgattttaccacttcttaggttaattcttttcagttcctaaggcagcatcttgccctcctcttcagacatgatattggtcctcattgctgctcagtgtccttggtcccctccaaggtgaactccacctgaactgtggttatcctcagtgcccgtagaaaacagtaatccaagaggaaagcattagtcttcctatctttgtaccttagaagaagggaatgaagacgaataagtcctggcagcttgcacgggaagcaaagctcgtggtaatccacttaggaagtgtgtctgtttcacgtggcctttgtacgggttctctgtccttcctcttactcacacttggtgatggcggaagccaaaggaacatggaaactagctggagctgagaatgcttaatgcctaaacttgctgattcacttcaaatcatttttgtcctgctccaaatagaaaagactaggggggagggggtggtcacaggcataaggaccagagttcaggtcgtcagaagccaggtaaaggctgggctggtgtggcagcacacctgtgattccagccttggaaggatgagttgggatccccagagcaatctatgttgaccaggttgggtttgatagggacaccctgcctcaaccagtgggtagaaggtagctcccaacataagcttcaggcccccacatccatgcacatgcatgcatgggagggggtgggaaaagagattgctggtccctagaagtgctagtccttcttagcaagtcctgactccctgcaggtgacctgtggtactcagactaagtaaatatgcatttacgactcctagtgtagacctacaggaggttaggggggaaaggtctccgttgctcatggctttgtcttgttttgaatctgcagcagaataatctagtcctcattcctccgagcttaagcaagatgatccagatggctggagagattgcagatggcatggcctacctcaatgccaacaagttcgtccacagagaccttgctgctaggaactgcatggtagccgaagatttcacagtcaaaattggaggtgtgtcctttgctttccagattggagcacaggctaaactgaactcacaggtgctgaggggactttgcagtcattagtctgccactggagagattttcattatgtccgagaggagcagtgcctcgcccttgagtgcaaagatgtatgtagtcggtgtgactgtctattcctggctgtaacccggagagcaccttaacatggtagtccagattggcgccctgctccccaggtcaaacgttacagaaataatcggggcagcttgcttcctgaagtggttttggcttgaggagaatgtcaccatccagtccacccctcaagtttctcagcttacaaagagcattgtccctgaataggcccatggggttcctaagaggccaggtgcccctatggtgaaaccctgcatagtgtaacaggaagggtatatggtggtcatgtcagtccgcgggagatcactgctgactgcttttcactcataggactggtcggctctaagttctctcctcctctcctgctgccaggaattgaaccgagggcctgatgtatgctgctggttaagccactgaggtgcatccttcagtggtagctccaagcacttggccgttctgtcgtgcatagcttcctgccatgaccttagctgctcagcctaccttgttgctgccaacacattgtgatcctaaaacactgattgcattacatctctggtcattggctagaaattctccccagccttacagcttgtatattggctttgtttttttgtcttttacttcaaaaaaaaaaaaaaaaaaaagtagtaacaaggttgctcagaaaaccatcctgcatatactttaccttcctactgcgataggccagcaggtcagaaacataacaagtgtccatcctgagaacaagcagagggacagacgatgtagcagaagcgatcagccactaacctttggccgcctcttgagcttgtgtcctggagatgttctgcttgcctcaaccctagaagtggtttttgcatgagccattccggcctcttagtaagcgatgggtgtcatctctagagaggtatccaaagtcgggctctcttctttgctgattgcaggagttaggggtgttggcatgcagctgtgttacagaacagatgtcagtcattggagttactgaagatacccccagcctgtctctgggtttgtacactcatatttggagccctgggagcctagcttggtgggcagcccttaagaggataccccgccccagagtttctagataagaggcgcatcctcttaaccagcctttgtggtccttcctgcctcccatccctcccttatgtgtggggatctagattttagtcctcagaggaaactgtgctcctgagtggcctgaggcaggtgccttccctccctgtgccatctttccccacctgtggagtgagagtggattgggacagagctggaggaggaggcgggctgggacagcaagcctgtgcccctgtcctcatcttaccctgctgtgcacccttctcagcacagccaggaactccgagaggctgctttggtcccattttgcattacagttggaaaaatgcttttgtgtgtgcgtgtgctttttgccattttaaatccaaatcagtaaggattatattttctgcttaaccatgtggcgcatttatgaggatattttctattataattatgatttttctttttagaattaaattgtgtgtgcccgtttgggaagagggggttgttctatttttcttttgcatttagggagagagattgttttctagaattccccttttatgcaagtcaaagcagatcctctcatttgcatgtctctggattaattcagagatgagatttaagcacttcctttttcctcctcgggcgagttctgcattcctcagtgtcccccagtgcccccatctcagggattacacaccctaaatcagttcaagagaggcagccagtagctcagacagcggtgcaagtcaattgtgttgggttaacatccatgcagagcaaaccctacatgggtttgctctgccttttttgtacctcacctctttgtggcaccacttagaggtgcgaggggacattttaaaggttgagcagctcttccctccagggaaggagaatgcaagagtttatgtgagggaaaggtggtgcggttgagtggaaaatcaaaaatggataaagacacagtaatgtgagattataaaaaagcaagcctgccattcaccatgatgaaactcagaaaatggaaaacattttcaaaactgagtgagagtattgtgttgggaaagggtgttgggtagtagctccaggagcctggtgaagaacatctcagctgtttgctgtccttttatcttcctgagttcttactgcgtacattgtcctctgtggagtggcaaaaggccttttcctcagcagtagagacacactaccaagtaaatggggtcttcatcctcccgtgtattggaccaaactttaaaactatatcctcaccctgtgcggcgtatattttcttgaaaaatcatggtactcaatgattttgcaaactgcctctcgctttaaatgttataagggagttaatttcttaaaggagcctgatgaagaccagagatgtcttgtattctcctgtgaagtggctgtgatgctagagccctctcagagtggagcaagaacatgtctcaccttgaatatggggggaaggacagggctctgccccaagacctggtccagccgagtaactgtgcatcttccctccagatttcggtatgacacgagacatctacgagacggactactaccggaaaggcgggaaggggttgctgcctgtgcgctggatgtctcccgagtccctcaaggatggtgtcttcactactcattctgatgtctggtatgagagtttccctccatggccagcttggaccttctcactcgtggctcattctcctccttgttttgttcactgtgaccaactgccagccttgagttcagctctcagtgccgtttagccctttgtcttttagatattcctgtgtggagtccattaaagcaaaaaaggtatctgtgggaagccaaggagtaggtagaaccaacatttccttccatttttagcaaatattgattatatttccaaagactggggaaatgccttcgcctctgcctgttcccccgtctctcttccccactctcagtgagttggtactgggtatgtatgtgctcctgccgcagctcacgaaaccttcagattgaaggcagtgctttatttaaacccaaaacttgagtcttggtggttgtggttttctgttggtctcatctgttcacacacacacacacacacacacacacacacacacacacacacacacacacacgatgtccattattcctgacccaaagcatcttccttaataataagtgtcttgcggtagtagcacactgaccagagggtgcaaagacttctctgtagtaatgtttactgcagttccttggaaacaccgtgtggaggtcatcgggttccaaaatacaactggagttcttggcaggcaggagccctggcacgtcgtccccctcctcgaatgtcagcaagtgtcttggctgtctcctcgggagatcccgttgctgttgtgtcacagaagaagtggtggttggtttattcaaagggcggatgaccacacagagaaactatctcagtagtgactgacatcagttctttagcctcgtgaacctttcccggtcaagagccttggatcttgtttggaagacaggtgcaaattggaaatagcctttgaatatgacccagcgcggcctggttgtttcccgactctaggatgaggtctgctctgcaattagcctctccgaggttacatcttctctgtcgaatcaaagaactctgttccatgtgtagatgaggtcgcaggagagggcacacctagggccacacttccatctgtttgttctaagcttcatttttctggaagcttggagatcaccttacaggatagggaaagagtgagcacagactcattctcccccgactctgggtaacaactgcatgccacagccagaggcgcacagggtgcttcctgcaggtttcctccacttggattacgtagccattacaaaccaataagaaaatgcgtgaagagaaaaggccaagtgctggggtgtttgagcacacagctggggacatcaaggacactagaacgtataaacggatgctcagctctgcctgaacctctgcttgctagaggaattgcagtcattttagaatgaattcacagtcagaagtaggtaaaaatccaaagaaaagttggaaggattttgtttgacttggtaggagaccttaggaacatggtgaggggaggtgtcctcaggtcaagccacaccctgaccatctgcatttatcacagctgttatttgagcttctggggagatgtcccagggactgtcccctccctcacaagggcaggaaggccagcccttacacgtcttcgttctttctgatttatactctctatcttcctgtccgtcctatgagcagactggctgctgagatggggtgggatggaatgggaagttggcctgcagggagtccaggaggagaacagggtgccagcaagagttacactggagctgacatgctgagtctgtagagtcaagtaaccagcaatctagacatggcagtcaagagctgggggccaggattgtgactgaatgcctgaaagcctgtggtgcaccagggaaagcatgaaagacaaggggagtcggcttggaagggaacctggtcaagaccggttgataaaaagagaaaaccacatacatcactgcttgtctcaggccggattcagacatgagggtgagcactgcagcctctaaagaatgcctccgagtgtccacaaaggctctgcaaggcagaacccaggcctgaaacacacaggaaacctgcttctctagggccaggtctttgaaaaccgtaactgcactgtctgtcttagtgactgccggttcccaaggaacttgggtctgattgctgaggttctgttcctgtctgacattgcttagcatcagttgggacaaaacccttttgttcctagaaggaaactgaagctgcgaaccaaaagttaagatgcagtcagaggctgttgctccagcttaggccaggatcctcagagtgctaagtggaaaatggccgcctcaggctcttctgtggggctcagccctgctagggttccatccgaagccttgtgttggcttgccatgggcagccttcttcattctagccatacagcctgaccataagagcagacaggccaggaagaattttgtgaaagcaagggttctccctgagaaggtgtgttcacactgagcgacagtgtgaccattgtctgtctgaagtgtctgcatgcatggatctcctttagttccatcttctgggctgacaggccatacctcacgcagtagaatcctcgctgcttcgcctgatgagttcatacctcagccagcctctagaccaagggactctttgttattgcgacacaccccctggccagtgtatcctaccccagttcccttcctgacacagccacctctgcagccatggctcctgagttctgcaggggacgagttttcatcttccttgacccaagtcaagatcctacagaactttgagacattccaggcccagctccctaccctacaaccagcaggtcagaattgctttggagagcccaagatacccattgttttaagaaccctgatcagattcttcttgcggaggtgtggagaaccattagcatcagtatttctaagctggcatgaaaggaatccctgaaggagatagttgagatgcttagctgtctcaggtcagtggccaggctgggacctggtcctctgcattccttgctgaactagagctaatttggcttatgtccaagtaatggctgggaccaggcactgaatgtgtccgctgtagatcgggctcttaaaactgtgagagatgttagaagcccctgaacattaggtacctcagccctgccacatgggttgcagtagccctacaggaagccttagcagtgacaaaggggaacagatgtcccacacgtagcaagctggctggtttgacatccacaaagtgcagtcgtcacattgaggacacttttttcaggacccagagtcttaagaaatgctggcaaggaggggacctggcccttcccatccctttctgagctgtccctgttctgttccacctgtaggtccttcggggtcgtcctctgggagatcgccacgctggctgagcagccctaccagggcttgtccaacgagcaagttcttcgtttcgtcatggagggcggccttctggacaagccggacaactgccccgatatgctgtatgtatttccagagccacccactctgttgcgtgtgggtacaggagaggattagaagggggcttatctatcctgctgctgctgagcttgttggatctgtgactttgtgctgctccttaatctcatcctgtgccccttggtccccccagtgctaattggcactttgcaccatggcgtgcgtctcagccaccactaccccccccccatctcccatctctgaaatacatgagcaatcctggctcatctttttcatgcaaaatttaatttttaagacaaaaatgcaagttagttactactgctgagccagatttgaaagctctccccaagcccctggaaggtctatacagcatgctcacacagagctctgtggtcaggagtcactctcttgcacgggtagactaaagctcagagagccccagcacaaggtcacagaccatctgctgtcttcttaatcccttcgagctgcatggacctacagcacggttgagctcatccctctttggacatgcttgtaggcacaccctagggggggttggtgagatggttgcctcgctccacttctgttaaaaataacatcctgcatcgattggttgtgagaattgtcactcgatggcagtacacacgtggtgtcacgtccacctccgtgctcagccagtgtgactcgagaaactccctgagataaacagcttacaaggagaagcatttcacattggctcccagtgtgggagcggcagtggggtccattggatttgtggcgaggtaactgttacggtagaaaaggtgtgtcagagcgcacagtctcactttgtggcttgaaagtgaaagggagccattagagaagccgttctctacctgtgagtcgtgaccccttgccccttcacaggagttacctgagaccgttagaaagcacagatgtttccattttgcctcataacagtagcagattacaattataaagtagtgttatagttgggggtcacaacgacatgaggaactgtgtcaaggggacacagcattaggaaggttgagaacccctgcattaaaggggttcacaatcttcctgctgtagtcctaaatcttgaagataactttctaatgacctggcagcctcctaggctccacccctcagaagttacctggtgttgccaaaattggggaagaatctttccacatgtgggccttttatttgtactctcttgagtagaggtctttctttgtcatctgatgttggtggctcagtgggtctggagaatgacacttcttttttttttttttaaaagatttatttattttatgtatatgagtacactgtagctgtactgatggttgtgagccttaatgtggttgctgggaacaaaggttgcccactccggtcggccccactcactctggcctaaagatttattcattattaaatctaagtacactgtagctgtcttcagacagcaccagaagagggcgtcagatctcattaaggatggttgtgagccaccatgtggttgccgggatttgaactcaggaccttcagaagagcagtcagtgctcttacccgctgagccatctctccagccccgagaatggcacttcttggagtgaggtttcaaggaagacatgaaggtattccgattggctcatcgagtacaggttgagagcagtggacttgcatttgatgtgcacacgttaaggtggggctcggctgttgctctgcatctcggggttaagcatcaaagcaggttcccactgatatgtcaggacccatacagtttcccagaaacacttcaaaacaggttcagctccactagtgaaagaatcccaggggggttgtcaagatttcttcacttctacacaaaagactctgcctacccctggccttctcttccccagcgcagcgctcactctcgtggcgccttggatggtgaggcaatgtacagatggagaggttgggcgtgcagtgcaggtggtgggcagagcacagagaggtgctagtgactgtactctgaatcttgagatgtcaaggtgtgggctagcatcgtcccccgtgaggctccaacagttgaaaatgtcatctcacaggctttctaatgaaacctaggaggagctcgatgaggtgacactagctagctcagggtctccagaagatagctgctggtcagaggcagggcttcccgcagatgaagatactccggtacgtggggtgattgtaaggagatcggatttactacagggcggtaggaacagtgatggttctgtgtagtgggagaggccgtggcttctctgtggaccactccatagactgagaggatttctctaatacactggagaggattggtggtgctggggaccgcacgctcactcttccttccagcccctctgctctgccactatgattcaggaatcaacaaggatggagtcagtgtagcccaggtatttaggataatcttcctgcctcaaactcccctagtgcttggattgcagccagtgttactgctggtgcccaactaaaactttatattggaatttgaattcctctcgttttcttcttataaaatactcctatttgggggtggggcgtgggggacttgttaatttgtttgtttttgccccagctgttggcaagtgtaaaaaaaaaaaaccctcttgcttgggagggccttacaaaactgaatagacagcaggccatattgagccactgactggtccgtggcctgctgtgccctgcagcatcttcacggagaacactgccactgtggcctttctaaactgacctccgaaggcgtacaggatgcagggggcctgcctagagaagctctgggttctgagtgctgttatagctttactttgacctcagtggtgcagggcagtcctactcgtccattgcgagaatagtcagtatgtgggcaaaggtgaaaggatggagtaggagcatggctgcctctgagtctgtgtaagggtgtgccccaccagccttggttaggataccaggatcagcactgtctcacgagctgagaaaccgttcaaaagagcaggtgtgagttttgttcctgtggtttgggcctggtcacaggagaggtattgttggtttttttcttttcttttatgctggagcaaacatttgtctgagaaactcatggaactcctgaagttgatccatccccagctgcctggatttttttttttttttttggtatgaatttaatatgcttgggaaggagccacctgctatgggaaaggcagtggacttcctgttcccagcatagagaggaggaagcttacacacggaggccgctcttggatgcgaaatgattgattcaggaggcctttttgctttgccattcagaacccccttggcagatcggtctcctttctaagaaaagaacagagtgaagggaagggagccgggctgctccagtagggagtgtggtgccctgatttggctgagacgctgatgagaggaagatgtgttctgtgaaaggatttttttttttttttttggcacagtaagcaaacactcttgggagtagtctgaagcctgttgggtctcacacgtagaggaaggacttccatggtgtggttctgaggcaggaacagccctttctctggccatgctttggtctcgtcgtccctacacatgaaccagtctgcttcaggagtagctaagtatccagccttgtgtattacaaagtgttctagctttagaggaaaggctgccaccaaacaccagggtatccaggtctgactgtcagtgcaatagctcagtttgaattgatctagcaaattctgtgaggctgggtcaggggagcctatcattcccatctttacccctgggtttcagggctttggacacagatttgtcagtgaaccctgctgaggtcaggggccagtcccagagttcacggaacctggagatcctgaaacaggttccagccctcgtgctgcagaatgggacgacgatgtaagctcagccacagaattgatccatttgatccattaacatctccagagctcacatgccaagtcttcgggatgcgggattcaggaaggaacttgaacgttttactagccgagcgtcaccagctcagatgcagctgagacatactcagtccaatctgactacttctgtacttttcctctccacccccaggaggctgggaatcccagtctggttttgtcgagataaattgaatagagtcatcacaggcaggtgacagtgtctgctggacggtccctggcatcgactgtgtgccagcaactgggctatatagcatccccgtctaggtcctggccctaaaacaaccttagttgcttgagatgctagaggaggacccactcagtcccgtaggcccttctgaaagtctgatccctgctaagagtcactactacctggtacagtactaacaggcggcagcaggggtactgtatacatgaggtcctgggcatatttcagtttgccagtgcctcacatagatggcagcctgtccagctgaagacacggggtgtgcttgggggctcagaagccaagtgaggaatgggcatagcggtgggcgtacaccccaggatagcactcacttctagagggataggtgtgcaccttcacagagggacatattctgtaaatcgcggctccagctcatcagagctgtccagtggttttaaagtgtgctttttagagggagcattttatcagcttattaatcccagagtctactggagagttttcttgtggaaagagtatttaaaaaaaacaaaacaaaaaaaaaacaaggtcttaaatcgcacagagcaaaaaagacttccttttatgggcagccctggaagggctgactctgggatgatttaaaagaggcatcacatggcttgtttttactgatgtcacctcatccctaccctgcccgtggcacctcctcagccccaccccccacccctggccacggggcttggggccagacacatctcatgttcttgcccccggttgcacttttctattcagggctaggcctgtcagccagagaggaaattgcagcctggccacggagctaagctccttgtgtctgcttcccattccgattaatccttcgggaaatgatggggaccggggagaacaagcttctgcagcagctaaccagagcaagccggctcaggagatctgactgtctgtagacagtcgggagagcgccgtctgctagcaagaccatggttacttacagtaaagctgcattgtctgacagcctcacgccgttccagctcactccctgtgtgacttcagacaaatgatcaaatgctgtggttggtgcttttcccttatgcatacaatgaggatgtgttgtaatcattggagtaaagagacatctctggctctcggggactgacgtgactcccgggcctagagcttttagtacctacctgcaacctgtcatgtgccactaggaccagtcacttagagccagtgagaatacctagttagcctggtctttggtccagtttgttttcctccgtcgagacattggccacttaattgggatttttctttacctccagaggagtaggcagtaaatattgtaaggttcctagctaaacagccgctgtctcaactactcagcctacaaaggagcttagaaacagccacaggtgctgtgtaaccagctctgctctggtacaattccgctaacaacaggctccaagctgcacctggctccgctgtaattggttggcttcaccctgggcctccagagtgcttaattcttggaggtggatctccaatgcaccttttttcagttttaagataactaccttccacctggcctgacttgatcctacagagtccaaggaagctggccagatgggcaagagtggctttctctgcacaggcaacttcatgcctaccaataggttgctttcacacgcctttacccctgtgggattatttgctttgtaaagaagtgtcctggtggcccagtgatcagcctggtagaatgttagaagcctgttcagggtgctttgagattcctatatgttcgaacttccatttgtgggttttagtgtaaagcgtctgttgagccaggagtttttataaaacacagtttcctggaggagcataggtggagagtgctttggtctcacacgcctgtgattgagagctgctaggtacccctttccctcagaatcatgaccaccctgtccttgttttctgtcgggcctgtgtgtctgtccatccgtcagagcccaggtgtggttcactgcatggcctgggttgcagaactatgacttgacgagggcatcaagggaatgaacaaagagtgtgcacttgggtatagagaaacggggactgcgtggactgggctctggaagctcagtatgtttagcgtatatatttgaacagagaggcagattactgcatgcagataaacaaggaagcaggattattatatacagctgaacatggaggcaggtttagccatctctgcagggaagccgtcttgaggctgtaaacttccaggggaaggacgtgacagtggacatattctgcacacactgtcagcacttgcaactcggacctcaggggaaggctttaccatctctctaagcaagcatcactggggtagactttgccactcccatgggactggggcattggggtccttgacatggccttgcacgtgtcagcaatacacaccttcacttgcttagggtctcctccactgtctactcccaggcctttgctggtcaggacggtggctgcatgagcagcctttctcttctgtcctgtgtgccagctggcccatgtaactctcgaggacgaggaagctttgcaaaggtttgtgaccttgtgggagtgatggaggtacgtcatgggctttatactgtttttaccttggccttgtttgtagaagaaaatgatgcttaggacttcccttggttcgttggcatccgacttgaagtttctattagaactctgctcctgggcatcctacatcttcaagacagggatcttccttcatgggacatcctcagtgagcaggtgctggcgtgagatagcaagcttgggatatgtgctccgtctgtctagcacccctgccgcctcctccctcaggcccactgccaggggtgccctggtgccaggaagaaacttagaaatagccctggtgtgagatacagagaatggtgcctgtcaggaaagctgtgattctcattagtgagagagagaggtttcctcttctggttaatgtgtggccagaagaggtgcttagacaggaagtgggttttatctcttagcagtgctatcattaatacaaccgtccatggtggaatcggtgaaccaagacttgaagtgagtctgggcttggcactgtggctgggcctgggttctgggcaagatacatggcaggatgccagaggcatccagatgggaagcagagagtgcagaggtggtacagttcttctgggtctctctggcagctcattcctttcttccccatcactcccttaggtttgaacttatgcgcatgtgctggcagtataaccccaagatgcggccctccttcctggagatcatcggcagcatcaaggatgagatggagcccagcttccaggaggtctccttctactacagcgaggagaacaagcctcccgagccagaggagctggagatggagctggagatggagcctgagaacatggagagcgtcccactggacccttcggcctcctcagcctccctgcctctgcctgaaagacactcaggacacaaggctgagaatggcccgggccctggcgtgctcgttctccgcgccagttttgatgagagacagccttacgctcacatgaacgggggacgcgccaacgagagggccttgcctctgccccagtcctcgacctgctgatcctcggacacaccgaagcacgcgccaacagtaacgtgtgtgcgcccactcggtgggcgggggggcggggaggggagagcaggttgtaacaatctattcacaagcctcctgtacctcagtggatcttcagacctgccattgctgcccacgggagacggcttctctgcagtaaacacatttgggaccttccttttttcaatatgcaagcagctttttatttcctttacccgaacccttaactgacatgggcctctgcaaaccttaatgacaacacttaatagcaacaggacactcgagaattgagtctcttcgttctctgcctttttctctcctctgccttccctctctgccctctccccttccacttccacgctctcctttctctcttttctgctttacagtggaaaaatgtttgtgaacgcccatctgggaagccttcttttttaaaaaaaaaaaaaaaatcagattgacttaatggctgcccctggggctcctcatcaccccgcatacacctgcctgacaccgtaggtcttttaaaaaaaagaaaaggaaagaaaaagaaaaaaaattcacacactgagatggaatttttttaaccttttttagggtcaccccaaaatttaaaagggccattgttcatccgtggctatcatttttcacgctgccatttttgccaaaatcctgttttcggtttggtttttctcacacgcatatactccctgcgctgatttccctttgtccagaggcgtgggatgaaccatggtgtctggttgatgataacatttgagagacacgtgctgaggccccccactgtgcccggctctcccagcccacatctcctgggtctcgttgcatggttaccgtttgggagaactggacaagatggaactcgccctccttgaagaaggggaaagcagaactggttctccacccctcccccacccacagcaccccaagaattctggaggaagtggccatgggcaagcttgaaggtcaggttgtgggtcaaggtggtcctcacaccagcctcgtccccctccccgacctccctcctgcccctcccctgagggccacacactcgaaagggttccggggactcggcctggctgttggttatggatgttcgaggaagggattcagagccacagcagcctggagccgcccgcccaggcagtggatccaagcagtgtgagctttcacatggtctgttactaggacttcttcatgggtctctcagttctatgttagaccgtgaaacatttgcatacacatcgtctttaatgtcagttttataacttttttacagttcagatattcatctatacatctgtacaggaaaagaaaagctgctattttttttttgttctttatctttgtggatttaatctatgaaactttcaggtctaccccttcttcctttctgctcactccaagaaacttcctctgcttatcactagagtgtggtttttcttcctcttctccggcaactgatgcttctaggacataacttgccgtgaactgtttgatgccttttttataaatacatctcccttcccctgctccctgcagccccattcattaccctctaacccataggctctgtgagcacagtcacaggtgagggagtggggagggtgggagtccagagcccacagactcctgggccctactctctcctttccttgcttccccgcacacagcatctgctccagggcaaggcatgccacaaactcaggtcagaaacaaaaaggttaaaaatcccacacatcctggtttagtgtttctagtccctgttgttgaaagtcacactttgctttctctccttgctttggttcacacacacacacacacacacacacacacacacacaccccaatttgggaatacaatagcagttttaactgcagacaatagtcattggattattatttaaatgaatatttgatctttcacacacacacacacacacacaatagctgctgagtccccaggatgcagcagagctggtccagtggcccatctgccacctccttcacaagcaggcccacctgtctttagaaccagcttgtctgaaggggtggcctccctgggagcaagatgtaagacaccaactccccatggccaggagcagcaactttagtgggtgtgctataaagcccactcccgggccggaaatcccaaagtggagtagagctgaccctacagtggccctagagccccttgctgttcctccttaaccagaatcccggagctctgggcttggaggcccctccccctggagtggggttgggggaggggtcctgtcttgtttcgatttagcacttcttaccagagcagtgacagcgcgagagatgcttctgggtggaaatatttaaattaggagtaggaaaactgttggatgatgatggttgcagttgtgactggagattagatgcaggaaggaaagctggagttgtctggcttgtctgtaggttcaggcttgtggctcttcctagcctctgcccttaaagggaaaaggaggggggaagcttattaagaaggtatttcatgtaggagttttaatttattttgtgatacctgttttaatcactgtagaaaagcccctgttatggatttaaatgctgaggaaagggtacatgtatctctgtgtatgtgtgtattagatgggacagttttggggggtttttttgggggggcttgtttttcaaacatttatctacctcactcttgtttttcatgtgtgtgtgtgcatatatatatatcacatatatatatatatatataatacatctcacacttctcagtacctgacagtaggccaatgatcctggtaacctcagccactccgcaggccacatacccaggtgaagcagagaggggccaggctggattctggggttaaagcaacgctaactcaaatgagcagcctcttcctgctctgtctccaaaagcccacttttcctagggcaactctggtctttctcctcacctggtcccctacttttcaacccagcagtcaccatgagcacagcacgccagtggaggggggctccccggcccatcctcagctggctgactttggaacagaactttctctacagattgaatgactgacaaattctatccctaagagagcaggtactcccaggttttgagggcaggaggcacccacacgtaggttgtcttgagagtcccaatgtgtgcacatgtcagggtgccctgtcagccccctcagctgctcctctgagacctgcaccgaggcaggggcatgccaccattgctctcctggcattggttcctcttggaggtacagcggtcagggagctcccccttctgcttctgacagaaggccagtataaaaaagggggcaagacgaagcctgtgccccctgcaggctgctgtccttccctcttcttccctcccttccccccccccccccgcaacccccagggctaaacaaggactgaccaaatcttgaggctggaaggccagtggttggcgcctagccttccccgtgctctgcctctgtccacccatccgtctgctgctcacaggtggacagtgcaatcctcaactccagcagctgctcttacaggccctggggacttcagctggggaccgcggtggctaatcttttcccccagtatggagaaactgcctaacagttcggttaagctcaggagcccttcgcctcctgctggaatgctgcccttctctgggttcctagatgctcacagggtcactgggagatactgtttgatcagggttttcttctacactgtaggtgacactctgggatagtggcctatcctctcgcacatacctgccggttttccacaactggatttctacagttcattcaattgattttaagggtttttttttttccttattattattatttttgaaactgtccgagttgttggtgttttgtttttgcgtgggtgttatttttttttttcctttaagtagagagacggcaccaacagcgtagtggccgtcataaactaatgctccagaaacacttcaataaaaagaaaaggttggcttgtacgagggtgcagtcgttctgctggactgacgcgccccgactattgcaaggcatcatatccacagttctagcctgatctcatgctgatgttccccgcctcttcctgatttttctctttacaagcttcaagtactcctaccaagctgagtcgtggcctttttcactcgagcccacccccacccaacccccccttctgataggagctcacactgcttgaagtcacatgaaccactgaggcacagcatgcaggtgacgtgaacatccaggtgtgcccccacacagcccttcctgaggcgtggagatagagctgaacctgagctgggtggggcccacgcttcgccatctcctttcaggaatgtcctaacattggattcagagatgggatgaggctccctccttgagatataaaagactgttcaaggttgctctttttcctacctgcctgtttcttatgactcgggactgttcaacggtaggaaaagcagcttcataaactagaaaagcgatcacggtgagacgagcagatggcggagtggtatacaggagtttttagggtgggctgacagatggatgagctctgtatgatgccaagtcctaagccagcctgagctcccggagcctcggccttagcagcccacctcttttggcagtgcctgtgcctgaggtaagcaagcagtggtggcaaggtcacactgagctcatgtgggtgaggagtctaggatgcttacccaaggccctctgttgtcatcgttgggtcctctgagagtggccacagagtgctgaaagcatctcctttcctaaacactggcatccaggaggagacaggaccactccatcaaaatgctttggcccattttagcagtaatgaatttacggtttgggattttttttttccctttggtttttgtttttaatgttacttttatgtttgtctgatgtcttttcatttcctgggctaagcagctgcattgggagacctggaccagagagatccaccccttaagaaccagtgatgatggtcaaacttttaacagtccactttgaactaggtggtggtacaaatgagaacttcaagacaggatgtctgtgtaaaattgaacctctcttgccagagatgctgaagatacagaccttggacaggccaggggtctttgctttgggcttccagcttggatgaccagttggcgatttagagaaacgaacattccttgatgggatgacagagtgacggtgcagtaggcacccttggtaaccggcatcgtgacatgacgggaattgctgacagagggttaaagggcctggaagaagcatggaccatatttggacttgatggtgtctgaaggtgtcagagcatgtggaggctggggagtcaactgtgggcatttggtttcagataagacacttggcatcctgctctggaaacttctccttagagctaagtcacgtgcggaaggactcagactccatcacactcatcagatgagttgtcggtctggggcatgacgttagggattgatttgattttggtttctgtgagaacttcataatcactgatttgtgtgtccacatttgtgtctgcatctttccagtaaaccattctttaaattactcattatcctttcaatagggcttctaagtccagtagattacgggtagtcgttgacgaagctctggtttacaagaactaattcaatgtttcattgcatttttgtaagaacatagaataattttataaaatgtttgtagtttataattgccgaaaataatttaaaaacactttttttttctctctgtgtgtgcaaaaatatgtgtttgtggtctttttttccccctctttgtttcctttttcttttttgacacttgtttactagctagctttacaatatgccaaaaataaaaaataaaaacttaaaaaaattaattaaaaagaaattctccccaggaccaattgtggttcaccctctttcccacatgctttctgctctagtttgtaaaaaaataaataataaataaataaaacaaaaaaaaataaaacagataaaaataaaaacaaaacaaaaggaatgccagtggtttaaaaagtacttctgtattcttcagtatcttgatcttggaaccctttgctggggaaaggaattatctgggactcactgttccctgtggagtgtagcagcccaaacagatggaaagaactgctggccatggaaatagcagtgtgtggccacccagcaaagagatggcactccatggtgacatctggctggtatggctggtcctagctctgcaacactatggagatgggagggtttcaggacactggaatggcttcacagtgatcacatgactctgatgtgcagcccgtgggcacatgtgcctcagatcctaacgaatgctgtgcctacctgtatctaatggcgaacgccgaaggtccattgttttctaatacagaacaaactggtaacaaaaaccacaatgtgtgtcccctcgcccccttttttcaaattaagatccatgtcctttggctccccgtgcattattggccatgtctctctggttccacaagataccgttgttgaaaacacatggaactttctaacactgcaggaaaaaggtctgggaaccatttgtgggtttggtttggtctttcagtttcttgtgggtgttgggcagtgtgcagacacatgtacaggtggagtaggtgcctgcctggtgacaacccctgtctgcttcctatgccagtgaggttgaagtaagagttttgccagagttcatctacctctgggatttaaaaaaacaaaacaaaagtcaaaaggctcgatggagcggacacatcgccaataatgcatttctgagttttcttgttaaattttttcttaaaaaaagaaaaaaaaagtctaaaaaagataataatatggccaatttgttacataaaataactttctgtgtataaattattcctaaaaaaaaaaaccctctgtttatatataaaagaaaatcagtagatgaaaaaaaattcaatgtttttgtatattctgttgtaagaatttattcctgttactgcgacatactcgggattctttacattatgaaaaaagaaactttgtctattttgaatggctaaagctaaggccacttgagtctattactctgcttttttctagtagttaaagtaccacatggattaagttaaataaaagaattctgtatgcacctttgtctcccagttggtttcctcttcactctggaaccatcccccacttcctcgggaagctaagcctcgtgtgtgtgtgtgtgtgtgtgtgtgtgtgtcactcaggaatgctcagcacgagaactgacagccgggaagctgagcctcgtgtgtgtgtgtgtgtgtgtgtgtgtgtgtgtgtgtgtgtgtgtgtgtgtgtcactcggggaatgctcagcacgagaactgacagccgggtttctccaaatgcaaattgctgttgagtttgaagaaagctactttcccctcacttactcagctagaggaaaatcaggaggcatgaagcacaagtctcagggctgcttcacaggcttggcccctggaccttgggttgacaaaaggccagggtggctttggtatgtgtgagtctgggggtggggcggggttgccagaaacttgcgtgctgcgtgcattttcctgtccttggtagtgcttcacagttggggtgcctgagggtgctggagagagaaccaaggaaaatcgggctgttcctggctgcaaggtgctgagtcgttaggttgcccacaggtaactctgagatgctggctctccatctttgccatgggaaggtgatgaatggtttgggttggaaaatcaaccaagccatacattctagactcctgggagagtaggtagccgcctcactgaacactgagaatgggggaactcagtgacaaaatcaggacaccgggtgaagaactgatcgatgagacataggtggcagaagcaaatcagaggcaactcaagacccagtgagcctcccagtagcctaacccaatgggtatttggatttatagtcaaaaggtcgttggaagagcacaccttccaatctcgtcctgccccgggggttttgtttaccagatgcccagggagcttcactagatgacgctgaaggtcttatttctgtgctatcctggattggtactatgcctccagtttaccaaaaacctgcctggccggagccagctgcttttaaggatgaaggtactagactttttttttttttttttttttaagatttatttattatatgtaagtacactgtagctgtcttaggacaccccagaagagggcatcagatttcttacggatggttgtgagccaccatgtggctgctgggatttgaactcggtgaactcgggatcttcggaagagcagtcggcactcttaaatcactgagccatctctccagccaggtactagacctttaaaagactattaggaatcgagagattgctcagaggttaagagcacgtgtgctctcccaaaagaccagggttcaattcccagcacctacatggcagcttacaattgtaactccagttccaagggatccagatctaagggtgagatacctttacactaatacacataaaattaagtctttttttttttaagttaggtgctctccttggagtctgagacactttttttttttaatctttctgaaatatcgtttctctgtgtagccctggctgacctggaacttgctctgtagaccaggctgtcctagagcttagagagccacctgccttcctacggagctttgtcattaaaggcatgtgccacccctgcccagctaagtcacctattacgagcgttctagaattaatttattattcgtttttttaaacacctgcttactagctagattcataatatactgctgcccacccacctcaccccccccccaaaaaaaaaaagcaaaacaaaaaaagatattcaagccacaagctgagggcccatactacacctttttcttttttttctttcctttttttggctggtgtgttgttggtgacacattctctgggtagtcagaaccaggactttttattagtcgggtttatagatgaacacagagccatgcttcagacctcccaaccattaaatgaccagcaaaaaaacagtgttctacactggctcgcaagcatacaaaccacccactatcagctgtgactgaacaggatgcagtgtgtattgtcgggggatgccaagctatttacaaaaaatacaatgcaaatgggcgcttagggtcttgagaaactggagaggcgcagagggggtggaagagctgctcatgggggttggggtctgggcctctgttttttgaaacagagtttctctgtgtagccctggccttgagctcagaaatccacctgcctctgcctcccaagtgctgggtttaaaggcgtatgcccggcgttttcttttaatgtgtctgaccaggtgccaagtgacctgaagtgtcactagagcccactcctggaacaaagggacctaaggtttggagcaggagctctttgctcacagagaggggtctccagccaaggcaccagccaagcagctaggttctgtgctggtggcctgtgccatcccagtccaccttgggctttttttgtttgtttttttgtttttttcgagacagggtttctctgtgtagccctggctgtcctggcactcactttgtagaccaggctgtcctggaactcagaaatctgcctgcctctgcctcctgagtgctgggattaaaggtgtgtgccaccacgcccggcttccaccttgggctttgatctgccttagtgtggcttggctctgtcatatgtaaaatgtccttggtttatttgcaaaggaaatcttgtaaagtcattttnnnnnnnnnnnnnnnnnnnnnnnnnnnnnnnnnnnnnnnnnnnnnnnnnnnnnnnnnnnnnnnnnnnnnnnnnnnnnnnnnnnnnnnnnnnnngtggctctttggagttacaaaggtcataacttcccctagttaatcctttatgaagcatccgcctttggggattttcttcttgctttagacactaaagtaagattgtgattctgtgagtccacacccccacccccacccccacccccagccttgtaactgtttcccttttttagagcctctcatagcacagctggcttctccgtccaagcctgaaacactccatttcatctaaggaaggcatccccctgctgcttcccttaagctgctgtactttgagtctggactttcccgatttcttccagcatttcttggatgatgactcgcaaggctttgcccagaaggctggccgagagccagtgcgacagaggagggacatggatgagagccgcatgcccagtcccaaggtgcagagacaggtagtaggtgtaatcgcagatgtacctgcaaccacatgaaactccccattactcccagatcttgtcgatgccagacacagtaagtacaggtttcatgaagcatgagtttatggatgcccacatgcctagtaccacttgagtttggctcttctgatagagaaaggacatggcctaagaacactccagacagacattggttcttgggctcagagtctaatgaccagcaagcggtcatgacagaattgagccggcctttcaaacaactagtggtaagacaccttcaccacaatgactcccttactgccaactcccctcgggtatttctttatccctagaagagaggaaaggtgcttagggggaggggctgtcagcgtttggagaagaggttaaattaatctgcagtgcctgtgacaaataggatgcctgtgaccaaagcagccacatggacaacataggatagcctcttgaggagagagaagggactctgaaggataatccctctctcccatctgtttggcacttggcacacggagtcctgaagtacctgcccgcatctcgggaaaaggccacttcgacattctcaacagccacacgccggcagacctccttcatgttgacaacagacagcctcacttcggggccaccggggaggcacactccatcctccggctggaagcctcttacatctgaatcccgatagcctcggttcttaccacactgttccagaaagatggccttggcagaagagtccatgcccacatgcacaacaagctgtagggacatacatatcagaaatcccaggacagacaccagatcactagatgtgaagagaggtccagtgatgacagagccccgctaaacagatctagctccaagtcctccaggagccctgcttaggcccctaagtaatggtgctgatacaaaaggaacacatctttgggttgaattaggcatgctacatctgcatttaagg

SEQ ID NO: 46 - DNA, 4907 bp, Mus musculus
ctcacagtgtgcccaagtgtgtgcgggaagcgagcctgcaccgagaacaacgagtgctgccacccggagtgcctgggcagctgccacacaccggacgacaacacaacctgcgtggcctgcagacactactactacaaaggcgtgtgtgtgcctgcctgcccgcctggcacctacaggttcgagggctggcgctgtgtggatcgcgatttctgcgccaacatccccaacgctgagagcagtgactcggatggcttcgttatccacgacgatgagtgcatgcaggagtgtccctcaggcttcatccgcaacagcacccagagcatgtactgtatcccctgcgaaggcccctgccccaaagtctgcggcgatgaagagaagaaaacgaaaaccatcgattcggtgacttctgctcaaatgctccaaggatgcaccatcctgaagggcaatctgcttattaacatccggagaggcaataacattgcctcggagttggagaacttcatggggctcatcgaggtggtgaccggctacgtgaagatccgccattctcatgccttggtctccttgtccttcctgaagaaccttcgtctcatcttaggagaggagcagctggaagggaactactccttctatgtcctagacaaccagaacttgcagcagctgtgggactggaaccaccggaacctgaccgtcaggtccggaaagatgtactttgctttcaatcccaagctgtgtgtctccgaaatttaccgcatggaggaagtgaccggaaccaagggacgccagagcaaaggggacataaacaccaggaacaacggagagcgagcttcctgtgaaagtgatgttctccgtttcacctccaccacgacctggaagaaccgaatcatcataacgtggcaccggtaccggccgccggactaccgggatctcatcagcttcacagtttactacaaggaggcaccatttaaaaacgttacggaatatgacgggcaggatgcctgtggctccaacagctggaacatggtggatgtagacctgcctccgaacaaggagggcgagcctggcattttactgcatgggctgaagccctggacccagtatgctgtctatgtcaaggctgtgaccctcaccatggtggaaaacgaccatatccgtggggccaaaagtgaaatcttgtacattcgcaccaatgcttcagatgtcctctcagcatcaaactcttcctctcagctgattgtgaagtggaatcctccaactctgcccaatggtaacttgagttactacattgtgaggtggcagcggcagccccaggatggttacctgtaccggcacaactactgctccaaagacaaaatacccatcagaaagtacgccgatggtaccatcgacgtggaggaggtgacggaaaatcccaagacagaagtgtgtggtggtgataaagggccatgctgcgcttgccctaaaactgaagctgagaagcaggctgagaaggaggaggctgagtaccgtaaagtctttgagaatttccttcacaattccatctttgtgcccaggcccgaaaggaggcggagagacgtcatgcaagtggccaacacgaccatgtccagccgaagcaggaacaccacggtagctgacacctacaatatcacagacccggaggagttcgagacagagtaccctttctttgagagcagagtggataacaaggagaggactgtcatctccaacctccggcctttcactctgtaccgcatcgatatccacagctgcaaccacgaggctgagaagctgggctgcagcgcctccaacttcgtctttgcgagaaccatgccagcagaaggagcagatgatatccctggtccggtgacctgggagccaagacccgaaaactccatctttttaaagtggccagaacccgagaaccccaacggattgatcctaatgtatgaaattaaatacgggtcgcaagtcgaggatcagcgggaatgtgtgtccagacaggagtacaggaagtacggaggggccaaactcaaccgtctaaacccagggaactatacagcccggattcaggctacctccctctctgggaatgggtcatggacagatcctgtgttcttctatgtccccgccaaaacgacgtatgagaacttcatgcatctgatcattgctctgccggttgccatcctgctgatcgttggggggctggttatcatgctgtatgtcttccatagaaagagaaataacagcaggttgggcaatggagtgctgtatgcttctgtgaaccccgagtatttcagcgcagctgatgtgtacgtgcctgatgaatgggaggtagctcgagagaagatcaccatgaaccgggagctcggacaagggtcctttgggatggtctatgaaggagtggccaagggtgtggtcaaggatgaacccgaaaccagagtggccatcaagacggtaaacgaggctgcaagtatgcgtgaaagaatcgagtttctcaacgaggcctcggtgatgaaggagttcaattgtcaccatgtggtccggttgctgggtgtggtatcccaaggccagcccaccctggtcatcatggaactaatgacacgcggtgatctcaaaagttatctccggtctctgaggccagaagtggagcagaataatctagtcctcattcctccgagcttaagcaagatgatccagatggctggagagattgcagatggcatggcctacctcaatgccaacaagttcgtccacagagaccttgctgctaggaactgcatggtagccgaagatttcacagtcaaaattggagatttcggtatgacacgagacatctacgagacggactactaccggaaaggcgggaaggggttgctgcctgtgcgctggatgtctcccgagtccctcaaggatggtgtcttcactactcattctgatgtctggtccttcggggtcgtcctctgggagatcgccacgctggctgagcagccctaccagggcttgtccaacgagcaagttcttcgtttcgtcatggagggcggccttctggacaagccggacaactgccccgatatgctgtttgaacttatgcgcatgtgctggcagtataaccccaagatgcggccctccttcctggagatcatcggcagcatcaaggatgagatggagcccagcttccaggaggtctccttctactacagcgaggagaacaagcctcccgagccagaggagctggagatggagctggagatggagcctgagaacatggagagcgtcccactggacccttcggcctcctcagcctccctgcctctgcctgaaagacactcaggacacaaggctgagaatggcccgggccctggcgtgctcgttctccgcgccagttttgatgagagacagccttacgctcacatgaacgggggacgcgccaacgagagggccttgcctctgccccagtcctcgacctgctgatcctcggacacaccgaagcacgcgccaacagtaacgtgtgtgcgcccactcggtgggcgggggggcggggaggggagagcaggttgtaacaatctattcacaagcctcctgtacctcagtggatcttcagacctgccattgctgcccacgggagacggcttctctgcagtaaacacatttgggaccttccttttttcaatatgcaagcagctttttatttcctttacccgaacccttaactgacatgggcctctgcaaaccttaatgacaacacttaatagcaacaggacactcgagaattgagtctcttcgttctctgcctttttctctcctctgccttccctctctgccctctccccttccacttccacgctctcctttctctcttttctgctttacagtggaaaaatgtttgtgaacgcccatctgggaagccttcttttttaaaaaaaaaaaaaaaatcagattgacttaatggctgcccctggggctcctcatcaccccgcatacacctgcctgacaccgtaggtcttttaaaaaaaagaaaaggaaagaaaaagaaaaaaaattcacacactgagatggaatttttttaaccttttttagggtcaccccaaaatttaaaagggccattgttcatccgtggctatcatttttcacgctgccatttttgccaaaatcctgttttcggtttggtttttctcacacgcatatactccctgcgctgatttccctttgtccagaggcgtgggatgaaccatggtgtctggttgatgataacatttgagagacacgtgctgaggccccccactgtgcccggctctcccagcccacatctcctgggtctcgttgcatggttaccgtttgggagaactggacaagatggaactcgccctccttgaagaaggggaaagcagaactggttctccacccctcccccacccacagcaccccaagaattctggaggaagtggccatgggcaagcttgaaggtcaggttgtgggtcaaggtggtcctcacaccagcctcgtccccctccccgacctccctcctgcccctcccctgagggccacacactcgaaagggttccggggactcggcctggctgttggttatggatgttcgaggaagggattcagagccacagcagcctggagccgcccgcccaggcagtggatccaagcagtgtgagctttcacatggtctgttactaggacttcttcatgggtctctcagttctatgttagaccgtgaaacatttgcatacacatcgtctttaatgtcagttttataacttttttacagttcagatattcatctatacatctgtacaggaaaagaaaagctgctattttttttttgttctttatctttgtggatttaatctatgaaactttcaggtctaccccttcttcctttctgctcactccaagaa

SEQ ID NO: 47 - protein, 1150 aa, Mus musculus
LTVCPSVCGKRACTENNECCHPECLGSCHTPDDNTTCVACRHYYYKGVCVPACPPGYFEGWRCVDRDFCANIPNAESSDSDGFVIHDDECMQECPSGFIRNSTQSMYCIPCEGPCPKVCGDEEKKTKTIDSVTSAQMLQGCTILKGNLLINIRRGNNIASELENFMGLIEVVTGYVKIRHSHALVSLSFLKNLRLILGEEQLEGNYSFYVLDNQNLQQLWDWNHRNLTVRSGKMYFAFNPKLCVSEIYRMEEVTGTKGRQSKGDINTRNNGERASCESDVLRFTSTTTWKNRIIITWHRYRPPDYRDLISFTVYYKEAPFKNVTEYDGQDACGSNSWNMVDVDLPPNKEGEPGILLHGLKPWTQYAVYVKAVTLTMVENDHIRGAKSEILYIRTNASDVLSNSSSQLIVKWNPPTLPNGNLSYYIVRWQRQPQDGYLYRHNYCSKDKIPIRKYADGTIDVEEVTENPKTEVCGGDKGPCCACPKTEAEKQAEKEEAEYRKVFENFLHNSIFVPRPERRRRDVMQVANTTMSSRSRNTTVADTYNITDPEEFETEYPFFESRVDNKERTVISNLRPFTLYRIDIHSCNHEAEKLGCSNFVFARTMPAEGADDIPGPVTWEPRPENSIFLKWPEPENPNGLILMYEIKYGSQVEDQRECVSRQEYRKYGGAKLNRLNPGNYTARIQATSLSGNGSWTDPVFFYVPAKTTYENFMHLIIALPVAILLIVGGLVIMLYVFHRKRNNSRLGNGVLYASVNPEYFSAADVYVPDEWEVAREKITMNRELGQGSFGMVYEGVAKGVVKDEPETRVAIKTVNEAASMRERIEFLNEASVMKEFNCHHVVRLLGVVSQGQPTLVIMELMTRGDLKSYLRSLRPEVEQNNLVLIPPSLSKMIQMAGEIADGMAYLNANKFVHRDLAARNCMVAEDFTVKIGDFGMTRDIYETDYYRKGGKGLLPVRWMSPESLKDGVFTTHSDVWSFGVVLWEIATLAEQPYQGLSNEQVLRFVMEGGLLDKPDNCPDMLFELMRMCWQYNPKMRPSFLEIIGSIKDEMEPSFQEVSFYYSEENKPPEPEELEMELEMEPENMESVPLDPSASSASLPLPERHSGHKAENGPGPGVLVLRASFDERQPYAHMNGGRANERALPLPQSSTC

SEQ ID NO: 48 - DNA, 329019 bp, Homo sapiens
  misc_feature (1)...(329019): n = A,T,C or G
tcaagtggacccaagaggcaaatgaaattactcccaatagccaaacctggaacaatctgagcaacataataaataaagtattactgggttataacccaaaatatgaaataaatatccacaagcctgtactgatataaataaaaagttattatataaataaaggaggagaatagacaaacctgctgtgcagaagaattgtagataacttacacagatatgtttcccttacggaggtggagcataagtgtgggataggcagagtgactttctttcaaagagtacaacatataaagagagagaaaaatagagataactttacagtagaaaacttgatgaacatcacctcaggcaggtgatcaatgttaacatcatgttgatagcatgtacccttgttatgatgtgatgagaacagcactgtacctctggagtctttctcccagaaacacattatccaacatggtgaaaccctatttctactaaaaatagaaaaaaaaaagaaattagccaggcttggtggtgggcgcctgtagtcccacttactcgggaggctgaggcaggagaatcgcttgaacccgggaggcagaggttgcagtgagccgagattgcaccactgcactccagcctgggcaacagagtgagactgtgtctctgaaaacaaaaaaaatcatcataataacgatgtcttaatattggttcattagttatgacaaatgtcgcatagcagtatgttaataatatggggaactgggtgtggttatatgagactctctgtactacgtttgcaacagttctgtaaatccaaaactattctctactaaaaagtttattttaaaaaagacaaaggaaaaatttataaaacagttcaagcctacaaaaaatacacaaaataacttacagacacacatgtacctgccatccaggtttaacagatattaacattttggatcatttgcttcagatatcttttgtcttttaaacaaataaaaggttgtcagtatagttaaaactattctctattttttatctcttccttcatcctgagagataatgtctcactgacgttattatctcttccatgaatattttatacttttgatacatatgtatgtatccacaaacaataatgctattgtttttgtattgatagttacataaacagtagcatatcattatttaacctttgcaaattgctctttcacaccatattggctgttaaatctatctatgttgattcgcttagatctagttcattcattttaacctctgtatagtattctccctattctaccatacaagtaaagcaccattattcatccttccactgaaggacacttagattgtgtctagtattttactattgaaaacaatgttccaattaacattcttgtttgtgtctcctggtgcatatatcaagagcttttggggtatcctccttatgaatggagttgctgggttgtggagcaggtgtatctttaaccttatggatattgccaagctgctctccaaagggtatgtactaatttattttcccaggagcagtgaatgagaatgcaattctccccattcatccttgtgaacagttggtactgtccaattgttaattttgccaaccaggttgctgagtatattttcatgcttattggacgttctggcttcttttgtgaattttatgtttatagctattgctatttttgtactggtttgcttataatgttcatatgaatacatatttaatttcttacagaggcaacacaaggttttcagctatcttagcccagcgatgtatcggagcaggctcacactgtcttacaagagacaactgtgcacaacttttcagacttctgtatccagtgaccttacattggtagctcaaattggccatggtgggaatatttctacaagggaaattgggaaactgcagatcttggctttccccaccccatagtccatgttaagcatttaccagcgtaccactatcttaacctccaccttggcccaagcatctctcacaatatgactgacttgaaaataaatcttgatctaagttggcttttcagtctgttggaactgggccttggacctctttcaggagcgatttcatcagggtttctgtaatatatgagaaattcaatatccttttgaactaatgcatcttctactctgaagtggatcactattcatttaaagcaaagtgagggtccttcggcagctcatcagtcacagtaatccaagcacagagtagaatccaagtatccagtgatcctggaactggaagggatggcaaatgtcaccccccaccacacacacccctaccatcttctcaatcttgtttctttggacaatttccacagcaggtatcagttcagtctctgcatggacattctgacgacagggatttctctcacaccacgtaactctccaagcagagactgcaaaataatactgactttttgtttcaattggaaaagaagaaaaattctttaaaataaatgaaatctgttttccttcccgttagtctagttctgcccattggcattacctggatcaagtcgaatgaccaatgggcagagctagactgatgggaaggaaaacagatttgaaaagtctaatgacttcttcaggtatttgaaaccagaaatcatatacgacctctcttaatgtctatgtgtcttaataattcctcatggatgtaggaaccagccttttccaggttcaggtccctgtggtccctgttcagttctctggttgatcaatggtactccaagaacaaatataaacaacttcattctgcagctgattctccaaattgcagagctgcagatatctgcataacttcaaaatcaccttattctgtagcctgttcatgaggccagaaatagagtttgctgctagtaaggagcctgacacaatgatgttgcatttaaaaatgtactgaagaaatgtgcaaatatattctacggaataaggttccactagaacttaatatcccaaagagaatgttttgcaggaacattctcaatgatcaattgaaggatcccttttgtgggttacctgtgaccacttccccctgccttgctgatgtttctgtttgtctttccatactcacattcttaggagaaaatatattgaaattcaaaactgctaaaaaatattttatgctatactttaagaaaccctggctgggcatggtggctcatgtctgtgatctcagcactttaggatgccaaggtgggtggatcgcttgagcccaggagtttcagacccaccggggcaacatagtgagaccttgtctctattaaaaacaaacaaacaaacagctgggtgtgatggcacactcctgtagttccagctactcaggaggctgaggtgggagccaagattgcaccactgcactccagcactccagcctgggtgacagagtgagatcgtctcaaaaaaaaaaaaaaaaaaaaaaaaaaggaaaagaaaagaaaaaaaacctctaatgtgtgaaaaatctgtattaataaaacaaattaggaagcgtttattccctgagcctggctgctgttgcctgtgttaatttatagatttattaattacttgacagagaaggcaaaagtacaaaatgtacaaccaaagtatgagatatcaaggtaccactgtcaattaaaaatcaaaaaaagaagtcatattttagagcggaatggtcaacgtcaacatgatcatttcatagaggagaaaagagagaggtgaagccacttgcacagagtcacacagctttgcagagtagggcggggtagggcagaggagcagcttgtctcttcctggcatgctgctgataaaacatctcagagctggtggcattaatcagagggaacagaaattttgatttaaccccacttttcatgtacatctatgatgcatttcaacaacgaagaagcatcttttgtactgtctgccagacagggatccttactattgatatgtttgaaagttaattacatggaggagtgaagacggcacacccatctcagagactaaccaccgcaaatgacaagtgaaaaagacagagccgttacagctatcctggtcgggtttattttcccagactaccatgtggggagttgaacatacccaccctcaggtcggggacaggctcgtgacgatgctcagggtagtggtggagccccagaagcctccagtttccattttggacccacggagatctccagggtgcctatcactcttggcccaggcctgggctttccaggaacttccccgattgatgttttactgaacgtggtgccgaaagttagtcacaggaagacattatctcagctgtctctgcgcaaatgctctctgaaacctccacgttgcttttaaagcatcatggagaaatgtagcatttatgccttgggagccagctatctatgcagagctaaaatagaaaatcttctcaagttgagtataaacagatcctcaacaagactgagactcttgttgcttgtggctgtgtggggataggaatcagctacagcatcacttgtatttttcctgcccttggggtgctctgtggagaccatgtgatgccttccacagctaatgcccctaaggaaagaccttaggcagatacacactgaaagtatacacatctgtagacagctgtgggcaaggatgttggagtttagcatctctactaactcacctaatagtaaaaacgggaagcattgtgctaacattttttttagaacagctgcaactatctaaattataatacaatcttaacaatttaacattcagatacaattatgcagaatgaagtgcacccatcttaagtgtacagtctgatgtgtttctgctaaatgcatatactagcatagccaacaccccatcaagatatagagcattgccatcacccaagaaagttctttatgcctctccctagtcatttgaaactttccctctctacccacccagggcagccatgattctgatttctagctctagatcaatcttgcctgtttttgagctttacataaatgagctaatacagtatgtactcttttggcttatacattatgctttggagactcatttatgtttttgcatggattagtagtccattcctttttactgctaagcagtattgcattgaatggatatatcatgatttgtttatccattctccttttgatttacatttgggttgttttagtttttgctattatgaacaaagcacctattgacattcccatagaagtatttttgtggaattttcatttcttttgggtaaataactagggctagacttgctggatcgtaagttagttgtatgttttaccttataagaaactgtcaaacagttgacataatgcactcttaatgaagcttattacctgtgaagtgaggtcttttaaattttttgtcttttgatttttgtcttaaattgcatcgatattagatgtgtggacattcttctgaaatatcttaaggatcagaccttgattaactgtgttattttagtagatctttaatgcttctgagttatttatacggacagctcgaaatctgaacgactcccattggaaaaccagaatgatctctttcatggatctctcccatatttttatttatcttctttaatgttttatacatacaaaaatatgtagaacatgtgttagttattaagcatacttataaaatggaaatttgtaaatccgtcactcaatccaagagtgaactcatttccaaattacaatggaaacccatgtgcctatgggcttctcatcctctccaaaggaattcacatccttcattaattcttttgctaaaacaaaagcaaaacaaaggaaaaatattattttattatttaaagcaaaaaaaattttctgtaacttttaaagttttccttgctttttaagagctttatcaaaatggtgttacgctgtgtgcgtttttgatatttgtatatttttactcagtgtgtttcaaagatctgcccatgttgtgtggggctgtagtttattcacttttgctgctaacattcctttctgcgaatacatcacaatatactgtattacttgatacttgtcaattgttgtgctgtttctcacgtttgcacttgatgtatatgatatacattacattttttggggagtctggtacatttagcagaataatttgagatgaaactgttatcaagtaaacggcgtttttaaaaaatgaaaacaagcaatcagtttctgctccaaaagagggagaacctataagatacctgagtaaaatggtataaaataaaaagtttggtgcattgtcaatgtgggtataaagcaaagactccaattaatttttgtctacatgattttatttcaaggttgaaaaaataagtttgacttgtgtatgtaaaatataatcattgaagaaatacaaatcacctcctttgtccatgtggtcaagttagagcgtaaagacaacctaaatttttgttccttttttttccctaaatattaagctatataatgatacatctcccacttcactgtttaaaataacttaatacgattgatttcctactacttcaggaaaacacaaacatttaaaaaattcacaaataaaaatcattttagtaaaaaaaaaacacacaaaaacaaatcctacaacccctacaacaacctatatacatttaaaaattctatagacctctttatgttcttggggacaaataaacaggcatatttattactaatactaaaaatacattgggtagtatttgaagattttatattagcactagccttttaaaaatcagctctaaatttttgtcttacaagtatgtattaaaaattctgaaatcaagtataatgaaattatatatcaatattcctttgcatttaactccagagtggatctgcaggaatcaagaccaacctcatgcagagaacttaagaaatatttaaaaattagtagactggactttaattcttcatgtgtagtgcctaatttttaaataatacattttaagattctaataaatttatttcactgttaaatctaggaacatccaaaactgaaactctttatttaaaaatcaagctgaatttcagttaaacaaaaccatcccatcatatgaataactttcttaggtaaaacaaggtttattttctttctatacaactgactctgaattgagctagaaatttccaaggaggaaaatgatctaggaaacaactttagaaaaaaagggctaagtttccgttatgatagcttttgacttgttttcagctcttaaaaaattatttacgaacgatggatacacgttctaatgcagaagtattttagaattagagagtaaaagaaacctactaccttcctttacatcaggtcccttcttaccatcctacccgattgtttgagacaaccacttcttatctcgacaattcacaactcttttattagctatcttaaaaaaatttattactggcatcaattagcctgagtcatgaaaccggaccacattaagggcgacacatggtccaatcactgtttgtaaaagtccacgtatttcaaactcctctctcctgccactgctgggctgtttccctctttgaggacctggtctccgcagcatttattcattagatggcagtcctaggggagtctcgctttggggaaacctctcctcctgcacattcaagaaaacaaccgcggagacttagggtcggtactggtttccagtcacttacgtagcaaacgaagcaagaggaacgtgcctgggaggacccgagacaggtgcgggtgggtttccgcagtagccgctgatcccgagtgcatgcggcgtgttcccgggtcgggaccgcagccaagggaggcttcccggccccagcctccaccccctcctcggcgccccgggacccggacacgccccccgagcttcggagacccgcagcgtgcacgcgccccggccgctccccgcagccgcccacgtggtggagccctgagctgcgcgaggccgcggagagcgctcagggcgggcggctggtccgggaggccacgccagcgcgacccagccgagtcggcccccagcccgggcccccacatttcctcccccggagggagggaggcgactctccgcgggctgccctccccagcgcccgccgcgccctctggcggccgccgcggggacgcgcccggggcacgcggcgctgcctgtctgggccccccttccggggcgcggggcccgcgaggggcggcggggtcctctctcctcgagccactctgggccgagccacacgggccgcgcccttccccctccgctccccctgagcccccaaactccgggctccacggtcgcaacgccgcgggcaccccagcctggcgtgaaagtgcccggcgtagtagcctgggggggggggtcccctttctcccaggtgcgccccttccgccacgttcgggctttccagtacgcagcgaaaaaaatgccgcatgcacgcatttatttattttgcaacagctgcaagaaacaatgaagcttttcaagaaccggggaaacgcgctttccagccgcgctgttgttgttttcaatgaacctctcccagccccgcactccccgcccacccctcccctctcctgcccacccctcccctgcctagcctttccctggctacccacccctgccccgccgagaccggaccggcggcgggggcattgtttttggagtcgggcgggaggggagggcgcgtgcggggtggccggcgcagtgcggtgggggcgggagcgggtgggcacgcgcgcgtgtctctgtgtgcgcgcgggaggcggtggggcgggagatggggggcggcgcctcgcagtctcgcgccccacgcccgggctccgctccgcacgtcttggggaacccgggctccggttttttgcgcgcgccggcctgggccgggccctcggcgcgccgctgctgcggcggtggccgctcgagtgtgcgagcgggcgcgtgtgcgcgggccagggcgcgcgcgcgcgcgcgcgagcccccagtgtgtggcagcggcggcggcggcgcggcgaggctggggctcttgtttaccagcattaactccgctgagcggaaaaaaaaagggaaaaaacccgaggaggagcgagcgcaccaggcgaactcgagagaggcgggagagcgagagggacgccgccagcgagcctgcccacggccggcgctcgcagaccctcggccccgctccccggatccccccgcgccctccacgcccctcccgcgcgggggcagctccacggcgcgcctcgcctcggctgtgaccttcagcgagccggagcccccgcgcagagcaggcggcggcgggcgggggccgggcgggggccggcgcggggcgggcggcggcgcagagccgggcggcgcggcgggagtgctgagcgcggcgcggccggcccgccgctttgtgtgtgtcctggatttgggaaggagctcgccgcggcggcggcggcgctgagggaggaggcggcggcgagcggagccaggaggaggaggaggaggagggggagccgctcattcattttgactccgcgtttctgcccctcgccggcctcgcctgtgacccggacttcggggcgatcttgcgaactgcgtcgcgccctcccgcggcggaagctcgggcgtccggccgcctcccgcgcggccagggccgggcttgtttttcctcgcctaggcagatttgggctttgccccctttctttgcagttttccccccttcctgcctctccgggtttgaaaatggaggccgacgacgccgacagtccgccccggcgcgcctcgggttcccgactccgccgagccctgggccgctgctgccggcgctgaggggccgccccgcgccgcccgccccgtccgcgcacccggagggccccggcggcgccgccttcggagtattgtttccttcgcccttgtttttggagggggagcgaagactgagtttgagacttgtttcctttcatttcctttttttcttttcttttcttttttttttttttttgagaaaggggaatttcatcccaaataaaaggaatgaagtctggctccggaggagggtccccgacctcgctgtgggggctcctgtttctctccgccgcgctctcgctctggccgacgagtggagaaagtgagtatgtgcccgccgcccgcggccactgcgggaacttttcctccgaggggctgcgccctgtttgcgaaacccgagttgccaccgtcgcagctgtcgggcccccgggctcgggagcggcggggtggggcgcagggcggctctgccgggagggaggctgcagcggacccgggacccgggctcgttcgtctggagccccgcgggccctggctccgcgcatccccgcgcgggaagggcttttctctttctccgtcctgacagcccagccgtgtttcccggctaggcgcgaggactcggtagggaagttggtgccggggcgggctccgcggttcccgggccccgcgacccgcacctcgccccttccgtgcgcacgagcctctccgcacacagcgctgatccccctgcggcgcgcaggcagcagcgacagcaccctgggccgcaccgcgtctccgctgctggggctgaccgggcagtggggagcgggcagccgcccggcccgcggggtgcgagttgccctcgaggggggaggtgccctgcggagaggccccgaagccccaggacacgtctccaagcgcccgtcgctgcctcccgtcgcccaacgtgcttttgcccctcgggctcctcgggttcctggccttgcccgtcactttggcccgctcctcgttgggttacctgcccccggcgtcccggggctgggcggtggggtgaggggaagcgctctctgggcagccccccgggaagtgcgaggccgggagtcttcctcagcttgtctcttccggggagcgccactgggtccccagttcagagggctctgggatggtctcccagtttctcccgggccgggggatggaggggtactagggccgcatccgagtgtgcgttggtgggtgtgtggtcggagccgacgtgcattccgacacacgtgctcgcagcgcggggtgtagtcgccgcctcacggggacacctagacgcccgtccctggcgagaggtgtcgtacgctgtggtttcagcgccagggtctgcggcggcgcggggagggtgttgtgttttgcgagcgcggagccctggccttggttttgttgtggtcggcgtcgtgtcgccctctcttctgccgccccgcacttcctttgtacgtagttaataagcagtgtcgctccacattcgctgtcttttgcaatctgatagcttttgttttggtggtgtcgggtgggggttagtagggaagcgcggggatgcggggagcgagaactccccccggtgtctacggccggaggaggtgggggttttattcttctgaaaaagttgaaagtgtggcttactggtacattcaagatggtagggtaatttgaacacgattaaaagtttaaatgtcgcagaactgggactgggaacggtgagggcgtgttggtgagtaatggttgccgagggtatgcaggtggtgccgattaactttgaaaaaatcacgactgagccttcacgagtgaggcggggaaggaggaggcagcggaggttgtatggccccatcaccggggcaattcagaaaggctgtttctataaacaaatccttaaacgtctggtaagaaatgagtccgcgacggaacgagagcagatcgtggttcgcgtgtttactgccgagtgggacgcggactggggccggaccttccacagatctgggctctcctgctctttgttttctaaactttcagcggactcgattgggcgaaagccttccggctccctttactaagtcgtttaggtggtggctggggggacaaaggagggtttttatctttaaaagataagtacggtttagaagacacgggagaaataatccattttgttatgttatgcagttgaactgtatagcttctctagttttgtgtttttaatgttctgaaattcaaaacagcagggatggccttcgccgacgcaggagtcgggcattttaaaataggctgtttttcttttggagcgttcttcttgaaggatattctttgtgcaagacggcgatttttgagaacacaggcaggagggagggggtgttttaatgtatgtttttactccatgataccaaagcttccccccaggatccctttacagtggttagttcctggaaacctgatgggtggtcagaaggcaccccaaatctcgattatggtttgctgaagtcttgactgactcagtacctgcccctccctccatctctgaaatgtggagaattaaaagctatgcctgtgaacgggcgttcagtttttagccgggaaggtgctagaccacttaactctgatagaaataagctgctgagccctatcagggagggcgttctttcagctgttgtctggtggagaaataaagacagggtgttggttcagttgcaggtattttgctggcgtattgagagattagagtttcctctttgagtgtgatggcagtagaaagagtgttgtttatcttagaaaacttagtttctgaagcagaggcagtcatatggatgtgtttgttttgtatcaccataatgtgaacagagcatctaaatgaaggcggttcggaggttctgagtgatagccagataatctgagggctattttgtttttaaaaagtcagcatgcactttaaatttattgtacccatctccttaaaaggattcagtcatctttctaccccaggcatcctgttgtcacagaaatgtaggtatgtgaaatgttggtgtttaaagaagttagtgttttattaccagaaggagaacccagaaaaagaacttctgaaagaacctaaacagcaaattatagtttagatcctctggagagacatagcaagcaaatggtgttttgtggaagggtggggtttgtgtcaggatttgaaatgtaaaaggtcataatgtttgatttgtcgaaaaagattagaaaagttcaactctaagaaatatgctaaggttgaatagatgaagcttaaaaatatcacaaaaagtgaaagaagtcagtcacaaaagaccacatatcgtatgatccggtttatgtgaaatgtctagaataaacaaatccatagaggcagaaggtagatgagtggttgccaggggctgggggcggatggaatggggagtgactgctggtgggcacagggtttctttttggggtgatgaaaattgttctaaaattagtttgtggcgatggctgcatagctctaaatatacttaaaaccattggattatatactttaaatcggggactttaatggtatgtgaattatatctcaataaaccctttttttttttttttaaagaaatgtgatcaggttgaaaataacttgttatgctaccttaaattacgttaaaattattacatacatttgacaggctgatgtctctctctcttttcatttatgagtttttcagatccgtgagttgcagcaatacaacaaactgataattgaagcttagcaacagggattcaatcccgcagtagaaatgggcaagcaggagaaaaagaatcttggttctatgtagcttcagttagggattgaggagctggatttaaaaaacacaaatgctggtggagggcagatttttgacaatagaaacctcagctgaatctgaaatgatggtttttttcaggatagagtttaggagctgagtctgaagggctgtttgtatttccagttttattatgttttccaacaaagaaagacattgctgttttaagatgttttaaacactcattttttgatatgccacattgaccacaagtggtagtaaggactgaggatgaacagaacagttcattttaatgcagtattgttgtttcttttctttgcagttttattttatttcttacatagttccagggtctgagcaggagaaagaatctttaggatgcagtagttttaggatacactgtttcaagtatacagtgatttttataaaattaaaattccttacagaacgaaaggttttaaaatgtggcaaaggcatttttgttttgaaactgtgtgcatttatccagatttaccctggcctttcaataggaaaagacctagagaataattgttgtttacatttgcttttggtctttgtctaaggcttagtttactaataaaaatgtttcctgcccttcctattgttgcaagatcagggcagtaatgaaaatcaactgtatcattttcacttgttgccttagagtttttgccaagaggaaccctcaagggacggtggtttccttttaaatctggtttcatttgttttgtaagaatgtgctgtaagaagcaactgaatccagcctgcacttattgtgcacctactgtatgaaagctgaccttgtgctactcagtgcatgaacctgcagagtcttgcatgaaaccacctttcttgaaattcagattttttttcagactcagtatagggtgcagttttcaagtagacagtagttagcattttaaaggttcttttaaaaatatttctgtagacttaggactctagtgttgttcatcagaagcctttaccctataccttttttgcctcattggtgctttccgttatattgggatgtcactgtagactgtgacatacaggtgatgttaacccatcttgactggcggcactgtcttctttataacattggatatggcaattgtgatttacaaactgcagtgttgtagttgcctttttccaaaaattaggagtcacaggtgtgtacatgaacgttgcatagcatgttttgagttgtaagaaagatggaacttatttcagaagttttctggattacatattgcttagttagctttctagaaatcaggaagcattcataatttcagggcattttataatttgtaaataacttggtgtttttaaaagcgtgagggagtaagagtgaggagacaaatcctgaaagtttttgttttttaattgtaaagcatacaagatacatttctttataggttgtgattttccccaatttgttttcaaaactcatttaaaaatcagacctagttcatggaagaggtatttgcgcctgtgggcgaacttgatttgaactgcttttcttagccagcttaggacaggtgctgagtccaggggatgagctcttctcaattgtactaaatatataatagttgcacacatgttacggatatagtttcttgatttccagtctgagatgttctgaaggaaaattctgaacactttagagacaacaaagtgcctaatgagtgatgcactctgatccctcctggaaaatggtgtttggcatcagcttagcaagaggaggttttccagttatttgtaaagatgtgatgtggctttaagtggggatgggggagggtagcagccccagtgtttgtggacattgagacctgttgacatttgggaagcataactgagttccactatttgaaaagattaaaactttgatatatgtacacatcccctcatgcctgcacccccatccccgagggtctggaaaagaattgatttgttctgaggaaggaacatatatttggaatataaaatggttagtaaacaaaggatctttaaaacaagttagattgttatctcaagagaagcatacttcctcggcatgatgttttcttttgttaaattgctttggttttatttgactcaaagtattaacaatacctttgattttgagacttttggacttttgaagactaagtttttaaatggtcaattttactcgtttgaaagtcccagataccatttttgaagatttctctccctttttttccactgatgccggctttacttatgttttattttcaaatcttaaggaaaaactgatatttccttacttgaactgagaaatagtcgttttccctccctcttttcttccacagtaaatacatgttgagtacttactggatgcagttctttaggtttagaaattatttgatactgtaaaatgtcttaccataagtttttaaagatacccgtcaaactatagatgttactgccatgtttattaaaaaaaaaaataaaacgaaacaaactagtaagcaagcttaaaatttttctttttcctgccctggactacagatttttttttcttttttttttttgagacagggtctctggtcacctaggctggaatgcagtggtgtgatcacggcttgattctgccttgacctcccaggctccagtgatcctcccaagtaggtgggactacaggcacacaccaccatgcctggctaattttttgtatttttagtacagacgaggttttgctatgttgctcaggttggactcaagcgatccactcacctcggcctcccggagggctgggatcacaggtgcgagccaccacccccagcctacaagaatttgtaaactcatagattgctcttctgttttcactggaccacaacagaaagtagtttcttttatggtgagggatgaacacctacgattgcaatataagttgttgggccttgtgtccatggagctcacttggtggttggtggtcttgaagcattcacattctttggagtagtggggcggctggctagtcacatggggaagatgtgcacacctgtggatggggccatcacacactgcagcgatagctgggcctaccttactgctcacctggctgggcacagcggctcctgcctgtaaccccagcactttgggaggccaaggtgggcagatcacttgaggtcagaagttcaagaccagcctggccaacatggtgcaccccctttctactaaaaataccagaattaaccgggcgtggtggcccgtgcctataatcccagctacgtgagaggctgaggcaggagaattgctgaaacccaggaggcagaggttgcagtgagccaagatgatgccactgcactccagcctgggtgacagagcgagactccatcacacacacaaaatacatatataaaaataaattgctcacctggtaatagtctggaaaacattttttttttgtttttttgcatattttaaagactttagaaagtagtcttgctaatccagaaagttcttgcggggaggagtttgaaactttgttttatctcactcctcagtcttagcccccttaataccataggtctctacttcagtaagagttacataatacgaatgccgtttgttcagaattgtgtatctccatccatccgtccatcgtccaaattctgcgagtttgaaatacattgttgttgctgttttgtatacttttgttcaaccattttctttttaacatggcactagctttctcaaactggctttggaattatttgtcagtttaaaaataaataccactttaaaaattactcttgacatgggagaacaaatatattttgatagttgttagagcataaatattttatagagcataacttgaaatttttcctgatacattgtgattgctttcagcttgtcctctgctgtaaaaaatatagtcgtggttagtctctgtaaagttggttattgggaatatgtgcttgattacgtaaatgagacatcaccaatttaagtcagccaaagtttagtcaatagaactttaaagaacagaagtctaatggtaattagggagagatgaatttatttgtaggagttttccccaaattcaaagcgtcttagtgacctttgataacttcctggaaaaagtaggaagcatggagagaaattccaggtaggagcccatgatccaattgactgcatcagcttacaaagtgttttctaagtcattagctattaattctgtctagattgtaaaatccctctcagttgtgtccacatttatctgtgttgtcctgtatttattctctttacctaatttccctgagtctcattttagtgggataatacacaagcttacagactcaggactttaaagagaagcacagattgccacgaaaacaaatgaacacagagaccagtagcagcagagggagatctgctgtgaggcttcccttagttctgttgtctgatttctgtggataatgagttcactgcatatgttaggtcacaacatgatatcgtgtagtcgtaggtacagaacttttgttatggtagcctttcttcgtcaggtgatacaattgggattttctttctcacatgcacctcagtaaaattttcagcaacagagattggctcaggatggaatttgttcagtttcagttctgcagcctgtccttttctggggagactcattaattgaatgttgcctttcgatctcactgagtcacttgaaatcgctcagattgacccctattccgggatccagcctggtccagtgcagacctgcattgactctgactacatgctgagttggcctctgaaccagttcctgtaccattcccttagtctgatggacttgccagctccaaatactcagaacgtgcctcttgtggtcctaggatcaagtccagggtccttagaatcaagtaatgaaacaggtccttagtaatcctgtgctgtagggatccactgttagttcctggtactccccagcatctgtgcattagcttgatggaaaggaagctgtgttatgcctgtcttcaagtttttgcttctgctgtttccatagctgagaatgtttttcctcttcactactctgctacttctccttccatcctcaatactgaatagcagaaagtgccgcttaagaacacaggaaggtcaccatagctttagtttctccttagctgccaattagttctttggtcctaaagttattaacttttctgagtcttgatagaaatgcggagacttaaaaatatttgggggagacatttctccttttctcactaaacaacagaatgaaaaccttttctaacaggtttagaaaaccaaagtcagaaaaattgtgaggaaatagaataggttttttaaattgaaataatttccaagttccaggtggatctgtaaaatagggacaagatcataactttcaaaaggcagcacgctaagtcaggtgattcctttcccccatatgccttttctgtggtttgaataggtcagagatgccatctttacatttccaagtcaaattcctcttccttcttgaaggtttttgggatttccctaacttgtatagatctactttcccattactccttttgagttcataacccacggttttgctggttgacagtgatttgtcttgttccttgcttgtaattttattaggaccatggagccaaagtggctggtttgaatctcagctcttcagtagctaagctctcaggcaaataatttaatcttcttgtgcctcagtttcctcatctgtgaaattataattttaatagaatctactttaaacattcatagaaatcaaattcgtacacatgtcaagtgcctagaatagaacctggcacctggtattaagcccttggacttcaactgctactgttcttagggttgtgacatcctcgaacagagatgttctttggatagaaatataaggcttacttgatgtttgattgtccttgccatttaaatatgttatagaacctggcacataggtgctcaataaatgtataataaaactttattttgctaaggtgtttattaacaagatggcatgttgcttattaaacagttgtgattttttttttcagtaaacgatggtcatccccctgcagtttgccttccatttcagagatctgtttattacactttctcccttaatattgtcatttgtcaatttctgctcacacctgagaggtgtccagtgtgcactttgcccatctcgcctatgcataggctccatctagtggccagaagggaaattcagcatattaggtgactgaattaatagtgccccaaggaggaagatagcgatcccaacccactctctggcttgcttcctggggactgattgcaagaaaatgtggatactacagacttctgtagaaatcactgggctacagttttggattaaggttactctactgtgtcagtgcgagctgtcctgagagaattagggtcttcctaagtgatgcagacaggcgcactgcaactccatggcagagctgttaacacctagtgtgtcttttacagttagagttttaagataattttacaggactttaataaatttaaagctccaaaatatttgagattagagattaaaaaaacactactgatttcatttggaaaaatacagcaagatttaccttccattgctctatttaaacaggtagtaacactttcattctcttctctctcccctttggctattctatgtggttaagatgctcgccagccagaaatactcacagagaataagaataaatacatccagtgttgtgttaggtcccacaccgtctatatttcgctagctaattttatgtattttgtttcatgttttattgatattttcagaatctttcttgctgagattacacaaaatatatagctggttattcagttttacgtgtcaaaagccttaaacctgtttccccatgattgccttttattatttttaattcggaaatctttgtttggctgtctgagagagaacttcagcctcccttcctcccagacattttgaacagttcaggctgtactcattcgtgtctctttgtcttggcaggtggaagcccctctgcttggaatagcaaacaatactaccagcttgccctctggcaagctcctttaagagttagctgtaatttcaccctctctctggccttgattctgcatgcagaatgattgcactgacttgagctcctgtggtctcttgctatacctcctatttgggcatctcccccatattgctttcccccaccattggggaggggaatggtaccttggttatctttgaattcccaggaggtggcccagtgcctggtgcataggaggagctgaagaaacggaagacttcttaaagggatactcgccattcactttgaagcacttctttgtacaacaaatttattttcatctgatcattgcacctctgctagccaaaacattttatcacaccagttactgctgcatggaacttgaaagcaataaaattatctttaaaatcattgtttgattaggctttttgcacattgaggtgaataaaaaaaattagaactcctggaagggtaatttgtgagtctggccttgtgtcaagatcacctcatccctgtggatggagactttgttccataagttccctatagataagatgtaatgaataattcattggcaccgatttatgtctgtagtgtgcttttaaaccctcctggagctgggttcctgaggaggaagcatctgcaggctggactcggctgcctggtggtctccggagtggcctggtgcagagggccagggtggcatctcagaaagttgggtgggtagggtacttgcacacctgctgaccttgagttacagggtggacctaggtcatttcacaggcccttccagccttcagatctcaagatactaggcagagagagagatggagatttgagggagatgtggttggaacaagcagaatcaccacgtatggaagttggcttctattttttgcattgttttcttggtgaggccagtaagcttttgcctcactcctgggagggacagtagcaaggtcttacaggtctctctatcattgaagcaccctctccaaccctgccggttttggttgctggtgaaggcctttgacagtgtcctggtagggcgacggtgaggccagctcccgacctctggacagaagaaagcttacttgtctaggttggtgtcaaggggactcctgaacttaatgaacaccttagaaattatccttaaagtctcctcttccgaggagtggggtggnnnnnnnnnnnnnnnnnnnnaatgtaaacataatcatttgaagctggaatgttaatattcaagagtagcttgtaaaaaagcatcttgtgaaattctcatgtgaatgctgaaccggctggatgtgaacttagctggacagcctggcctgtctttgctctgctcttctccgtgcggtttgcatatgtgcagggcttcctttgaagccttgtcccctcaaacaattcactgtctccctctctcccacgcatggaggcatgttggaaagggagctccaggcctcagtgtctctgcctgtgattggaataacactgctctagcagggatgccaatgagaattagcaatagataatgtatccaagctgcccagcaaacctggcaaatagaaagcatccaataaatggatgcttttctctttttttctcctcctcatggtgggtggccctggtgggctctctctggggcctccagtcctccttccccacaacactggggaattgctgccagttgaatagggccctttttttttttttttttttttgagacagtcttgctctgttgcccaggctggagtgcagtggtgcaatctccgctcactgcaacctctgccttactgcaacctcttcctcccaggttcaaacaattcttgtggatcagcttcccaagaagctgggattacaggcgtgtgccaccacgcctggctaattttttttttttctagtagagacggggtttaggcatgttggtcaggctggtctcaaactcctggcctcaagcaatccaccgacctcggcctcccatagtgctgggattacagatgtgagccactgtggctggccaaggagggtctttttttgcacatctacagtgaaaggtttgaacccggacgtctgagtctcaggtcagttgttgaaaccactaagtaaccaccttgcttctctgtgcctgaagagaatgggtttttaggttaaccaggctgactggttcaaggtcatgtccctatctgtggaaggggagtgggagtggaaggtgagtggtgacagagtatggaaccctgtttctgatatctagattatttgagggcctccagtggtctctgctccatggaaagcatatgaaagaatatgattttttttttttactcgagcttgttgtctagttgggaaaactcaactactggtggagagtaacagatgctatgagtttagtgctaagttatgggatgctgaccggagagaagtatgtgggctgcaggcagtggggtcacggaactgcagaatggcttgagaagctttaaggaggatgtctgactttagtgtgccctaaatatttgactctcaagatccaaggaggcagctccccaggagaggaagggaccatgtgtggtgtgggtggcagtgtgcactgatggagtggagagggtgtcagaatccggtgtttgtgtggtgggaaggaattgactgctggctagagaatgaggagcgctgaaacctttgcaccattgcagtggacccgctgagaagggtgttctggggaggctgctctggtctctcgatggagtcaggattgggggacagatagacaccccggtgtgagccagtgatggtatagatgagggaggcagtgaggacaggctcagggagggaagtcttgtctctagacctgagaccaggaagcaggaatggactggacaggttggcccagctgagggaggtgactggtgagatgggtcctcggtgtgaggggctgggttgccagaggagctgtgggctggggtggtttgtcgagagagcagtcccagttgatggagaggcaggacccgcaaaacaggttggctgcaggactgggggcggtagcacagggcagctcccgaggagacacctggcacttttaaggcatggaatggagagagctaggggagagcacacctgcagtgaggcaattcacatagcaaagttctccggaaactgcagtgttcaacttttttaaagaatagctggatgttagaaaagtggaggaactgtcacctttattaggggcatcatggatacctggtagcatcaagggctagggttaaaacccgtggagtaatacgccctcctattgtgttcctctcctctaaaaatgaaggtgaaactgtttcaggtgagcgctgttgttgttcgtttgctggggcactgctttctgatttttagaggagtccaggctggagactgacccctgcctttttctgagttgggccggctgggcccgaggctggttctgggctgggccaggctgatgcagtggccttgggcttcccgaggctgggagagggcggtggcccccgctaccctgaagagctggccaacgcggcagggctctttccagtccttaccatgcaagtgaagaggaacagtttgtttaaagaggggtgccagcttcacatccaggcctggactttgctactggtgcttttgaacttgtgttgatttatgtttgtaaattgactggacacattgtggttcttgatgagaagcaattgcccatccttagcccacgattagtgccactctctgggtgctgcctgttctgccactgtaactgttttcacttgacaaataacattaaaaaacacagttctgcaagagacttcctgggagggtggtatcatttggcctgtgggcttttgtaacactttcctgctattaggagagtgaattctgaattttcaatcacgttcacctgttggagcaagtagagtttcagacggtctccgcttttctcgactagaaagcaggccttctcccttttccccccagtcttgtttcatgacaccattcccctctgagatgagggttggagaattagaagtctactgatgcattgtaccggggcacgttattgaccctctctgctctcctttcctcatctgtaaaatggaagataatgccacccatcaggccgagtgcggtggctcatgcctgtaatcccagcactttgggaggccgaggtgagcggatcacctgaaatcaggagttcgagaccagcctggctaacatggtgaaaccctgtctctactaaaaatataaaaattagccaggcacagtggcatgcacctgtaatcccagctactcaggaggctgaggcaggagaatcacttgaacctgggaggtggaggttggaggttggaggttggaggttggaggttgcagtgagccaagatcgcgccactgcactccagcctgggcgagagtgagactccatgtcaaaaaaaaaaaaaaaaagtgtcacccatcttggaggatcgttaccaatacttcatgagtgaatacatacacatttcttagaacctagggtttataaacactaggagttagctgatactattgttgctaaggatagaggaaatacgcattagaagttatttacttcctttaaaaaaaaaaataccctttgggtgtgtattgattctgatgttttgctcctagctacatttgccgtttttttttgactgcagaattaggaaccagcttcatttttttttttttttttggatggaatctcgctctgtcgtccaggctggagtgtggtggcgcaatcttggctcactgcaagctccacctcccgggttcacgccattctcctgcctcagcctccccagcagctgggactacaggcgtccgctgccacactaatttttgtatttttagtagagatggggtttcaccgtgttagccaggatggtcttgatctcctgaccttgtgatccgcccacctcggcctcccaaagtgctgggattaaaggcgtgagccaccgcgcccggcaggaacccagcttcatttcttgtaaagagagtttgacaagcgctccactggggatagcagcacagcttcctccttttctgtccctgtctccctcctgactctgcatctgcctccgtttgaagcatcctcctccagtaagtgggtcatttggattccaaggcccttttgaggccatggtgatggatcatttgcgttatcaatgtgaactgtggatgtcccttcgcccttcagtctcttccttcttcaaggagggggaggtaattgggggtcatgtggcctggggaagagcctggtcacgagcatgagggatgtgagtgggactatgtttccagccaaaatttagggcacaggatctgaaaaacacttagattaagtatctgcaacacaaattagggtattttaaattgaatgtggagaaccctgagaacctgtgccctttgtgcgtggatggctgcttgcaaggatgagcatccccagctggagcggcccatggctgccagaacaggagaaggcttcagtcaggtgggaagccagctgcagtgtgttgcctgatgcaggatggtgcgagaaggagctgctctcttgctctgctccctggatcgcacaaggtcttcctgagaccagaattcaaggttagtcctgtttaggcaacttggtagatggacttgaatggtctttgctaagcgaatattgcctatggtggtatttgcaaggaaaacaaaagtgttttgagcccagactaaccaatttaacaatgctagtaggtaaggatactactgtttgctttctgtgatgagaggtctcttaggaggaggggttaattcttttgatttaaaacttactacttgaggcaaataggcacatgaaaagatgttgaaagtcactagtcattggtgaaatgtaagtcagacccacaattggtacttcatactcattagtatggctattaccaaaaacaccagatgatagcaagcataggccaggatgtggagatgttggaacccttgtgccttactggtgagactgttaaaatggcacagccttttttttttttaacaggaagatgatatggtgcttcctcaataaattcatcatagaattgccatatgatccagcaattccactttggggtatatgcccaaaaagaagtgaaagcaggggctcgaacagatatttgtacacccatgttcatggcagcaaataattcaaaatagccaaaaagtgaaagcaactcaagggtccatccatagacgggtggataaacaaaatgtggtctatccatacaatggaatatcattgagccttaaaaaggaaggaaattctatgatgtgctacaatgtctgtgaaccttgaagacactctgcgaagtgaaagaagccagtcatgaaaggacaaacagtgcataattgttacccttacgtgagctatgtagagtagtcacattcatagagacggaaagtagaatggtgaggggcggtgaatagaggctggggggagggagcaatgaggaattggtgtttaatgggtacagagtttcagtttgggaacatgtaaaagttctagaggtggatggttacggtggttgagcaacattgtgaatcagtgtcagtgaactatacacttaacaagggttaaaatgttaaattctttgttgtgtatattttaccacaattttaaaaagcttatttctcaattgtttatgcgagtatatgtgtggaatagttggggagacaaattcaaggagaccagtccttgtccatggcggtcctaggtaccacgggatcactgcgggggaactgtgaggtcaggagaggccttgaaaaaaaacgcaggtttgagctgagtcagatggaatgggtctgttttctatatcaagagacagtattgcagataatttttttctttcaaggaaagcaagtcaggagtcaaactctcatgccaccgtagtcacaaatgaaatttattgctaatcagccatgtgacgtgtaattgctttttcattttcttatttttccagaagagagatttgtttagatgtttgattccctcactgattatgattatactggaagtttttcatttgttttgacagctcaattttttttttattgtaaatggactccctcattacagaggggggagcccttgaaagaaagggattgacctctgcaggcaagaatctgagcatcctaaaagtagaaaagggctagaggcttcgccttacaggccaggaagcttggagggacgcgctgctagagaccatggcacgcatgctgtgtgtcgaaggccaggtccgcctgtctgcctctccagcagatactctctggggctatttttttctgcttggttgtcatcttttggtttaaccaggcgccagggctcaggcctggacctgctggattccaaagaagacttcgaggtggccgagcttgtctggcttccagaggagctttctctgtcccgcccgggggagtggctcaccttggtctgagaccaatgggaggaagcctgctgcgggcaactggtctgtgcctggaagttggacttgcattttctctggacctccaaagcaaacccgaatgaccactctcatcctccccttttgcttgtttgtgtatgtgcttgttttgcctggtcgtcaggcaggaggtggtgtcagatgatgagaggtgttgctcgtccctgggttggttctcttacggggctgtatggatgtcttagctcagactgctgtgacaggttactatagactgagggctaaaaccacagacttatgtttctcacagttctggaggctggaagtctgagatcaaggtgccgaccaaatttggtttctgttaagggtccatttcttggcttgcagatgacaaatgtcatgtgtcctcacagggtggagagagcaaggggctctggtctcttcctctttatgtaagggcattgttgccattatgggggctctaccctcaggacctcatctaaacctgattacctccctaaggccccaccttcagataccactgaaggtatctgggggttggggcttcagtatatgaattggaggggacacagtcatgcagttcagaacagtggagcagtgtgccatagtgaagggatctccagaccaggattctctatggaagttcttggccaggtctgagagttggttacagatcattaaaatttacatggaatccagtacttgaaagtacatgtcttcaggatggcgctgagcacattcgcctctgtaaccaaatgcctgaaatgtgtagtgcaccttctgagcaccccagtgctttccttaaagtgaatgcagtttgagaggaactcaattattgagaaattttatatgaccccatttctctcattttaggacagataagttgcttattttaaactctgcaggagctacatagaggaagttatactccaggagagcttaaatttcactctctgaaaactctgttccatgtaagtacattcctcctctctcccctcctcagtgagcacgtacccatcagatgtgtggaattctattaaaagcagctcctcgtgaccctccagggttttgtaaagctgacaccagcatcagtgagttggaaggggctgccacagaagacagacttactgctgcagcccgcttcagagccctcagtagtactttttcctctcccagcaaatccaggaggctgggaaggtgattgttaattgtttatgagcattaactgtttaccagtcatacttactattttaaatctgaccctgccattatgttgttttgtttctgttcacagctgagctttaagctgggtagaatttcgtgatgagtcactcctatgactgtaaaatcagtatcgatcaagccttcctgttcatcctgtgagcagtttagagacagatgagacaggcttatggtttccactggctcggctccgtgcgtgtgcggattgggcttcctgagagcctggttagccccttttatctgctctctgaaacctgcgcaagggtttttagcatgcaccttgaaacctctgctgcctgaagacagtgtgcttaaatgaagggtatacaaacccatgtgaggttttctcttcccttttccatgaactccaccccaattacctgtttgaattttgcatgccagttattttcagggaactagtgacccttttcttgccaccctgggctttgaattgaaggccagtgtgccaccttttctttggctttgttagaacgttgccctcagggtcatatgtgctggctgctatgaattcttactgcttgatggacagagaaaggtgagggttagatatctggacagggcatgacagggcgggtcatcgagtaggaacattgggaccttttgcttccaggcttgagcagtgggtgagaaacactgtcttcccattagggcagtgggtgaaacactgacttccctccatcctctgggcagccttgtcaggtgggtgtggaagctgaggtgtgtctgccccaggctgtgcagtcagccccgtgttctagcttcccgtgccgaacctggccctggaggctgtctgcctggcaagggggctgcacaaagctcggaggggcatttctggtgcttggtagatggtaggcctgcccccagtgcactgataagagcatgggctgagagtgccacttggattcggctacagtgggcggcagagtgggggtgactggtgttgcttttactctagagcagaggaggcagatgaggtagatcggggccccagggatgctgagctgagctgggtagagagaatttggttttgtaggatttggagacagagacaaatttggagtgtttggatgttcggggacctgcaggaggtatgtgaggtgtgtaaaatgcagcccctgttttataaagagcttacattgtctcttgagaagataaggtgtgcccagctgtggaatggaaccagatgcttttatgagtgaggatggagtgagcacactgggaaagagccctggaattggaggaagagatcattttgcccagagggatcttggaggtctcctggaggagggtacttagatgatcagaaggattatactagacttgatggggtggtcttggcatcagaactttaaaaatgtattttggggctggaagcaaggctggagaggaaggtttgtttaagttgtagtgggggatgaggctgggggcaaatcagggatggttttccaggtctgtaaaggctggggtaagaggaatggttggttcttaagagcaaaaaaaatcccttacatattggttctcttatttgtgctaagttaaatacatgggaggctactggtgtttatgaaataaccctgagcctttttggggaggtagtagtggatgtctgatggaagagatagaagactggtcccaggggttcttagtggcaccttcctctcaggtcatcactgtgcttttgcacattgcagttatatttgactacatttgattatggcagatttacttagaagggcactggaaaaaagcctcccaaattacaactgacacaggaaatgactttattttcttctattttttttctttgcttttctcccccaatcaacatacatttttaaacctgtcatctcacatgacctgccggtagaattgatatgtttaatttctgtagaaaataactggaaatatttcacaagctccagtagcttcctgttgtagggacccttaggactttggaatgagaagttttctattgagttgtcatatttggaaggataaaggtgccctcttttccctcgatccacatagtagactcctgtgtgcgggcatttgtttggtgtctcacgttgatgcaaatgcagccattgcagagtgagccccgctctgttactggatctccatttgctcaaaagagagcagtgtccccctccaaatctgcatgtctgaaagcattcatgcaggttcattgcatgggtctttgcattttacttagacttagcaaaaatcaggtatagtctttcctgaaaacaaaagtgaccattgtttttaatcaactgcagggtgtttggagttgtgaaatatttagggtcccgagtccattccagattcaacattgggaaagaatgagaaagctgaagcctggggcaggctctgtctgcagaaaccatgggctatcaccccctctccttagcagcattgtaaacaaacgtcatttgtaaggagcatgtcccaactgagcttgtaattataggggcaagatttgtgtggtggtaggggcatggagctggagactgggggcttccttattggttcatttatcctggcccttctcttttctctcaagtctcagctcttttaagattcagaaaataatgcaaaatgcctaagatttctgaaattcctggcttcagagacttgactacataaaagagccaggattttcaggctggccatttcaggatcagccatttcccacttcctgattcatagcttccaggatttgtaatgcctgtagacttttttctctcttgcttaaaagtggccattgaaagaaaaaataaatagcaaaatccccatcccagaagttctacttcctgttgttgtactattgagctctgaaaaacagctttgtaagtttaagctcttgtttggactatttcagtggaattcttgagatctttttgtttggacaggcaagtatgaaggcgataagtcgaaagaactacagcttactcagcacagaaatgcagaggctcaaatttaagttcttccttagctttatggtgtgtatattaatataatccaagcaatagtgagttgcttagccagggtgcacagacattttccacaatgccagttgtttccctcataatgtttaatgtttatttttaaaggacatatttgggcacacgtttcatttttgcctgtaaaagaattgggaatatttatgattcttgcaacaaaggagaaggatccaaagtaaccaagaaaatgatggactggcagccttcacattttcccacaactcttttcatgaaataaaatgtagataaggctgggtgccatggctcacgcctgtaatcccagcactttgggaggccgaggcgggcggatcacctgtggtcgggagtttgagaccagcctggcgagcacggcaaaaccccgtctctacgaaaaatacaatacaaaaattagccgcgtgtggtggtgtgcgcctgtagtcccagctactcgggaggctgaggtgggagaatcacttgaacctgggaggcagaggttgcagcgagacaagatggcgccattgcactccagcctgagtgacagagcaagactccatctcaaaaaaaaaaaaaaaaaaaaagtgtaggttagcaaaagtgcctacagttcaaatgcttccatgctaaacgttgtatttcttccggtctcatttgtgatgagagtcataagattttgagaaatacaaaaacctttccagctttataggatgataatggcttggccactcaagtagttctgattgggttaactaattttggtccagtaatcatttcatttggggtgaatggatttttcccccctaaatacgggtacctggaaagttgaagcagtgaatctggtgaaacttaatcagtgatttcgtaagggttaacaaatgtttctgggtgggattcctaatgtccagcttcctctgtgtagctcagtaagtcttctttggagacactagcctgcattgtaagactgtcacatgggagcatctttttattttattttacttttttttaaaaaaatgaggtctttattatcctggctggagtgcagtggtgtgatcatggctcactgtagccttgaactcctgggctcaagtgatcctcttgcctcaacctcccaagtagttgggctgatagacatgagctactgtgccacgtagcattcttggggattattgtagggtccttttggaccacacatggttttatactctgtagctgattgatgtactggcatgtcagtgacattgtgtgtatcattacactatttggttaattgatgtactggtggaatagccatcttctggaggctcttgtttgcatacttctcttagtggcggactagcggttgtacagtaaatagatgatcattctcgctctgttttacctttcctcagctgctcttctagtaggaaaataacagccctcttagctgtagtcttctggaggctctctcaataatagaagtggaaagaaaagactcaaatccctgggcagtgactttttagttgtttcatttgcttttaaggcagaaacacctttaactcttagtagccttacagatcatttttgaaaacacctgtgcttgccttgaatggggcggtgaccactggatccccccatgctgggtacatgttttgcagtcacagacactgctggcctcacctttggtggtgaaggaatgtttccaatttctgctgatggtgtagtgctcttgggagctgggtgctctgaatgagcagatgggcatctgcttttttaagcctgctgttcattctgcaaaatagttattgtgcaaatacctgataagcaccaggtctgtgccaggcgctgtattttgtattttgcatgtctgaggccagcatctttttccctgttcctttttctcctcatccagtgaactttccactgtggttgtagtttgtctgaaaaagatttggaaaaaatgtacagccatgtttctcttgtctagagaagctgtcttaaggacttcgacaagtttcattggcagagtgaatgagtggtggcctctgaatagttgaaatgttaatgctatctataggttctagagaatctgtgtctttaaaagtcatagcgataaagtctcagctttttgagagagtgggtttcagacatactactatacaggaaatctgattgttgcattgaaacaggatttgttatcacatcacggttagacatacccaaaaggcaaaaactacagtggtcatgattgctttacataagattttggaggagaaactgttagctccatgaaagcaggaactgtgttcactcttgaatgcctgctacctgcacatggtgaatgttctataaatgtatattaaagaaatggaggtccttagagttccaagatcaccgtcaatatcatcaccctaggcttcctcgtccttccagttacttcttttccagaagagtccattgcctcctttatatgaggtctacagagcgcgttcagagggctcttatcattgattcagcaatcacgtgtacacatagcactagaatgacttcacatatttgacctgtttaaaaataacgtgcagctatgacgaacagcgaacctttgattagggacacatttgcctgccgccagacactacaagtattatgtgtattgcttttttcaaattataatagtaatagatgattatgagaagaaaattagaaaataagttttctgtctctctataaaaggaaaataaaaattatccttaatctcaaggtaaccattgttaatattttgttgtgttttcctgagattttccccctagacttatatgtgtatctatatatttaaaaaaatgaaattagtagtatactatgtacacacatattgtgaatttctgcccataacattatatctttatcacctggaatgaggtctttaatgaaattattaaaattaaaattattctataaatgctaaatttaggtattttacaatttttttttttttttttttttttttgagacaaagtcttgctctgttgcccaggctggagtggactgcagtggtgcaatctcagctcacttcaacctctgcctcccaggttaaagcaattattctgcctcagcctcccgagtatttgggactacaagtgcatgccaccatgcctggcaaatttttgtatttttagtagaaacggggtttcaccatgttggccaggctggtctcaaactcctgacctcaaatgatctgcccaccttggtctcccagagtgctgggattacaggtgtgagccactgtgcctggcccattttataattttgatcattaaaaaatgatgtgataaaattattgtgtattgttgttgatacactactctgattaattctttgggctagattcctaaaagtggaaagtaaggaataagaattgtgtaagtgtgcatgatcctagataaatattgccaaaatattttgcagaaaattcttagtttcagcttccagaagcagtgtctgtcatccatactccaccagaattgaacactaaattgagctttgcaattttagcatttaaaaagttgtatcatttaatatagaatagcagtctcttcattatgatcttcccttgcctagtaagtttatactcaagtcaaaatcggttaatcatgcatattgattccttgtttatctttttcttttaattctttaatacttctagaatgtatttgtagttaagtgaagtaagatacctcctcctgttgacgatttagtttccccacattgtgctgttttttttcttcactggattatgtaacaatatcttttcttttttttctttctttctttttttttttttttttttgagagagtctcgctctgttgctcaggctggagtgcagaggtgtgatctctgttcaaagcagcctccccctccccagtccaagtgattctactgcctcagcctcttaagtagctgggattacaggcgtgcgccaccacgcctggctatttttttattgtatttttagtagagatggggtttccacatgttggcctggctggtgttgaactcccggcctcaggtgatccgcccacctcaccttcccaaagtgttgggattacagacgtgagccactgcgcccagcctagagactctattttattagtgttttttgtagacaaagtctcactctgttgcccaagctggagtgcagtggcgccatctcggctccctgcaacctccacctcccgggttcaagcaattctgcctcaacctctcgagtagctgggactacaggcatgtgccaccatgcccggctaatttttgtatttttagtagaaatggggtttcactatgttggccaggctggtcttgaaatcctgactttgcgatccgcctgcctcgacctcccaaagtgctaggattacaggcgtgagccaccgctcctggccgagactctattttaaagctgtcttctcccactgatttgccttttgtttgtggtaaaatcattttgtcttaaacactgtagcttcattatacatgttaacatctgctaggaagaatctccactcaggttaaaaaaaaaaaaatttgaagcaccattatttcaggtgaactttgtgtgtgtgtatgttgttttgtttttgcaattcttctccgctactcttccaaaaaagaaaacacaaatttattaggttttgattgttaataaatcagtttgggagaaaacatttccagatatttgaattactcattcaaggacatttcgtgtttctccatttactcaactattatctatctatgaagaaatcacagaaggtcatagaggttgtatacttttccttttgggttatttctggttaatgaatgctttttgttgctaatgtagaaggaatctttattccccattgtttattttatatttttaaattttttttcaattaaaaaaaatttttttttcattcctgagacagggtctcgctccgttacccaggctggagtgcagtggtgcggtcatgactcactgcagccttcagctcctaggctcaagtaatcctccacctcagcctcctgagtagctgggactactggtatgcgccaccatgcctggctaagttttttctttttcttttagaggcaggatcttgctgtgttgcccaggctggtctcaaactcatgacctcaagtgatcctcccaccttcacctcccaaagtgctggcattgcaggcgtgagccaccatgcctgaccttccttgtttcttttaggtgattattggttgtgtgtgaggaaagctctggtattttctgtacttatcttgtacctacccaatttgttgattgctcttattcgttataatagtctttcagttgactcttcctaatttttttgtgccgagaatcattgatgacaaataaggataatttggtctccatttttctggtacataatacgtctttacttaccatcagttgtgtgtcacttaggaatataaatggctgaaaataactgaaagcctgcctaataagggagtaggccgacaggggctgacttttctcaagttcaggcagtctggagggaaggagtctgtggctgctgtgaggtgctcaaagagggtgtgaggactgggctcctggcttctgtttgttcatccttagcctgtggcttttgtcctcgtgaacacaagatgacctccaggaattatgtctgtttcaggcaggaagaagttgagaaggaatgaagacaaaaggcaaaaaaggcagaatgacaggtcagcaagcgctgctcagccagtaggccctgcttctccttggccagaactgagttgcatgcagctggctagaaggtgggagatgaatgtgggtatggctagtgggttgggcatgggggttgggccaaccaagcatggttggtcatagggtcttgctgcattagcctgcacatccagaattgttacatgttgattacaggcatatttgtccttttttgtctatattaatgataatgcctctgtttctcaatgtgtaaggcatcttttggtttaagaggttttcatcatgttgaagaattgcctgtcttgttttcttgggtgatttattaaggatgggtgttgaatgtcatcagatgtcattttggcattcatttggattcagaagtggttgttacacctattaattgaggtaggaatagattacctagtagtaatccctcctcaaattcccgtgttaaactatttttggttgcggtgggtggctgtttaaattcctaattaaatttggtttgctaacatattcagattttttaatctcttattttaaatgagatagctttacagttctctttagatgagttcttttccagattttgctgtcaggcctagactagttttgtaaaatgaattaatgacttttcctttttaccttctctgtaacagtttttatagtgtggcaataaactgtcctttgaaggtttggaacaactcacttgttaaatgcctggaggctgacacttaaaaaaaaaaaaaagaatagtttttgttgtgtttctttttgttgttggtgttgtttttagtcttcagtgcagtggcataatcttggcccacttcagccttgacctcccaggctcaagcagtcctcccacctcagcctccctggtagccgggaccacaggtgttttgccgccacacccggctaattttttattttttttgtagtttttgtagagatggggttttgccacgttgcgcaggctggtctagcattactgggctcaagtggtccacctgccttcgcctcccaaggtggtgggattaacaggtgtgagccaccatgcctggcgtaaaaagatggttagtttttgttttgtgacagctttaaaaaaggtcttccatgggtgttggtctgttccagggttctggttctttcctctgatgctcttttttttttttttttgaaacaggatctcgctcttgtcccagatggtgtacagtggtgtggtcatggctcactgtagccccagcccactgggctccagcaagcctcccacctcagcctctggagtagctgggacccatacctggctaatttttaaatgttttttagagacagagtctcgctatgttcccatgctggttttgaactcctgggatcaagcgaccctcctcccttggcctcccaaagtgttgggattacaggcatgagccaccatgctggccttctggttctttttaaatcaattttagtaatttagtaatttccagcaagtcaattaaaaattatagctcagttgtatgtagtattttctgtgtggtgttatgccctctgtatctgttttctcagatgttttagttgcttttctctcttaatcttgattagacctgccagagctgtgcttattttgtgtccccatccaaatccagaattaattgccgtgctccacatgttttggtcaatggtggacctcatctgtaacagtagtcccatgagattataatggggctgaaaacagtgctgtcccctagggatatcgtgtctgttgtagtgcaaggcactgctcacgtgtttgtgttgatgctggtgtaagcccactgtgcttccagtcagatgaaagtgcagcgcatacaattgtgtgcggtacctaatacttgataataaacaaccatgttactggtgtatgtatttactatgctgtacttttaattgttagagtgtactccttatacttattaaacacaaaattaattgtaaaatagcctcaggcaggtccttcaggaggtatccagaagaaggcattgtgatcataggagctgatggctccgcctgggttactgcccctgtagacttccagtgggacaggatatggaggtggaagacagtgacatggatgatccggaccctttgtaggtctaggctaacgtgtgtgtttgtgtcttagcttttaacaaaaaagtttaaaaagttaaaaaaaaaagttaaaaatagaaaaaagcttatagaataagaatataaagaaaatatatacaagaaccaaaatttaagaaaaataaagtttgtaaaagtaaaaaaagttgtgcttaagctaagtttaatttattattgaagaaagaaatttttaaataaatttagtgaggcctaggtatacagtatttataaagtctacagtagtgtacagtaatgtcctcagccttcacattcactcaccactcactgactcacccgagggagcaacttccagtcctgcaagctttattcgtggtggtactcccatatacgtatgtatacttttttttttttttgagacagagtctcgctctgtcgcccaggctggagtgcagtggtgcagtctcggctcactgcaacctccacctcccaagttcacgccattctcctgcctcagcctcccgagtagctgggactacaggcgcctgccaccacgcctggctaattttttgtatttttagtggagacagcgttgcaccgtgttagccaggatggtctcaatctcctgacctcgtgatccacccacctcggcctcccaaagtgctgggattacaggcgtgagccaccgcgcctggccttttgtttcgtttttaagagacagggtctagctctgtcacccaagctggagtgcagtggcgtgattatagctcattgcagccttgaactcctgggctcaactgattctgttgtgtcaccctccccaagtagctagaactacaggctcatgccaccacacttggctaatttttgttttttaattttttgtagaaatggaatctcactatgttgcctaggctggtcttgaactcttggtgtcaagcaagtgcttggcctctgaagtgctgagattataggtgtgagcctggccatatgtactttttttttttttttttatccttcttactatatttttattgtaccttttctatgtttaggtatgtttaaatacacacatacttaccatggtgttacaactgcctgcagtattcagtgcagtaatgcactacaggtttgcaggttggtagcctaggagtaataggctatactgtatagcctaggtgtgtagtaggctataccattgaggtgtaagtatactctgatcacacaatgatgaaatcacctaactgtgcatttcttagaatgcatccctgtcattaagtgatacgtaactctgcttctttaagcctctgtagcactttggttatgttaggattctgtgtctttacaagtctgctttgctgatcgattgtgacatcttgagggcggctgcactactttctgcctgcaccttgtttcgcatgtctacctggcgcatgacatacacctcgttgttcagttcttgcttctctgcttgtgtctttgcattcaccaccagctattctgatagttatcaggaggttttcattgattgcagtctcgtgcaatgggtgcaggtaatgggtagccttatggaggagaaaatgcttacctatttgggttcattccaaggagtagttcaaggataaacctctaagtttggggagtgctgtaatttgctggatatgtgagccatagaagacagcttggatggcatctgatgcttcctggctgcagggatggaggcagcagaccctcctgcctggggtggttggttgccatccctgtcgggggctcatgctccaccctcaaggctattcttgggggagttgtgacatggctttcataaaaactcagtggaattttaccctgtgtattagttagtaaaggtgagtctggttcagttggtttgagtcaaaaaatctgttaatatctctgctttagacctgcatcaggctaatacttgaatttagggtctgtccctggtgtcatctgaatttttgtttgctatgtgtgaccaaggagatggtcactcttcaggatgggtgggtggaggggagaaatgctatgatttctgttgggtcatgtgaaatcaatttggaatgtggatggggcccttacactttttcttttgagcttagtgattttctgtgtagggtggagagcgattaggaaggaattcaccacccttaggtcctcaggcatagggtcttctaggggcaggactgatgagtgaacagcagggtggatggagcagaaccgttggaaccttcagggcaggacctgccaccattatttggtcacaggaagtgttcagtggtgaacttgttggaaatgattttgagtaacttccgtctcctaaatcatattaggactctttggtctcctatggttatctgagttgttttccaggaggagctgggaaggtaccaggagaaagatgactgtccctctcatgtttgctgagggtgttcctgtaaggtgagctagtgttccttttagggcccgtggagaccgaccttcacattgaagaagcatatctgtgctccgagatgttttcatggggagaagtgtcaggtgtaattataaaaggagtctttctctttaaatactgtaggcgatttagaaatagtggaggtttaattgaagagcttgtctacgtttttacattttccttaggcacagagaaactagtatctttctctgggttgcctttttttttggagacagaatcttactctgtcatccaggctggagtgcagtggcctgatctcggctcactgcagcctctgccttccgagttccagcaattctcctgcctcagccttccaggtagctgggattacaggcacgtgccaccatgcctggctaatttttatatttttagtagagatggggtttcaccatgttggccaggctggtctggaactcctgattaggtgatccacccgcctctgcctcccaaagtgctaggattacaggcatgagccaccacacctggcctgggttgctttttaaattcatacctactgtcttatttgggtctcaaatgtgatcagtggttatacttttcttgctatgcatttaagttggagcaggctccggggcaccacttccctccctagagttgatgaacccctcatatcagtgacctccccatgtcacagtgtatctcgtgtgcactgctagatattctgatcacacagtgctgagattactggtttctctccctttctctttctgtggttatagggattctttaagggcaggcaacatgttctttgtttccataggatctgacaaagtgcatggcataggtaggtgttcatcaaaaggggtggaatagggttgatctcaagggttttaagagagatctgacgagtttgggtgtgtgacttaaaaagcagatacagcgccttttcacggatacacctccgtgattcctcaagtggtctggctgtgtttattttaggattctaaaagtaaagtgttctgttctgagtctttcacgatctgatgttctccagttctgtgaggtctcctcctttagtcccatcattggggctgtttctgctcggaaggccaggaagttgctggaagtctgctgggctttgcaaagggacttttgcttgtgtgggcattgcccagttgtgttacaacttgtttacagccgttggtttttaagggatgaggtaatcttagctcagcttagtgtaatacacaacagttttgtttattgagaaaatcattgttgaagtttttcagatgttagagatgttatgaattgcaatcaagtcggtatcctcttatataagtgcatctgacaagcccatttcacaactacatctcatcagtcacagttggatggcaaggtttattgtttaaagtttttgttttttcttttttaagttgggaaaggaagacagatggtttcagaagccaagaaagggcacaaaggcgtggatatttggaaatcgggacataattcaccattcttcttaattttttctgatctctaagacactgagacagctgttaattgaattgcttgttcacagtatttgagacgtaatgaaatgtgagtgtcctaatcacctggcgggcgtagatctttgggatcctcctggaggcttagtagggctgccctgagcagtattgtcttctccagctgggcctctgagctgtaccatgtgcccgtgctcagcctcagtccctccctcagccagttgttaaatcactttggacgtgtgacagcctcaacatgtcacagctttaaaagttcagattttaaaaaggtaaggaaatgatctcctagtgagacaacttctgcctaaaaaataaaagcttctaagacataaattctgtgttatgaacaacttgcaattttcatagttttcagttttagctctggcagcctctgatagatcttaaatatgtttatcacagctggaaaaatgttttattgtcatctttgtttatcataatatgccacctactctggttgtgtcttacaactgtagctctgtggggttttttttgtttgttttatgcttgctaatgggggaggtggggggtgggggcggatgaatataaatgatacctagaaattgaaattggaaaaaaaaatgtattcagccagtactctttccaggttatagctaaacgtcagttggcaacctctatgctgtggtttattgagtaacacttaatacttagcacagccctcagtgaagatcttttatggccttttctgaatgttatacaaacataactaaagcttatccagatgaggacagggacctttctttccttcctttttaaatggagcaaaatttggccactgggttgctgtggatgagagagtagaaggagaaaggcagtcatcgggagactgtgtgctgagagagcgcatgtgggatttggcttcaggaagtctgggcttgcattctatccagcgctaatatttagtgagtgtgatttggggcaaattatttcgtctccctgagcttcagaatgtttgaaactttgtgaggagtctgaccccacactgtaggctccctccatgtatatatttcttcttccttttcctttttttttttttttttttttaaatttttgagatagtgtctcgctctgtaaccccagttggaatgcagtggcatggtcatggcttactgcagcctcaacgtcccaggctcaagggatcctcctgcctcagcctcctgagtagctggggtcacagatgtgtgccatcacgcctggctaatttttaacattttttgtagagatgggagtctcactatgttgcccaggctgcactcaaactcctggactcaagcagtcctctccctccagcctcccaaagttctgggattacaggcatgagccaccatgcccggctggaactgttggctttgaagaagaatgatgctgtgcttgcctttgcagtcctgtcaccatacttcctggaaagtgggtggacacgctggatggtagatgttgagttctttagatgcctggatgcttacatgctttgtgtgggttcttactggggctgtaacttactagaggacagactccaacttctgcttacttagtctggggaggttaataataatctagggcacccgcttcccagtgggtttccatcagtctcctccagcccactctactctctgttagccagctgggcacctcttcctctgtgtcccttcggtatcttcccagtggctctttccacgactggctcagaccatgtgtatatctgctcattgtctgtccagggtccctccaaagatgcctctgtgggctgggcccctggtggtgcttcctccagataattgttgaagatggaacaggagtgtgcaagaacaccagcgtgcttccagtattcaggtctagcggcaggtcccaggcatcagcggctcaccactccaccgcaggtagcctgattgcccagccttggagccgcagcctccttgggtggtgtggcagctgtcagtgtctgaaaccattttgaactttaaagggtggtgtcagacagcagctattgaggctacttaaaagaatttttttaaatgtacgagttcagtggcattaagtacattcatattgttgtgcaaccatcaccactgtccatctccagaacttgttcatcttcccaaactgaaactccatgtccatcaaacaactccccattgcctttttccccaagtctttggcaaccgccattccactttctgtctgtaaatttgactgtctggatacctcatgtaagtggactcgtacactatttgtccttttgtgactggcccattttatgagcataatgtcctcaaggttcattcaggctgtagcatgtgtccagaatctccttcctttttaaggcccaataatatttaataatatatgtatgtgtgataacacatttatataatgtccattaccatgtggtatatatgcttatccatttgtctgtcgatggacacttgagttgctcccccgctttggctactgtgaataatatgactgtgatcatggatatgcaaatatttccttaagtctttcagttcttttgggtatatacccagaagtggaattgctggatcatatggcagttctatttttaattttttgaggaaccactgtactgttttccatgtagactgcataagaattccaatttttccacatcttgccaacgtttatttttatttatttctttaaattttttatagtagctatccattctaatggatgtgaggtggtatctcattatggttttgatgggacttttgagttttagcaaatatcaatgaagtatttaattttttttttttttcttagagacaggatctcacattgttgtccaggctagagtgcagtgatgtgagcatagttcactgcagcctcaacctcctaggctcatgtgatgctcccacctacgcttcctcaatagatgggactatgttcctgcgccatcactcctggtgaatttttaaatttttgtagagatgcggtcttggtacattttctaggctggtctggaagtcctggcctcaagcagttcttccacctgaacctcccaaagtgctgggattataggcgtgagccactgcacctggcttatttaaatttttatgggtatgaattcacttaaaagctgaaggttttgagaggagagggagcatatgaaaaaacctaaaggttttgggaggaggaggagaaggaagagagggagcatgtgaacaagagcaactgattacttccttgtcattcatttgcccagtgtttactaagcacctgctgtgtctcagacctgtgctggtttggcccttgtgaaggacagtaaatacagtgcagttccagctgcgcatgggatcacagtccagtaggtaaacgagtgcctaaacttaagagaaatgagtgcagttggggtcctgtggcggtgaaggggcgagtctgcacccaggcgagtgttaaaggcctggcctagagaagatgggtgttttgatggaaggagctgctgggaagcatgtgtactcggtgtcttggagtttagaaacctcagttggctccatgtctcgtccttagtaaaggaatatcgggagctgagactggatgtattgacacaggtcaaatcacagagtcttaggccatttcaaggaggttggatttttctctggaaggcacagggaggttttgaaggacttaatgcagaagaatgggcactgtcaggtttgtggtttggaaagtccgccttggtagtagggtggagggtgcattatggagggctagaccagggtccagcccccagcgagatgctgtgtggtaaccaggggagagagaggtggtggtgttagaagccacgacttggcatagaagccaaagcatccccaggttgtcattgtgtaattaatggttaagttggggcaagaaataaagctcttaaaagtgtccagctgtagagctctctgcctgtttttatcttcagatttttgtctttgccatctctggcctccagtggaaggccgaagttacttaacttccttgctggaagcagggctcctcatgattgccagcccctgtttggtagtggtcctggagtgctgtggaaatgggatacttggtgccacttaccttggggctttgctcctgaactgcagcggtgtcttgtgctctgtggtttgtagcatggaacagaggctgatgggcggggagtttgagtcccagtgattgaggccccctgcctgcctgcaccttactgaaggaaggacatggtggcttctcagtgtgctctctggtgatctgaacctagattcttgtttcacgggtagggggcagggttttggattcagccctggccagccctggcccaagttcatagtgtcagtagtatagttctcccaccacccccttctctcctgctcctgttttctcccccgccccttctctcctactctccttcctctcccactctccctcctctctctgcctttcacttccccccacactctctctcccccgctcccaactttctttctctcttcgactcaccacacaacacacacctgtgtgtgtgtgtgtgtgtgtgtgtgtgtgtgtgtgtgatggcactgttatttcatgtgtatacctttgcgtagcgttggcacatgtgggaatgctattataatgctttcgttgggggtctgtgctaaccactgctgagtgtgcttcatgttttctagacagcatgagaccagagctctccaccttgccattagctggtgggagaattttgagaaagtcacccaattgctcttaagtcctcatttttttttttaaatctgtaaaatggtatcacagatgcttatagctcaagactagttgatgagggtctgtgactcaaaaggccccatagatggggttcagagggcctttggaaatggcgtgcaagctctttgtaagtgtattttttttggagaaagggcccagctttttatcagacatcctgagagattcaggacctaaaaaataaaccttgattaatcttggaagcctctttttacgcagtacgctttgattcatcagtatatgcatgtggatgggttctcagatggcctgatgtttctcctccttcctctgtgtggtgggcgacgactttggctgcccagatgttaacatcagtaagcagaagctcagtcagtgttagcaaaattaaatcactctgcaaaaatcaatgttagtgaaattaaatcacttgatcttaaaagcagcatgaaatagcagtttttcatcttcattgtgctgttttcccactctagatatcttgcagattttttttggttgcttggttggttggtttttggcgtccttttcaaggacaagcagctttggacagttgcactacttttttttttttttttttttttttgacagagtcttgctctgtcacccaggctggggtgcagtggcgtgatctcagctcactgcaacctctgcctcccaggttcaagcagttctcctgcctcagcctcccaagtagctgggattacaggtgtctgccaccacactcggctaatttttatatttttagtagggacaaagtttcatcatgttattcaaattcctgacctcaagccatctgcctgccttggcctcccaaagtgctgggattacaggcgtgagtcactgtgctcagccagttgcactacattttttttttagatgccattgttgaggatccaggggtttgtcatagattgattaatcagaaagtattaatctaaagtattagaatatattgattgcaggcagggaccttgcatagtttaaagatgactcagaaggcacattaggttcttgccacactttgctgccatcacagatggatgtgagttgcccccttatataggtctctcgggatgccccagtggagaacagcattgatgttgaacagatcctgtccgatggagagataccagcgtttcagccagcggtgtgagtgagggcaggggccacctctgagggtgcttgctccctcacactgtcctcacgctgccctcaagctgtgggcaaaggagagggatcctgtgccatcacagccctagaagcagaattccaaaatgtgggctcctttgggtgtggtttgggggtcaaggagatagagcaagtaaggaatgaactttgagggtttatgatcattttcatgatgataatgacctaaaaacatgcttggctgggcatggtggctcatgcctataattccagcactttgggagactaagacaggaggatttcttgagtccaggagttcaagaccagcctggacaacatagggacaccccatctctacaaaaaaattaaaaaattagccaagcatggtggtgtgcacctgtagtcccagctactcaggaggctgaggcaggaggatcccttgagcctaagaggtcaaggctgcagtgagccatgtctgtgccactgtactccaacttgggtgacagagcaagactatcccaaaacaaaaacaaaaacacatgcttatggtaggcaattaaaacaggaggtaaggagtaaacatgccaggcccctcctcctctcctctgactcttccttcttcccccctgcttcccaagggtaagctttgcagatacttgctatgcaagcaaaaatgctattcttagccatcgtttaaacacagatttgcaatttgtggtttttcatttatataaattttggctctcttcctatagcagaatgatctttgtttttaaaatgattttaagtatacaattaatatgtgaatgtatgtttcttatggaaattagaacaatacacagttacagagtagaaggtgataggtgatatagctcaccctctcctcttcctgctactctccccagtctgcttcactccccggaaggaactactggcccatcagcatgtctccttccaggcattttttccatgtggttatgtccacctgcataagaaactgggggcggcagggtggggcggtgttggcgggtcaggcagaagcaagccacagagcagtaagggtactttttaaaaaaacatttaaatagatccctgttgtcctgcggcttacatgctcatgcatactcactgtttctttaaataaactttttcttttagaatagttttagatttacagaaaagttgccgcgatagtctagagagatcccatgtacctcttaacagcttcgcctctgttaacattctgtgtcaccatggtaatttgccacagctaaggaaccagcattagtccatgactgtcagtgaactaaactcaagactttttttggattttaccagttttgcccaatgttcctttcctggtctaggatcctgtgcagaatagcgcatcacagcacattacatttagctgtctccttcacctcttctggtctgtgacagggtctcagactttccttgtccttggtgactttgacagtttcgagggacactggccaggttttgtgcacactgccccttaatttggagttgtctcatggttttttttgtttttttttttttttgagacagagtctcactcgtctcccaagctggagtgcaatggtgcaacctcgactcactgcaacttctgcctcccaggttcaagcaattctcctgcttcagcctcccgagtagctgggattacaggtgcctgccaccacacccaactaatttttgtatttttagtaaagatggggtttcaccaggttgggcaggctggtctcgaactcctgacctcgggtgattgcccacctcggcctcccaaagtgctaagattacaggtgtgagccaccctgcccggcccatggttttcttatggttagtctgggaccatgggtttttgggagcaagaccacagagctgaaatgccctcccttcagtgatttgtcagcatgacctatcaccattgttgttaaccttcaccacctggatgaggcagtgtatgcgtggggacatacatctatttgccccactgacatgagggttggatctctagaagaggagtcactgttcagaggttataggcatttgtattttttggcagatgttgtccttcaaaatggctgtacacatatgctcctcccaaaagtaggagagtgcctgttgccccatgtcctcactcaagcttggtgttattagattggtaatttttttgtgtgtgaatctgttaagttaaaaatatttctttctttggccgggcacagagtggctcatgcctgtaatcccagcactttgggagtccgaggcgggcagatcacttgagctcaggagttcaagatcagcctgggcaacatggtgaaaccccatctctaccaaaaatacaaaaaaattagctgggcatggtggtgcttgcttttggtcccagctacttgggaggctgatgtgggagtatcacttgagcccaggaagttgaggctacagtgagccgagatcgtgccactgccctctagcctgggtgacagtgtgagaccctggctccaaagaaaaaaagaagattgattgagatagggtcttgctctgttcaggctggaatgcagtggtgtcatcatcatagtttactgtagccttgaactcttgggctcaagcagtcctgctcctttggcctcccaaagtgctggggttacaggcatgagccactatgctcagccaagctaaaaatatcttagtgtgcatttctctaattgtcagaagtgtatttatttaccataccctggaaaccttatgtaagatgatggtgagtttggactttccagtaacatttggaaactgtttagtaccaagctctcattaacaatataaacaaaataggggtctacccttaaggaatcaaagccattatctaaaagctctttcccgcaacaactacctgagataatgtccttggtcatatgccccagcatttaaaaatggagttagtgagagtctgttgtttaccacctgatacattggtaagagctgcttgatggtatggggacatcagtagggaggatatagacgtagccacccccgccctagatagtaggggcctcagggtggggtaagcctgggtgggggaggtatgagtggtggaacagtgggagaccctggatccttagtctccagcgtgattgcattttgccaaggctttgtcccatgtccctttgtcccgtgttccatttgcccgtggtgttgcctagagagcatggaggggctggtggagcatgctctgtggttccctaacccagggctgtgtggggagagcttgcagcacccccctgaccccatatgaacgtccttgctatttcctgctgtgccatccagcaactataggatgctgtgctgtggctgggagacctgtttggtcttggaagctgggtcctggatgagcagaatgaggcaggcatagaggtgatgttggctacgggcaggggagcatttgctttgccttggagtagtgccatttccatgtagaggggcaagatttaccaccctgttgtggggatttgagactttgggttttgttttcctttacaccttgagctttgttctacagcaggtccctgggaagactggtccacaaagctgctgaatggggctgctgtccttcagccctgcctcctgctgcagaatgcagaggacgctgtagacttgcttggtgggtgcctggggttttctgcctccctggtgcactgggcacagcggcttgcctgccttttgggtcgtctccacctcccagggatgtttttgttccctgatcgaatgacctcctgttttgtttgttttttgagacggagttttgctttgtcacccaggctggagtgcaatggcatgatctcggctaactgcaacctctgcctcccgggttcaagtgattcttgtgcttcagccttctgagtagctgggacttcaggtgtatgccaccatgccacgctcatttttgtatttttagtagagatggggttttaccatgttggtcaggctggtctcgaactcctggcctcaagcagtgcgcctgcctcagcctcccaaagtgctgggattacaggcgtgagccaccgtgcctggcctgacctcctgtcttctgtttttgcccactgtcaagggtagacttcttcaaggctgtacttgtgctatcctaaagaggagtaatgggagacatttctgactttgtcagcatgctgcttggcagcacctgcctcgtttctggtgaccatttggaaatgtgtcctttatctggtagcaaggagcatttacattgatccctatgcacttaattggcatacttttattcctctggattttttttttaaagcataattgttcgtgtctacatgatgtaacatgctgctgacttttaagcaaattaacagagttcgtgctgaagcgcaagggtgcagggaaacaaaatgggagggttattaaaggggtgaggcggctcctcaaagatgtcactgcaccattcattcttgtgttcctggcccatggcaggctcattaatcctccacgacaatccattagcatgcctgtcaacccttcagagaagatgagccataggaaggcttagggatccccacttgaactgctgtgtggctctatgaacatccccaccttcctggagtgaggtggttgtggccacctgactttccccattttttttttttggacctcagcctccagcgctcctgggccagactcagggtgggggggatgcaggtgccagtgactgacacttggcccctcacacttcactgcctgatttgctttaaaggcaagggttgctcatgcttgtctgagctctccatctgtttgagaattatattgttctcaactggaacttgtaaaagagaaaaaaatgtacttctcaatttccatggaagaatatagattttctggtggggtggaaactttcttagcatgaagggatctttgtgtgatctgcgcatcagcactgaataaagaatgggtgcgccgaagtcggggaggccgactttcctgtggcttgctggggaaagtttgaactgtgtgtaagcagtgcgtggaaggaaagctaagtgtggagataacgaagggaatgggatttaatagaaacagggtgtgatgagtggcagttgcctgatgaagtggaaatcttgtgttccaaatttgtgagatccatttctgtcctctaaggaaaatgttgtatgtgcaggaggagttcatgtagttgggttagattgtgttttctgtctttattttttttcctgcctctatgggttgtgaacaaaaacaagaatttgatattctgcagtatagttaactcgtgcaaacagtgtatgcttttcagtgggatataaggtctgaaataataggattttccctagtaagtcagtttcattcctttacatgtgggttatgagatacaaagtgaagctctgtaaagctttttacgagctccctgtgttgccctcctttgacgggtcaaggcattggggttgacagaggtttctactctcagaggctttaaagaggtgcccactctggtgagatggctgtcagcatgcacgatgtgtgtgagagagcacctcttcaatcatatgcacctggctgtagcatccttgtcagccttaagagatacctccaaagcggaattttctacccctagaatcatgtgaggtcatctcaatttaagccccagctctgctccctaaattacctgagtgatcccaggtaggtcatttgctcattgttaaccatcagtttccttagctgcaaaacagagcagataacaccccaaaagagttctcatagtaaatcacatcaggcttacacaatctcagaaatgtgcagctccacaggaatcttcattacctctttaggcagtccagtcgggtttcaaatgaatcctactgtctgttcttatatggaaccacagtccctcaccctgtgttgatctaagttctctgtttctctcctccagcagggtcataaagagcctgaccagtccccctccctggagacctttgtgtgctgggtttctgcagccgttctccatgagaagggacttctggtccctgctctcacttggatgttcttccactgacttatctctcttaatgtgtggaggcagaaacccagttttcagggtctctcccctggccccttactaagtctcccttaggtacagtctaagactgcctgactttttcttctttttttttttttttttggcagccacaacatcacatcgtcacatacagaaattatatccaattaaatctcctaagtctttttcacacctcctacatttgtgcatttctttttttgcacccaagtgtccaaatagcatttatttcctctctattgcaattccaatctgttgatctttttagctcttgactctgtcatccagtgtatttgccattgctcctggaaacttgtcatctttgaattagataaacattttatctgtgccatcgttcaagtaattgataaaaatgttgaaatctacagtactcagaaagagacctgtggcctcccactagagaccttccttggtctgttcattaatcagcactttgtagggtaaattgaacatttactaagctattcagatgtagttcatatttcttcaccttgtcaacaaagagatcttagcaaggcattgtagaccaagtatgtgttcctggaatatacatattaagaaaaaatccttatgccaagaaaatgggcacatccccaaaacccaggttattgtagtttacggcttctgacccagggcttcactttgtagcagtgtttttcttctgtttttgcctttggctgataccactgctagagtgcagataagagaatgttactaccagggggcttgagtgtcgggctatgattggctgtcatctggagcagagtgggactgagctgctcaggagaaaggtcttcaggtgattttttttgggaagctaagagcactggttttagacatcctctcctggctgatgatgggattggccttcatggggctgctgtctggctgggctggtgggcagaggttcctgtgggtgtggatggagaaatcctaaatgccgagggtacctggtcttagtagaaatcgtaggatgcctcagtgaagaagtcagggatgcggattgtcctccggatgcttggatgagcgtgcagtggaaaaagtactcctttgggggaagaggtgaatctggaggtgttagagcagaagagtaaatgcagaagttgtagcagatacaaaggctttggcaagagtgggagtgatcattgaagggaaggcaggggcttgctgggacaggctggagccgtgatggaccctcatagtaaccctgctgcattttacaaaggaagaactgtgttggggtacagatgtgccaaacactcaaagttagaaaatcaacgcagtcggttgtggcttctgcccttgaaacatcagatagtgagaacctgccactgttcagtttgcagagtggttggttgcatacagtgttttagctcttgcccactcaatacagaggttgcatgcgggcgtccacctgctccgccacctctgcctgcttgtggctgtgtgcccagagcccatttccctggggagtcagtgcagcactcctgggggacccttctgtttgtgtcctgacgaatctgactgtgctggatgcagtcccacagccacacctggtatgggtggcatctttaaaggcctggcctgtgtgtgctgtatctgcagcagagctgtggccaaacctgctttccttccatctgggttccccttggttctcggtggtggacgggctgtgtggtctcccctcagctgtccacttgcacttgtgttaaaatgcggcagaactttccctctatacttaaattgtggtgaaatacgtatgacataaaacttaccatcttaacttttttttattgagacaggatctcattctgtcacccaggctggagtgcggtggcgcgatctctgctcactgcaacctctgcctcctgggttcaggcgattctcatgcctcagccacccgagtagctggaattacacgcgcccgccaccatgcctggctaacttttgtattgttagagatggggtttcgccatgttggccaggccggtcttgaattcctggcctcaagtgatccccctgcttcggcctcccgaagtgctgagattacaggcgtgagccgccgcgcctggccttccttttttttttttttttaagagatggagtcttgctctgtcgcccaggctggagtgccgtggtgcgatcttggctcactgcaacctctgcctcccaggttgaagtgattcttctgcctcagcctcccgagtacctgggattacaggcgccaggcaccatgcctggctaatttttgtatttttagtggagatggggtttcaccatgttggccaggctggtcttgaactcctgacctcgtgatccgcctgcctcggcctcccaaagtgctgggatcacaggtgtgagccaccacgcccaccggcctcccatcttaacattttaaagtgttcagtttaagtacctttacactgctgtccaatcaatctctagaacacttttcatcttgaaaaacggaaactctgtacccattaataactcccattctctcctaccacagccacgggcagccactttctgctgtctccgtgagtctgactactttgagtacctatgagcagaatccgcaggatttctccttttgtgactgccttatttcacttagcataatgtcctcaagctccatccaggttgttgcatgtgagaggatttccttcctgtgcatgaactagagtgatgcagggactgacctctggccatgtgatgggtggttggtgatggatccaagaggtagctggtctctgaatactagcccagtccttttccttgctaggaaagtccccagatcagatagaaagcctcagtatttcaagaagcttctgttttgacaccacatccatgaagaatcacactgcagggtaggggaacagatgagtgggatttctacactgttatcagctagacttagataactggctaattgaaaagagtacaggtcacttaaggaaactggagcattgtagggcaaggtaaagtgcttttgaaatgaggatgtgaactgtaactggaatgatgtaatgtgttctacaaaatgaagccagtgagaggacaggggacacagggccgacttttatttaggacatttgcctggttctgagaagaaagttgaaagtcacgagagagagggaaaggaaggcagaaggaacttggtttttgcaggtgcctgctcagcatgggccttgccccagcttggctgtacctcacagcaccatccactggctctacagtctgtccttcggaggtttagggtgctgtctcatgcacagtgggtgctaggtggtagtgaggacagggtgtgggactaggcaggtgctgcccctcggaaggcctcatggtgaggcaaagatctctggctccgagggactctatctcctggtgtcctgcttcatcgagaagccagccacccatgggaactgtggataattagaaaggcttagaggctcttctaagggtgttttttgaaatatggagacctagaatattgggctttgggatattttaagatgagaaaggcatttggagtaactgtcagagcagataaagttgtttttatgaagatccgggaaaacggttgttacaaatacagctctgcaccaattctgcgccagtctgtttggctacagatgctttcagtggaggggacactggggcttgtgttccctttagtctttgaattcccgttaaagtttccatgtcttaagtggcgtggcaggatagaaacatctcacccatcttagtaagttctttgctgtatgtagcactctggttttaacgttctgagccttcaggactgcccttgatgtgtgcatttattttgttgatatgcatgatgtgtgggtggctctgcggcagtaaaacagttcacattcaaattacactcggtttctaatttctgttctcagagtttcctctgtaatggaaatctcttacattcttatcattgccttcagttattgaatgtgttaggtggccaggattgctgtctgtgtgaaatgggaatgtatatatacaacgtaaacatgttctgattgacacgtgaagataaagggcttaacatgaattgtgtcggtttacacttacacagaaaattctactgtaataaactgaagtgtcagtagtgtttgttatcataacattgtctttttccctcttttctgatctctgatttttcaattaggaatgaggcctaaagaaacccatgctctctcttctctgagcgcaaggagggtgtgctgagaccttgaagggcacagcatgggaggatcatatactagggagagtctgtctccaccccatttttcttctgctttgctttgtttcgtagtttcttcgggcttcttgggggttttctgagagagagaatgtcaatttgagaagtaacaggtgcacaggctttacctgcaccacactgcagataaggtgggtagggagggtagtgacaggtggtgtggtgggttattcagttctttcctagggcagtgggtctcacagggtggtgcttaggccagcagcatcagcatcacctgggtgcatattagaaacaaattttggggcctcacctcttgcgttttaacagttccttcaagtggtcctgatgcatgttgaggactttgaacactcctcctacaagcaaagtgaagttgacctcccacacacttgtctcagtctgctttctagcatctgtcccattgcctttgttgttctccccgccacacgggctgcacccctgggattcccccagctgccaccaggcatcagctccagctgcctcccagggtgtgctcctgcctctgcttggagtaccctgcctcccactcttcctggcaagaccctgctcatctttcagggtcgtctctgctgagaagtcttcctgacctcctcggagatagggagttgtggggccttgtctttatgttcccagggttctgtctattgcgctattaaaactttttttttcatttaatttgccacttgctagagagatggttgttctgccttcgttgtgcaaaattcagtgatacactaatcctctcctaacctcttaaatcattttgactttcacagagtgatagtgtctagagagggtttttgttgtactaagttattggttccaaagaattcattttaagaggagtaaagaactattatagtatgccgcttactgagacaaaaccgacttctcacataagcccaaaggttttgttatgttggattttaccattagagttaaagatgatgattggttcactaatgtgctttaccttcacagtgtgcctgtagacctgtagtaaaagaaggctaattatgtttcctgatgtcttttatttccaactataagctaagcctatctcattttttttttttttttttttttttttttgagatggagtctcgttctgtcacccaggctggagtgcagtggcgtgatctcagctcactgcaagctccgcctcccgggttcatgccattctcctgcctcagcctcccaagtagctgggactacaggtgcccgccaccacacccggctaattttgtttttgtatttttagtagagatggggtttcaccgtgttagccaggatggtcttgatcttctgacccgtgatcctaccgcctcggcctcccacagtgctggtattacaggcatgagccgccgcacccggccaacctatcccatatttttaaagaagagttgatcaagtagttacccattttaactaaatggataactataacattctttaatggaattgttgacagagggataatcagtgtttttgctaattcatgccaccctcctttgttgtatgttagtaatatttacattggggcaacaaaatagatcagtatttccattaatgtttacttaataacagctgctaaaaggtattactgtttgcagtaacacaaaagcacttacctgattcttatgccagcttctatagggtaggtagtgacagcccattttgcaggtgaggaagatggggtttagaggtgaggtgtgtctgcctgagagcaggagctggtaaatggcactctgggctcatgggagtcacgctgtttttttttttttttttttttcctaggacctcaaggttgtgtctaagacataatttacagttctcgtgtaggtcttccaaatacttagctacacagctttggggcgttttctcagccaaatacttttctttagcccttctcatattaacatttagttcttagggatttattttcaaaatatatatagcttgtatatgccattcacctaagttgttagagcagacattctgcctcttgatctttagaaaatacctaagagtattttgttaacagtactcatttcagctgaaagactttattttaaaatttaatttaattttattattgttttttgagacagaatcttgctctgtgtctcccaggctggagtgcagtggtgtgatcttgacttgttgcaacgtctgccttgtgggttcaagtgattcttgggcctcagccacccaagtagctgggattacaggcgtgcaccaccacgcctggctaatttttgtatttttagtagagatggggtttcaaactcttggcctcaagcgatctacctgccttgggctaccagagtgctgggactgcaggcatgaaccactgtgcctgacttttaaggctttctttaaaatggcatcttttggccaggtgtggtggtaatcccagcacttctggaggctgaggctggaggattgcttgagcccaggaattggagaccaacctgggcaacatagggaaaccctctctctgccaaaaaattaaaaaacaaaacaaaacctaggtgttatggtgtacccctgtggtcccagctgcttgggagctgaggtggaaggattgcttgagcccaggaggtcgaggctgcattgagccacgattgtgctgcagcactctagcctgggtgacagagtgagaccacgtctcaaaaaacaataaaaaataaataaaatgacatctttggagaagtgaattctacccaggtaccaagcccctgcctgcccctcccaactcccttccctgactcccagcacccccatctgttttggttctgctgttgccattctctggctttggggactttgctgaggccccactgtccccatcttccagctgtaccctttctctctgcttccctgcttgtcttattctttacagggctgcctgggatctcacattccaaaagtttttgggtttgtttttggatcatgccaatatcggttgctttgagaagggagaaagggtattttgcattttccttttaatcatcggtgagtagccacaaagggtgtgtctctccctcttgtgctgtgtttactgtttactccctcggtgcatgaattatttcatggcaccagtggagcatattttcttctctttcctgtttgtggcttgcgcctcctgaacgctgctatcattcatggtccagcttggttttctttttcactgtttctatcacaaaacctcctgaagaccagtggtgtcagtcataggctccaaaacagctggttcctaggccctgcctcgtgctctgtggtttgggcttgtcttttcttccagagtaagtgggtagcttcttcctactttttttctcttttcttctataaatgggaggaaaagtgtgaagtatggagactgctctttcatttgaaggaaattcacagttccagctctgtagtgtggcctctgttaactagtggtcaacactgactgtggaaggggggccagatggcaaagtgaagcagattctttcctcctgtctgcattttgattgcagtatgaagttcaacttgcttcagtctttgtcttcatgttgtttcactaggtactgaattttgtgatctgttggaaataacaagtaaatagatgcctaacgctttatacaggttgagcctgtctaatccaaaaatccaaaatccagaatgcttcaaaagtttcagcttttggagcactgacatgacaccacaagtggaaaattccacacctgacctcatgtgacgggtcacttttcgaaactcaggcacacgacacacagttaatttagtgtccccaagggaaaaaaagaccctcccggcccccttcagctgtgatgtgtcttttccacacatgcccagattccctcagacacctccacaaagggtaataaaatggttcgttgtatacaaactttgtttcatgcacaagattattaaaaatatataaaatgactttttagagaagcgagaagagaaatgagaggtaggggagggagggaggagttgggggacagttgggggaatagttgaagctaaggtgtttaggcagagctctgaggaggtgacgtttgagtggagacccagatggctagagaatggggcagcctcctgaaggagcagaagcactgtgggcggcagggtatcacagaggaggagctcggtgtgttggaggttggtgagtcccgtggagtcttgtcagatggtgttgggacagggacggaccgtgaggaggctggatcatggggaatgtgttgctttaggccaagctggagttgatagtggctcagatcagagctaaagtagtggagacacacagacattgaaagaatgatgaaattcactcattctgcgtgtgtcccatgtcatgtgtccgctgcacaccaagtactgttttaggcactggtgatataattgtgaaccaactggagctgcggtgagagagaccatgaaaagaagggccagagcggtgtcctgcagagggtggtgtaccttgggagggaagtgtgtagggttgttgaggaacagtgtgctgcacagggaggaaagacgtggggcagcattgtgggaagagcaaccaagattctcataggcttgggagcggaagccctgaggtctgttgctggactagatatgtgaggtgtgagaggagagaagaatcaggaatgactctttgattcttaacgtgagcaactcagagaatgagagtgctgcagtttacaagcttggaaggtggattatgtggggggatgagtgagttgtttgacacctcaatggatatactcagatggatgtatacgttagagctcaaaagagtctgggccagtgacatgaatttgatcatatctagagtatgagtggcacaggaagccacttgtctggatgaggtgacagaggaaaaggttgaggatagcaaccaacatttagaggtaaggtagaaggcagagcagtgtggaatcagggaagccgagaggaggaggcaatgccaggtgactggaaggtcaagtgacacttcgacagtgtcactgagggctctgctaggagctattcggtgtcataatggggacagaagctcagtcggagtgggttaaaggtaaccaggaggtgagggtgctgagaggtgggactattgacaagccttgtgtcaagttttgctatgtaggggctgaaatctaatgtatgtgactgtgtataagtgacttgacttccccaaatctgtttcctcacctttaaaatgggtgtttgccaagtgctggtttctgctattcttttctctgtcttaggggtgtcattttctctttggtaaaacagaagaattagatgatatgaagtttcacattctaagttctcaagctttgcccactcctcagcccttgggtccctccacttcctcttctcttcgctatctctgctcagtttctgtctttgattgtaatgtaatgcccagtgggacttttcttctctccctcgtctgttcacttattccgtcctgcactgggccaccagattaatcctgcaaaaggcctcacatgggcttctctcctgctcaggagccttgtgggggctttattcctctgagatgaaagttcttatccccacatgtgatcctttatgacttgggtgctatcaaattcatttcctcaactgctcccctcttcaccctgaccatcagatctgctggcacatgggcataccttgttctgcattgtctctggcctgtgggatatttaccgagctttaaatcctaggcaccctttgggagccggcctgtgtgcagagctccccttagcacggtggcacaaagcttggacaccacctcttgtctgtcctgcttaattccattcacatctagagtggactcgctgtgtgcacaccactgaccacctgcctcatgtgacagttgttcctcatgggtcttagctctttgccttcaccatgagcctcctcagagggcagggcactgcctgttggcatttctcgtggtatcatacatgttgggtgcttcccaaattaattacatcagtcagaaaacttcactctatctgagaagctttaatagtgtacttgggattattaaatcctaaaaaaggttatcacaaagagttttcttggtgtgtgtctgtgcttagaatttagaaaataagtcatccagtattgaggccattttatgaaaagcctttaaaatctgcaaatgcgttggcccagcacttccacttctagggatttatcctaagaaaatagtcttgggtatctgccaataatgttcactggagtgttgtttataatgtgcaaaacaggagctaacctaaatgtccaacaataagggattggttaaaaaaaaaaaacaaccctcatggtgtgtattaatactctggaactactgtccccttaaaatggtgatgtagaaggacatgtattgacctagtaaaatattaagtgaaggaagtgtgtttacaaatgtcatttttgtctgatttcacttaccttcatttatagagagtggataattggcatagatagtgttaacattgtttatcgtggaatgttgagatcgttgatgatttttactggtttttttttttttggttattacctctaaactctgtaggaagcatgctttcttgatcaataaaacttaaagttggagtttatgctgcttttattcataaaaaaatcacgtttttaatcttctgttaggttatcctttatgtctacattaatgcacgtgtggagagaacacagtctactcggcttatgtcaaatggtagtgggaagcatggaagcatgcgttttttagtccccactttacaagtcacagtgacggttctccagtgtagagtagattgattgccctgtgtccttcaggcagggtgcagtagtaagttattgatacttggctgctgagctgtcgttcaggccttggcaactgacgctctgcagaacggaccaggagtgtgcggtggtggagtccggctggcctgggttgcagatttaactttcgcctctgcctctgtgtgcctctgggctgtaagctttagtttgcacggttaacggggatggcctctcccatggtcggttggagtgtgttgcacagcgtctggtccagtgttggcactgtataaatgccagctaactggttagccacctaaactgtcagtctgcaacccacagctctgcagtgaacaattgaacctcatttctttaataataatacaggattcctgaaaaccaactgtattattgtttggaaaatagtttaaaaattatttccttctaactgagacgtttaccctcttgtctcccttcagtctgcgggccaggcatcgacatccgcaacgactatcagcagctgaagcgcctggagaactgcacggtgatcgagggctacctccacatcctgctcatctccaaggccgaggactaccgcagctaccgcttccccaagctcacggtcattaccgagtacttgctgctgttccgagtggctggcctcgagagcctcggagacctcttccccaacctcacggtcatccgcggctggaaactcttctacaactacgccctggtcatcttcgagatgaccaatctcaaggatattgggctttacaacctgaggaacattactcggggggccatcaggattgagaaaaatgctgacctctgttacctctccactgtggactggtccctgatcctggatgcggtgtccaataactacattgtggggaataagcccccaaaggaatgtggggacctgtgtccagggaccatggaggagaagccgatgtgtgagaagaccaccatcaacaatgagtacaactaccgctgctggaccacaaaccgctgccagaaaagtaagaatgatgctgactgctgctttctctctgcctctctctctcctctcctcctccttgacctcccttctcttctgagtgcacgagttccgctgggcagggtgcagtcgtgttgcatttaggacgtggcatgcctgctgtgcggaagtggttcccagtgggggtcttggttggctttcctttgcatctgggactcttggattgcgggactgtggcgtggctggaggccatcatggctgctgtcaagactgttcaaatcacatgttagaaataatccagcacactcctgggctagacacttgctgaccttcagctttgaattcctgatgagaaaggtgacctggtgtgcttggaagtccctgagccttggcagctgggggctgcttatgtgtcagctctttcatcctttgtgcgaagtgatattttttgttctgcaggacttccttagtttgaatggacttggaatatggttaaataaagggaaggtaaagcactaactcatatcctgtgaaagtggtccttaggtcctagtgatgatgttatgatactcaggtgtcctggttatgacagagcacctggcccaggtgggagacctctggacccatttctgcaagtcccaggttcaggctgtacttgcaggtagctgtgtagcagggtgcatttttaaacctctgggattctgttttcgttcttttatacctgtttactgaacagttgtgaaaatcttaagatttcacgagtgaaggaactttggaaagtatttactgttctgggggtcagatggtggtattttgaagcttcttgtatatttatctgcaatatgcttattttcccttgagaataactgagctcttgccttcatgtgatcagttccttaagaaccaggctgtttggtattaaaatgtgactctgagccttcaccttattgcattcagcaatagttatgtatattggctaggaagcttttcctcactggtttgaagtcagtgtgttagctataaatagctattatttaagtgttggcccagttaaagatgtaaggaacccatgttctctagttatgaagaaccaagaaaccccaaattgttagacttgcctaaaataaataaaaggcgagaccccacaggggtgaagtgtgtaaagtaaataaaggacagacctcccaggtagcccttcagttcccgttcaaccagtcctgaggcaggaaaaggatctgtgtaccctgatctgccacgcacttttctattctgcagaattggatcagtgcgtatgtgaacattgattagtgagggcaggggtcccactggctgcagccagtaccttgtagagctctgagaatgcagtcaggccactttaaggttggctggagttggagggagatcttatgctaaagtcacttgtgtggttgattaaaactgccctatcattaagttacccactggtttgagaaaacaacaaaatatattttttaaataaccttgacatttaaaaattttatctgaaaagtaaaaggtgttatcaagggaggcagcatggagtagaaaagagatgttgaatgtggtgatgagggccaggaatgaccttggatgggccagcccttctgggctgtagttgggcttttttaggatatttctagggcagtccagtacatcccttagtggtgatcatatatgggcatgaggatgttttgaaaactcataagctctttagagaagggaggtgccatatgaaacgtcattaagtggagagttgttcacgaactaggtaggtagttactttggtcttgccataggtttttggctgtttctgatgagctactgattgaagacccctggggtaggggtgaggcctgcattctgggtccaagtctaagagtggcgactagaaatgagcaagttatttaaattgcctgggccttggtttcttcatatgtggaatggggtaaagcctgccttcctcatagggctgttggaagatgaaaaggaggaaggaaaagcaccgtgaaaatgttaacgatggttagaaggtgggctctgctggtgacagacagagccttgatatcacctgttggttggtcacctgcttccccaaggccacgccctgcagccttctccttgaccatcccagccctgctgatgttccttgtgatttcacaatggagtacttatataaaattggtaactgctttccgggaaattgacttcccttccccttgtcctgaaaactcaggcatgggcatatttcttggagattttctagttgaatcagaacttcctcttggtttgcgtagattccatttagacctgcattgtccagtgtggtagccgcttattgagtaagccacgtggcttattgagtacttgaactgtggcttgtccgaattgggactgctttaggtgtaaaatatacactagatttccaagacatagtatagcaaaaactctgtacaccatttcattaataattactatgttgataacatgttgaaatataacattttggatatattagattaagtaaaatgtgttcttaaatttcacctgcctgtttcctttttattcttttttttttttttttgaggcggagtttcgctctcatcacccaggctggagtgcagcggcgcgatctcagctcactgcaacctccgtctcctgggttcaagcgattctcttgcctcagcctcccaagtagctggaattacaagcatgtgccaccatgcccgtctaatttttgtattttaactggagacggggtttcaccaccatgttggccaggctggtctcaaactcctgacctcagatgatccgcccgcctcagcctcccaaagtgttaggattacaggtgtgagccaccatgcccgactctttttaattcttaatgtggctacttgaaaatttaaaattacagatgtggcttgcattctgtgttggtaagctgctttagagcatttcttttaacaccaggagttcttcccctcatcatctttttggctgagtcgtcactgcagcgctcatagccccgcatgtacctctccagccagaacccttaggaatcatttggggagctccatgaagggcattgagtccaggcagaatggctaccttgagttcaacataagcattaagatggccattcgaaaacattaagcacagaagaatcccattcaggtaatcttctgttggctggctgtagaactacggagaacatctggagaaacacgtcaagggtgtgtgtgaaatcgttgagcctactcgattttgtcgtgctgttgcgcggttttcacttggcactgtcctttaaactccttctgtgccgtgactctgcagtgtctggcagcgtagtagactctactccctctatggacgtgatccctctgtgggttctctgcacacttctgtatttctcggttctttttggatttaggagtggattttatacatttttgagtcattcctaaagagcgattgacccttaaagaactgtgtacagtggtttcctttcagtaagaacatagttgtgtggcaccccctgacatgtggtgtggttgattcttcttccttgtcttccaacgccaccctcttatgagtctcttcctacccccacaggtgccgcttctctgtctcccttccctcagtctggcttttaacggtggtctcctgacatagtccattcaggctgctgtaacaaaatcccataccctgagtggcttacacacaacagaaatactgctcacagttctggaggctggaagtccaagttcaaggtgcttaccagattaactgtctggggagggcccacactctggttcacagaagcaccttttcactgtcttcacatgttggaaggggcgagggattttttttctggcgtcttttttataagggcactaatcccatttgtgagggctccaccctcatggcctaatcacctcccagagccatcatactggggattaggtttcaacataagaattttgaggggacataaacattcagatcatagcatggctggagttctgtcctgggctctcttttcactttccttgttctcatctcatccactggtaactgcattgcctcctgtctccacctaaacttccaagtatctccagcccagaacccttttgagtccaggacctgtcattcatatccatcccagaacccttttgaacccaggacttgtcattcatatcagaccaccacgagcatttcactacagcctctgatggtcttccctgtttcctcacttttgcctattttttttcttttctattccctcttaagtgggccacacttttgttcccctggttcttatgtcaggaatgtgggtgtcctttggacacttccttctccagttggataccaggccctttccctcccgaatggaatggaaatgctgcttcagctgtgttcctctgctcctcccccttacagcagtgacatagcctctctcctgctattgtgtcctgtggctccaccgagcactggggagcttttcagtatgcacttttttttttttggagaaagagtcttactctgtcacccaggctggagtgcagtggtgcgatcttggctcattgcaacctccgggctcccaggttcaagtgattctactgcctcagccgcctgagtagctgggattacaggcccgcaccaccacacccagctaatttttgtatttttagtagagacggggtttcaccatgttaaccaggctggtctcgaactcccgacctcaggcgatccaccggtcttggcctcccaatgtgctgggattacaggcatgagccactgcgcccggccatctagtgtgcactttggactgatgagctcccctacctgaaatcctgtagcaagtccctataggataggcatgtggtacagtgtgaagctcctgagtggtcaacagctaccccgtgacaacatgccacactccatgtgccactccctcccgcctgcctgctgtgtccttggccccagtggtgctctcccgtgctgaccagccggcacggctcacctggccgaactctagccttgccttttcctctcaaggatgtaaaggctctgcagatttcgggaggcctgtctcccagcacctgatgggacactttttgccccactgtaaattctgggtgtatcctccactgtatgctgtcaccccaagggcaagcactgcatctgcttagtgaaggatttattgttcggaagatacattttccccttgagcagagagtggcgtatcctggcagtcttcggtgagccagttgtaccaggattatgaaatgcagatgtttactgtgtcattgttgctgtcattgctactgaggagtactgaccagaatcatctgcaactcttagttggcagagaggaccactatggcgggtagctcttttctttcctgccattgtggggatgattccaggccaaagatgatggagaagtatggaaatcatctgaaaggttgaagcttggcacgtgaagccattcatgactttgtaaggcagttttgctgaaggccagttctgccctgggagggacggaggtgaatcctcctgagtacctgtggttttcttacttcctgctgaatttacctaagtgcctgttgtttgcttgctgtggaggctttctggtatttcatttcaggtgcagatgccttcactttcccacaaaaaaaaccccaacaaaacctaagaccttactgcaactaagtctccaagtactttttaacccaatgggatgaacagcctgtggtctgctcagatcaccctgagtgcgtgtgagaaggcctgggctttgccaggaaatccaggaaggcagggccgggctgtgttggaagctggcttagctggtggggcagccttatttcaattaaaagggcattgactgggagcagcagtcctggagtttgttgcatttcctattgccctcaaaatgagaaaccaggaaaatagcagattggagccttcgagaaggcagtaaatggctgtttttattgacaaaaggaaaacattttactgccatctcactgatggcatctcactgacttaaaatgaaggcaggttgtagtaaaaaaaaaaaagtctacatttttccaccgccacgttcttatatccttgtttgtcagccactgctcacaagggcagtgttgtcttgcggagtagaggcgctctccttccctcgttttcctctataggttggtgtggctgacctgctagatcaaagtggaggacctgtttaagaatgtgtaaattgaaggctgggcgcagtggctaacacctgtaatcctagcatttggggaggctgaggcaggaggatcgcttgagtccaggagctcaagactggcctgggcaacatggtgagaccttgttcatataaaaaaatttaaataattagctggttgtggaggcacgtgcctatagtcccagcactttgggaggctgagatgggaggatccgcctgagcctggggagatggaggttacagtgagccgtggttgtgccactgcacttcagcctgggcgacataatgaaatcctgtctgagaaaaaaaaaaaaagattttgtaactaagttttatggctagctttgagaaaggaaaataataataaaaaaagaatgtgtaaatcacctgctggatggggggaagaggggcacattgtctttgtagtgagacttcactcatgtgatgtgcagtatttcatcttaacattttttttttaaacttaagctacttgtgaagagctgagatgtttctgttaagcactgtgtggtctgctgctggtcttctgcaggccactgttccccagactgctaagacgatcatgacacaggcttgcattttcaggtggactcttgggaggggcttgtggaccctggaggagaaggcagccaggagaggggcatctggctttgtgttgttggtaggaacttgtctcggttgccctggaaggcctctgctctggtcagctgctcccagtgtgggggtgatctttatttagaagggggtcacatgcccccaggcctcattgctatgccttttatagtcaggcgtggagctcacattctcttctgcctgattgccgacgcttgttgccgagatggtgaagcagtttgtgtgcaggttccctgggacctggcttagcccacctcatttcttggggcgtgtgccttgtgcctcaaagactttgcttttggctaattgtcattagtgatggtgtcaccatcctgggcctccttcagaagtttttaatagggatctcgtctaagagaccaaaaagctttcagaaccactgacttgtggtgatttttgcatgccaagtatttggaaaatatctggagccccttcagctctcaccagttaaacctatttgtacatttgttctggtttcttcctgtgcttgaaaagcctctttctttgttgcgttaatacctctgtcttgctttcctcatgtgtatgccagtgtgacattctcggcagagtggggatgacgtggagcgtgtgggcccgtggttaatcttgtcctgaattgccttgctcaacttgcgtgtatagggtggttcaaaagttaagtttggctggtggtgaagttggaagcatcacttagaaacacgcctcctttgggcatatggtgtgaatcagggactctggctataaaaggtggggtctctgagcaccatcctggttggaatgttcccctgacttggaggtagcgagagacagccaaggtgtttgttccagggaggctggtgggtgggagatgggatttttctgtctgtggcacaggcagtattaagtagagcaggctgtttaaatcacattttaagtaaaaaccaaagtgcacagatgatctgcagaacttctgggggataagaagctgctttcctcgaagaagttcacctccaaaccagcgcccatggctcagcagccagcatggcagccccaggggtacatgggacttgggcatgtgaggctggtgagggacagggacagctgggtccagcagtgcctttcctagggacggttgccacgtcacctgtctgccctgtacttccatttcctttctttgaactcggggggcttgcatcggactacctgtgccgtttcctcaaactctaaaattgagtaagttactgagggtttccgtggtctgctctgagaagatttcttgcttcctgatctgcctgtgtgttcgtgttgcttggtctctctctctgtctctctctctctcctctttgatcctagtacatacaggcaaggtatgcagcatttaaaatgttcataactcatcaaatggcacactgatcatcatgtataatttgggaatcagggtttaagaaatttagagatcatttatatggaagaaggaaccccaagtagaaacccaaaatctagaccattctgggttctaatctgtacctgccactggctaacatatggctttaagctggatgttacaatgagagctggagtttcgtctgattgcacatagccttgcttttctgtctttggaaaagtagctcactgcagagccctggtaaacgtttgaactgcattgcgggagtaggcagaagaacagaacagtccttggagcttggtaggaggtgtgagggcttatgggggacagttgtcttttcaagtcaaggaggaataagggcttctggggccggtggaaagggtgagtcttaggcagggaagggtgaccatccaggttagatcacttcttctgcggggtcagcttggccgctgttaggttttcaggatgtcatggggctggccaggcctcacccctgatatccctgagcatctgttccttacaatattgtggagtccgtgggggcagaagctaccatcctgtgcctgccctcactctcagtgtgactggtcttcaggatgtttaggtggctccacatgcggatgtacagctttcccctgcttgttttccccatggcatattaacagcgagatctgcaagaatacatcattttgtacagaacaggatgtatttcttttaaactacgttcctgtgtggacaagtggtatcatatgcaaaggtttaaggaccgttgatgccttgagatagtgccatctgtttgcctcaggtatgtggtgctaggacaaagctgccagacctcaccttccttcagtgagacaggaataggacagtatttgaaaagcatctaacatgtttccaagcacataggtttttggtaaatggtggcagctgctgctattttttttttaaattaaactatctaagagttgcattctgagaccatctaaaattctgagtcttaagctgtgttgactatatatgttcactaccataactaaatggtccttctgtattgcttttctaaattgtagaatttcaattattgtaaatagcgggccatactgtaggtgtggttcttgctaatttgattcgtactgttcaaattcttgtgtctgtccagataaactgtatctttacagaacattcagcgaggtacatatgtctatatcggggtgccagtggagtcaccctagtcatatgtaaactctatttatttggttccgaaactgaatttattttgtttgcaagtttggtatttgggagcatttaagaaatatccatagattcttgtatgatactgacattaaatcattaaataccatattttttaaatgcctctgtctgtttgcatggataacattaaagtggttagagtgggcacagttattggtaaagattacaaagatgtgcatttttatgacaactttaggtctcacataggtagccaaccatctgctccaggatgaagcatgtgcctgtttatcctcttctttggtaacgctaggtatatgtgtgcacacgtgcacgtgtgcgtgtgtgtttgtgtatgtgcgtaccactttattctcccacccagcctcttctcctgttttgtttagtttcattttcctcctctcacccccattgcaggaaacaaacactggctctctgtcctcccttaggtcttccttccgttcaaggggatcaggtgggtgggaaaatgttgtgcaggaatgccaggcctctgcccgaagccgggcttctgtttcatctcattattgaacagaagtcgctttttgtttctttgccttggtcacaaacaagcgcccagtcctctcttctttcttcctgccatttttcccagaatccatgtgggatgggaacagaggcagcgtatttagggactgtcggttgcttgatacccatggccttgtttagagaagctgcacccactgccccaacgtgtagctgcatctgatttgtttttgcaagtcctaatgaagggacctggatgaagttagtgaggttgccgttcctggggttaatgcagagtggcccatggagcttagccacccttcatgcagaaggtggggctgagggcagccagtgtgactgaggctcgctggcccaccctgagctgcttgtgcccatggggcccctggggaggagggcccagctgcagtgcgcatacatctgcccttggcagcagatctgtgaacccaggctgccattctggatttccggatagatgcaaagtgcttggacgtgttttagcagctgctgagaccaggagttgggcttagtagtaaaaagggggaacaaaataaaagaagatcaggagacaaagagcctacagtacaaaaaaggaaagacgaaggttgatattattagaaatacttcctgggcagccttactgtttgaattaggatcacccccacccccacctcccagaggtattagttgtaatgcagagacaaatggaaactagtcagatccttgggtcctagaaaagaccagctttgttcctggggtggtaacctagtacaacgtttccgttcctatttcttgacctctgaatggccccttctgctttgctaagtagatgatattattaggtgcttagactattcttcagataggatgtaaggatatatttttgttctcttcctcagtgaacttgaaatgattggattattttgtaatacgtcgatactacttttagaagcttttgaataactgtgtcaaagaagctttagaagaggttttaagcaggattgcagagaatgtactgagtgtgtttttccactcacaaggaaagacagcagctgaatgcagaagtgtgtgtctggttctaactctttatcacttcagggactgtccaggcagcaccatccgttgggtctcctgcccttcctcctcccacccctgccttacccctggccattcttttgtgaccagtagtcctttatgaatggaattctgagaatgtataattttctcagaagaatgcttctttagctcaccaaatatttcttgtttgctgaggggggaaaaagatcctccttggaaaagtcactgggtgccaaaggtgggtgatgaggagagatgaacttctgggtgtgcctagcaaagctgtttctgttgataggcgattaacaaaacagccaaacttgacctaacagactgccattttgagaggaatttgttttgcaggattaattggcttcgaggtgtactggtggctgtgcagtgatgacggctgtcgtgcctcctgtgtcttctgctcattgtgatgcagggcaagtgcttaggcctcagacacaggctccctgaacttcgtgttcagtgctttagggtggggggacttgagacccttgacttgactcggtcccactggaaagcttctgttgcttatttgggtaaccccaactctatcttattgggcagtagtgttatcctaattcttggaaatactcagtgtagaataaagagctgatgaaaatgtgtaagaagggagtaagtggtcattagagagaaatggtaattgggatgatgctctgaccccttcagcaaaaaataaaaggtgaatggtttattatgagctagttcagattctgtttttggaaatgagcttggttatacatagtgcatttgaaaagcgtgaagcatggactttcagatgccagctcctcagcctcctgtaactccagtcgcaaaatccctccagtgtatctaaataaatgcaaactcatcagtgccttaccattataaagctgggctggagaggcaggtggcctggagaatcaaatgacaagaagtatagggagcagcccagcttcatgatcgggggaatttgcatgaaaattgtgtacacttaagcaccattgtctattgcagaaagcacgatctggcctcttctactgactttccttccagctctgagattcagttttgaagacaaggttgttggggacctcggatagatctgttggccgtggctttcagtaaacactactagagactgaggacatgttctagacttggaatggtatgaagcagtcgaactttttaggatgggccctacccttagggactgcctacgaaactagatctagaagaggaggctgtggacattaggaggtggctgcaattgggaagttccagagagcttactgagggataacggatgtaggacaggaggctggcaaagcacctcagtgatagggcagaaggaaataaagtggttagggaaggagttgagagcaggaaattcaggtaggattgatgttaagtcttagatctttgaagtgactttctctggtctggcttttgctgttaccaaagtgaattattcataagtgcatatgagaaatgctgatgtaactcgattatgtggaatgaatttaaattcatttaagtcattcttttccactaaagtaagctttccctcatccagaatctgagcagcccgatagccaagcaggagtttccttgtgccatggccagtgattgatgtcttcttctatgatgctgctgaaatgctggggactctgaagcgcagctggagtgatcaaagcaaaattaaaatactttctcagtggtttgggagttgggtgcgttctgctgtattttttggttttcggcatctgggtttggtgtgcatgcatggtgagctctagctggagcagacgttacctactgaggctacgctcttcgtggtttctccttaaccatcacccacttgatcttccatgaagccccccaaatcttccttactgaggactcttgcttccaggttgcttttgtgctcatccattgctgggttatttggtcagtgatgatggtttctctgtactttttatcagtaggttcagaggaccttgtttactcctcattcatctctctccccaaacagttgagaaaccacttgtgggttaggactcatgctttgtttataatgtttgattctccaacctcacagctaatgggaagcccgtggaggagatactctgtaaaaatccatctcccatgtgggcttgaccccacttagtgtctgagtggtttggtcctcatagttctcttgggggaggaggaagggaaggaggaggaggtggcgatggcagtggcagcagtggtggcatcttggaccagagtgagaaatcttggaccagagacaaaagaggtcttctctcagggtagtgcaccatgagagggagcacctgtttacattttgtatcctggacaccaatcttgccttgctctggtgctggccctgagaggtgcaggaattttataaagagatttacaaaacatttttggatgaccaaattggtccctggttctagctggaatgaataaacaaactaaataacagtagagtgtgagagtaagtgtgtgtgctagagaatgtgtgcacatgtatggcctaggtgagttcttcactttgctgacttgtgaattatttggggtcctatggtcctccccatcattcttattcatgtcagtccaccatcattaaggaagtggaagcgaacacattgtgtacatatcactcccatagagagggagactggggaagaggtttgagttataagtcgcacctaggttaggtctggatgtgtctttgcaggtttccttgctagttccttggccagagtttccatcgtgtccctcagctgcacaattaaggtgcccccgttttgtgcaagtctcatgctaggcagtatgagatgacacaaactaggattctgttgtgagataagataaaaacacttgacatttaaaagagagagacaacttatgcggtgtgacgagacactctacgacttttgccagaagagaaatagaggcaacaagtgctaggagctcagaggagggtaagttccacatttggaactttggattaaaagaatatttgggtctggttgaaatcgaggcctttcatgagaaatgtccacacttgctcagtactgtttgccgaacactgtatacaaggccctcgactcgtgaatgagttgtaatgcaaaactttgccaggcatttggaatgtggagtatactattttgtaaagatgaggtctgaatggtggtttaggtcccaggccagtgtccctctgccccccacctccatatgtgccctcaagccggtttggcttagacattatttatctctgactactgtgtacagcttagttccatggggaggaaaaggcttgatgaaccctaccctggaaggctggtggctctgttttctgatggatgaggtaggagtggtggaaagctggtagtttctactttgtgcctgtttaaaaagccccctctgaggccttagcacttaacagatgttcaggattgggggaataaaggagctgcctttgcagaggtctgtgggcatgcagtgggtgagagagcaggcactgagtgccccgagtttcctgcctgtgtgggcaggaggattctcagtggaatcaggagcatctccgcctggtgctggaggaggtgtggagttgaaggtgggattcttcctcttgaaggacttgaatgagtttctgtgtggctgaacagaaactggttcaacacccatgtcatgatttttgtgaagcgaggacttggggtcccaagtctaggttttaggttccctgctgtaacccgtggccaccgagagagagttttatgataaaatgtcagcaaagtacctgacaacgtctcacgctagaatgagtttcgtacatgtttagttccctctctttttattccacgctcccccaccccaactttaaatcagaaacgtgagggtgctgattgaagctttttataacttttcttattgagaattgttctctggagttgtctccaagaacaaaggaattccagacgttctccttctctccttgtctcttctgtcctccagtcaaagaaaaactctgcatatgatctttggcctggagaaatattaaatctatgttaagtatgcagacatgaatgggcaaatgaaggatttgtggcaaagaagatctgccgaaacaaataagtcatgtaaatgggcagagggaaatattaaattgattgcatctttcagctcctggtacttaatgcaaagataaagtagtgggaaaaggttgtcatttgaaataatggaaagatgagggagttttgaagctagctgggatttttctgcctgttaatagagtgacttggattacagactataaagataaagagtagggccgttgcatttagtatggatcatgatgctgattgctgtctgagcaacctctgtactaagggaggagaagctaacatccccgggcctggaagatactggatactagctcattaaactcttgtgagaagccttcattagcattatgggaagacttgctgtatctatattatgaaggcatttagattttttttaaaatgcatgttcttaacattttttgtttattaagtggggcagtagattaggactgaatggatttgattctctcatcctacatagtgtgcccagaagccagaaggtttcccagaatttgtattatggcagcgagggcaaatttaattagcagataggaaaagctttggagcagtttaggccaatccatttaattgtatcagcaattaatattttgagaaaatggaaataattaaatttacatttcttctaggactttattttgttatcctttaaggttattgtaaatgaggagacttttgaactcacagactaaagcaaactacaccagataatcattaactttttctattgtgtgccacccttcccaaccagattgttccatagtatcacttatgaaccaagaacctgtgagcttgcaaaacgcatttttaaggagtctcaacttttctgatttgtgttaaagtttaggtgtgggtcccagaaatgagtttcatggaggggagagcttgtctctctgggtgggtaatacaggggccactgggggctcactgtggctttctggcacagacagttatgaagcaggggttactaaagtgggagagagcagccagttctccagcagccccagtgagagctctcatggatctgcctattgcactggggtaggagccatcaccgtcagcttttctctggcccacagtgccattttctgattaagctgagacctctgtaatagacacgttgtcattttttcttgtgtctaaaagtttgcttgactgcagtgggtctccagctcagagcaggtctggctagagaaaacaggaggtgatgactggagcactttgcccttatggaacgtgctctgatgtagaaagcaagaggattttccttgcagtcactgaaggtaccttgtgtacacagaaagaagacagagggagccccggatgcctcggtatccctcagagccggatccttcagacctgtgcagtacctgtggatttggttagtcgatgatgcgctgccattaaaacaaaggcatcggccctggaatagagaagttcagtgagaacctctgtactccatgggcattttctaggaaataatttcacctgccctgtgtaattctctggaagaatcacagtgagttggaaggaaacttaagacttggaaaaggattgagaggttagcccagaccacaccagggctctgaaggcccagctggggttagaacctgggacaccctccagcccactgtctcctgttccctggccatttactgccccactcccctttctactctcaggggccctggatctaatgaggggattcgtgcagtttgctgcactaatacattgcaagtggtgccaacctaaaggtattctgatggtggaatcagagcagtagcatcttattaggtcagaatctgtatctcctcttccaagatttttacatgatttagtgttttctgaattggaaaaaaacaaaaacaaaaacacacaaaaaaaccatgtctaaatcctagcatttcatcccatgttgatgaaagggcatcttttttttcccctaatctgtggttagaactctcagaaacttttagaagatccctcctatgttttggaggtttgcagatttgaaccccagttcctcccacagtgcttctccaactcctggaatgaggtaaacctccaggcagcctgttgacccaacccatgcatgccggtctttgggactcctagatgtggaccctggagtgaatagggatcaggtgggaaatgagttcctttgatgaagatccttgtaccagtgaactgaccccactccccgtctggattcctgtggtgattaccctctgtattagtctgttttcatgctgctgataaagacgtacccaagactgtgaagaaaaagaggttttaattggacttacaattccacatggctggggaggcctcagaatcatggcaggaggcaaaaggtacttcttacatggtggcagcaagagaaaatgtggaagaagcaaaagtggaaaccctgataaacccatcagatctcgtcagacttattcactatcatgagaatagcacaggaaagaccagccctcatgattcaattacctcacctgggtccttcccataacacatgaaaattctgggagacacaattcaagttgagatttgggcggggacacagccaaatcatatcaccctcttagcaaggactgtgttcgtgatcatgactggcattcactgaacaatgactaggtgccaggcacctcgccagtattctttaatctttgcacagtctgtagggtggatatggatattactgttccattttttgtggaagaggaaatggaggcaagagacctgattataacttgtgcaaggtgccatgcagctaagcagccagcccaaatccagacctgctttcctatgattttcctgcccattactctcccatcgtagctcacctaatacttcctagtgggctgctgctgaacacacacccagggatgacttagtggcttgtcttgctctgaagaaggctaggcaccatgttggatgagttcttgaagatgtcttgctctagtcaagaaacttttaaatctttggagtttttgtccacatctgcctagttcttagtaaacatgatgtgggttctattagcatggcgccctccctcccttcctaccacctttatatgagcggagaacatctatgactcttatgagaaaggaaagatgaaaatcagagtgacatagtatagttaaattgcagatgcttaattataaaacagcttgtttctgaattttaattccttgcttttctctgactttttaaattcccctccttaggcagaattcatttttacattgatgattttttttttttttttttttttttgagatagagtcttgctcttgtcaccccggctggagtgcaatggtgtgatcttggctcactgcaacttccgcctcccgggttcaggcaattctcctgcctcagcctcctgagtagctgggattacaggcatctgtcaccatgcccggctaattttttgtatttttagtagagatggggtttcaccatgttggccaggcaggtctcgaactcctgacctcaggtgatccacccaccttggcctcccaaagtgctgggattctaggtgtgagccgccacacctggcctgatgaattattttcatgtgtggaacaaaactttgatgctgatcagtgattaggtacctttgtttggttcatttttaactaaggagatttctttctttttaaaaccattctttaatcttgtaaaaatatcatttaatgggtggatgttttagctgtgatgaatgacaggttgtcgtaaaggaagaaaggtatgtggtttccagtaaacttttaattcttttgcaaaataaaaataacagtcgtacagagagtaaaatatatgaagagtcaggaagtgatttatcaaaatcagatcttggactgctggttttaccatgaattaggctcttggaaagtgattgggccagtgtaggtttacattttttttttcttgttttatttgtcaaagcaaacttgtggttgcctgcccgtagtttaattctgcctcctttgggcaaacaaccgacttttactgggagtctttctcagggagataaaggtgcaccctgaaactctgctctctgattcctcagcaaagtcagtcctgagtatggggcttgggtgtctctgcaaggccttgcaagtgagatgggctgtcacctgagctcaggtggggctgctcctgccttggacagcctccccagcttctcctgcattatacccaggggctggagggcagagagcaggtcttcttctgctggtcggggcagtcacaggctttcctctcggcctgcttgtcctccgggtgggtccagcacccgctgggattcctgtgggcttagtcactgtgtggcggcggcagaaggactggggaaaccgccggccggccctggtgcgctgtcaccccgaaggaatgcgggccaggccggggctgctgggcctggaaagttctccagtccctgttgcggatctggcctgccgactcaaagtaaatctctcttcccctttatttcccatcaaataaaaaaggaacacgaggtagccactgtactcactgaagatgcattgttttttttttttttttttttttaagcgagcagcagcaagatttattgtgaagagtgaaagaacaaagcttccacagcatggaaagggacccaagcgggttgccctgaagatgcattttttaacttgctttttaactaagtatttttgctctgagctttcctggatctgtaaacacacccccagctattcaagatgggcttcttggtgaaaagtgatgtgtcctaggagaaatcacgcctgttgttgccgctggccatcacagatcccggtgcctgtctgtgaaaggctggccgggctgggtggggatgagaatggtcgggttgtctagactcagcctggactgtctttgactggaggggcctgagctcctcctccactgctcaagaccccggttaaggggacagcagagcagggatgagaagtggccctcttcacatcacctcccagcaagagggcctgacttagtgctcccaccattgccagccccagtttcagggtcccactcagttgtatttgaataggtctcatgacatgtgctttgcttgaagagcggctattagcagcagacgttcaagaggctgagctcaagcaggtgagcatgttctgagccattgtgaacccagtgaggtgcctatgctgatgcccagggccgcctgggcggggtcaggcccccatcgcttcttcatcctagctctgggagtgcattctgcactctcccgaggccagctggtggcctttggtgatcaccctctctgtaagtttttaagtggcttcctttcctctggtggagaagccagcacctttatcctatgacaagaaagctctttgtagtaggtggtagtagaatcagacagatctggcttaaaatcttggctgtgctacctcttggctctgcacattggtgaagagaatttaccttcctaaggcctctcagctacacgactgtggacactcagcttccttctaaggtcgttgtgagaggtaaagaaaaggggttagtccagggccagacatggcacaatgcctcaatgaaatattagctgatactatcgtaatttttaaattcccataggactcactgttaaaggattacaaggctgacacaaaaaatactgcattttgaatttgtgtctgatttatacatttccaaagagtggaattctcactacaacagctgttctttgaaaggttagatctttgttctgagataaattaagtggaaaaaggtgtagagcattatatgtactctgattcttcagggcttaatttaaaaagagcatgtttgctggtgaatgctggttcaatcattaagaagtttttgagaaggaatcccagaaagtaataagcacttatttttcatggaaaggaaccggaagtgcttggtgacctccacaggtaatcttgtattatttttgcactgtttggaattttttaaccatgtgcttttatttcttctattcttttcaaaggtcagtaggtgttatctggacaatagggttctggtctgttttctgttttcttcattgtactgtgcattaagaaaaaccctaatgtgcttttttttttttttaagtgaacctttccacatctcattgtccttcagtgagagcaggctgtgtgtgtggtcttggtgaactgtcccgttccctggagacagtatctgggggcctccctgcccttcccagtaagagctgggccttcacaggaatagaggcctaggattcgccttcatcctcttgaagagccctaacagtaggtcctggctggggtctggcatagaatgcccttggcacgatgtgtgtgagtgtgtctttccttagtaaatggccttgaaaatgccatgtgcttctggcaggcctggataaggtttgccctgcataacccttggaaagcacagttctcacttgtaacaccctgtctgcaggtccatgatattgtaattaaaaagttatgggatcacaagggcctatttaaagggcatctggtctaaaggcacagttaaaagcagaatttgtgtcagtggctcccttaatttctcaaatatggttctgtttctaaattcatcccactggatgtctgtgttgagttttctgttgatgaaagaatgtttaaaaatgaggcagatccaaattctaatgtctgagtgtaccactgcttaattactttgggcaggtcacctcacctctcttggaaagaaaggtgatatactacatctgtgattttcaatttttttttttttaactagacccacagtaaaacatagatatacaccatgatcccaggacagaataagtatataactaaaataagtgttttgaaatcacttcttgtctgacacagcactcacgctttctattcatgtagtaccacgatactttcttctattctaatgctggtaagagatgccttaaactgattttgagaactaccaatgggtagcagctagcggcttaaaaaggatgttattaaggtccttttcaccctgattttgactctgttggctctcagctgagtgccccatacttagtgcacatagagttggcctctgaggtcagcctcctgttttcctgtgaaaatgaggatggaagagagtcacttgtttccctccttcatggctaccccctgaggactgggaagaatttaagaatttgagtatatgttcccaatagcatgatgtgtttcattgttcatctgtaagcatttttaaatattcgagatctgtatcttgggtaatttttatcaactttttatttgtaaaataatttcaagtcagttattaaagtaacaaaaataatggcaaacttgataccttcccgtatttttttttcatatttttccttgaatgcttacaaaaatattaaagaatattatcacatcattgtagtcaccgatgaattattttctggtggcttatgattagaagagcttgactcggagtggaaacagataacatttgagtgctctttctgttaattcatccttgtcaataaccccattagctaacttccagcaaggctgtgttaggaatgtggaatcaattagatgaattttgaaaataacttggtctgttctaaaaggccctatgagattcaaactgttgtggcctggtgcctggtaactttgatggccattttgaaatgttaccgtagtgataattcttctggaatctcaagtcattaaaagtgatatggctaactctgggccctgtgctataaaaatagatgtcatgggatgtgtgaatcctttcttcagtgttatagttaatagcaactgaaggaacgttttggtcaaatcccgaatacttattaggggctcactgcttggctgcatttttctcctctgcgtaaatcatctatccatgtaattattaacccctaagaatgaatagcatttttaaaagggttccattttcccctcatatgactttggttcattctcctccttgtttctgtctctcagtgaactttccaaaagatgggttatgatgaaagatgaatcgtcgttgataactgctcttacttatctgtgtatcgaaactgcaggtagtgctcttcagctctgtggctggatttagtgcctcttctagggaggggtgggtgttggcacaaagcgtatcccatttccctgaatgtcgtgtggacacgtgagaggacagtgcaccctttgggcttggtgctgcccccttcacgctactgaaccccagggtcataattaaaagctgtgttagctcttctctggttagaggcatacaggttggaggcttgtacatagccgtgagccggttggtctaggccaggaagcaaaccattggaaaatgtggttagcagtgacagttgacagcatgtttgcctgcagtagtggtggttggtgctgcgtgttgactggagttgcttgcattgggagagcctgacttggccaagtgtgtagcttgagaccagttggattcctctcacagagacagtcttcacccccaagctctgggtgttgggcgtgcagcattcgtattcagcaaacatttgctgatttccgcctctgcaactactgagctcagctttggggatctgaagatgaatagacacagccacacttctggggaaatctccctgtggggaggctgacatggaaaccaaccaaatgggagtgtggtgcatatcttattagagctttgtgcaaagtgccacaggaagcaggagaaggggtagattggtgtggagggggcaggggaagacttgcctaggagcagggcctcgcaggatgcagaggagtttgccaagtaccagagattgtggggtaggtgaataaaggctgagtataaggataagtcaattcaggcagatgtcctctaagaatgaaggtgagaatgctggcggaaaccagttgtggccctgtctgccttccctaggagactggacctgactttacaggcagtgacggtgaagcagggcagtgccacgagcagatctgtgtttcctgaagggtctctggcagctgtctggggaaggagggaagctggcagagccgtgggtggaggcagatgccattgctatggagtgagcatggggaagggggtcggaggccttttggagatagatacagcaagacttggtgaaggatgaagttggggcaggtagaggaaaagcaatgagcttacggatgactggagactgactggagaagatgaccacccttgccattaactaggataggaaacaacaaagggtaggagtttgacaggggagaatgtttgtgctgttgagttgttgagtttaggtgcttgtggcacgagcaaggggagtgagctggtctaggaggtttttggaaacactgacctggctgcagagagggagatcctgggacacctgttttgggagttatcccagtggggaaggatcactgggaagggggccacccctttgggaggggtcagtgggacgactcccaagggaagaggttggttatagggagttaaaagaaaggagcacccctcacgcgagcccatttttcaaggatacatgtttgtcttttagattctataaggagtagctgctacacagaaagatgtctacgtgtgggtgaacacctggcgtatcccatgcagggaggcttcagcagaccttggtggcgatggaaccaccacagtgatccgaggattgggtctgaaggctcctccgagtctccaataaaaggggttgttttgaagggctcaggttcttcctgggcttttttgggacagtcttgctctgttgcccaggctggagtgcagtagaggcaatcatggcttattgcagcctcagcctcctgcctctgggctcaagtgatccttctgcctcagcctcctgcgtggttgggactataggtgcatacccccatgcctggctaatttttaatagagatggggtcttgggctcaagttatcctcccacctcagtctcccaaagcgctaggattacagacatgagccactgtacctggctgagaaggtttttttttttttcccccttccaaacccccatgtggtccagacgaggccagaggatctcaggggaattccctctccgaggagcctccactgctattgcatggcccccagcatagtcatttgagtgaagagccctccaaaatcattaagctgatttgtagaatcagtttgctgtctgactacctgatgaagatgagaagtggtagacctccccccactgtaaggtcttaacaagatctaggtggaacatgggactgtttgcaagctacttctgtttctgaaatcacatgcttgggatcccaaataatctactgaaagctgtcttcgggaggcaaagcccagggatttgttttgtttgcccctaatcatctcttccatcccctttctcaaaagtcttatatctagataatttagtacatttgatctactaacagccagggccataacaggagctgatattacataccccggaagtcctttgcaaacacactgtagtggcgattgattagtgttccgagccataggtaacattagcctgcctcgtaggaccctcagatgctgaccgtatctgctgcaattcttagatgtaaaagagcgcgcatcgtataaatcaaaactagatgattattttcatttgaaattgttgttgcactgtaatttctcagggttttgtattttccaacagtggtgtcacttaatgggaagatcgctcaggctttgtaactgggcataataccaggtattctcgtttaggcattctgctcagtagtattaacctgaagccataggacatgccaatgtttttttccgtgttttttaaaaaaattaaaatggttggctacaaatgcatccttttttacttcagagtaagtcggccttggttaagtcttaatatttctcatgcctatttttttttcttcaaatgaaaacatacggagagaaaatagcatgtttatgccttttggttgtacccagcactgcccagaatggcttacagagtttatacccatggaggtttcgtaaaggtgacattaacttcgcagtaaagtcactgaccccgaacctgtgtcacttcaggcttagccaaatgctaacagagcagctcaaagcttaagcagaggtatgtgcttgctaagtaagtgtgtgttttggactaattggtgactaccattctgaacattaactgccctttgtgttttaatgttgccaggaggccgattgtgtaacctttggaggcttccctgagtttggagaactgaattcatgtggtgacttcctatttataatgtctttgggggagctatgaaataacttttcttctaagtgtgatttttgcttttttaaaagtttttatgttgttgtcaattgggtatttcccttctatgccaagacgaattgtaggttcaggtttctatgcagcctgtatgtaaacactggccctaaagaaggactctatcactctactttcagtttcttgcattaaaacaagtatgggtagcggtatccttcttatttctgcttcctggtcctgtgtgagaccctgaaaggtcctaatggcagtgctgattagattgtggccagggttcacccacaagttccgaagctggggaaggtggaagtgctgttaactgacttgtcccatgtctggggttttgcagcctggggagaggtgaccacccctcgtttcagtccaggtagggttttatgtccctgtcaaaaatgtgttgtgtgaagtaccttgactttcatttcccagggaagaaagcccgtttcaattggctcaagcggaaaagagcactgtgggtccacttaatggaagagtctaagagtggcttcaggaagtccactgggggctccccgtgactctgcccacctgcatattgtcttcattctaaggatccatgtggtagcaaaagggttgttacaactttaaccctgcatccccaccttcaggttcagtacccaagggtgagcaatctgttccagtggcacagacctgtttcaagaggtctctagccgtgatagtgctaggccactgccctccaccagtgtgttccagagaaagatgctctgatgtgccagcccaggccatgaggttcccggcctcagtaaggaagaaggaggacaaggtggtcccttaggagaaaatgtggatattcaagaaagagggtcgcaaaatagcaaacacccactatggctgggcagtacagggttgcagaaatatattttgatgtgtgatcgcattggagctacttcaaagagcaaacacaccactttgatttatttctcttagtgatacagtatttagagagggagatactttttatcttcatgggatacttacagtggtgctctagaagccatgtactgcttctggcttctccttcctttcctccaaggctcctcctgcctcctcccaaagctctgtgccctgaaagagccttgagccattgctcagatgtcaaaattgtattaagcagacacatcaaattaaaacttttgggatcactcaccaatatggtttcctgtacagtactgccctgaggggggattacaagtagttatgcatccatttcattgatgtatcatttttattaaaaagaaaaacaatccaaccaagagaggaagtgtagccagctgcctaaagagtggcgatgatgggagatgatattttgattacattaatccatatcctgttagttcactttgcttctgtcgctgctgctggtgaagttactaatgtgaactaattacatttgctctgaaaagccagaatttttaatgcatctcagcaagaaaggttaatattatcaatttaacagcatgaatgaaacattgtgtgtattgaacttgaactgtcctaaaagcttggataataaaaacccagtggcttcttttataactcactggataaacagttattggtgagacatggataaggctttcttctctttcagttttatggggggtggtaggcagtcagcattagatgctgtctgtttacagggtgatatcgtaacttcgtgaaattggaggccacatttaaaaaggcactccttccttttaaaagctttgcaagggggctgcatatattttcctaattagtgggaatattttcttttttctttttttttttttttttttgagacagagtttcactttattgtccaggctggagtggagtggcatgatctcggcttactgcaacctctgcctcccgggttcaagcaattctcatgcctcggcctcctgattagctgggattacaggcatctgccacctcacctggctgattttttgtattttagtagagacgacgtttcaccatgttgcccaggctggtcttgaactcttaagctcaggcaatccgcctatctcgggctcccaaagtgctaggattacaggcgtgagccaccgagcctggctggtgggagtattttcaaagagaacaacaattcaccacaccccaacatggtaacagtctttttgttttagaagcatctgtgaattgccaagactcgtagaactaagatgtattcaaagtcagtcgattttctggaaacgacccagtccctgaagatagtcttttggggagttgagtgttttgagagggacaccccctctacagggacttaaaatggaatggctttttgtgtgtgcacatggtacctgcagtgatttcttgtgtttaattacttcctgcactcatctgacttacacagtggtaaacaatgaggatgggaacaggcggcagctgctctgtgccatccaccgtcttgggaaccccagcgtggcattctctctggggcagcatgttgaagtgtttggctggtgacattttggtgaccagttggctcctcattgtctttcaatgtggagattaggaaccgagcgaggatttggaacccttgcgtttgttctgccaagaacatgacttgcctctggcctgagagcagtggagtaagctgataggagctagaaatactgttttgggtaggacttacccaaaagagtgggctgagtcacagaactcccaagtttgagccctgtcaaataaattctgaattgttctcaggtatgtttctcaattggaatttttttaaaaatttaatttaaaaaagacttcgaaaagttaccttgttctcatttttcttctccctctttgccccgtccccacaatatcttagggcgaagaaaagcaggtttgagaaaagctttttttcatcatgtatttgtaatagctggagcctgctgagatgatgaggtggagtggagggagaaagagaccttgaggaggtgtggagggggaaggggtggaaagttctgtcgtcttctgtgcctctctctctctcttgctcagggtctccagtcagccctctgggtttgtgcccttcgtgctgcactgacaggtcaaagccgactcaggcctttgatgtctgctctaggagcaaaagtgattcctggtcccgcagccgtttccactgccttgtgtatgaaggtctgctgctctgaggtggatggtggctctaggcaggctgtttccgctgggtgcggttgttgctgcaggtttttctatatagcttggtcatgctcctgtatctagattaaaatcctatgacagatgggcctgcttatatctaaacttattcagagagtcttatgataggcaacaggttaccctttaccggggtaaaacatggtttattctacagtttggtcccgttgtaaggccaggagatagagtctcactagtttgccccggctgaactcaaactgctggactcaagggatccttccgactcagcctcccaattagctgggactgttggtgtcaggcacacaccaccttgcctagcttgaagatctttcttctaaatgagcgggctttaaagtgatcagtgggacctgggcaggttggctcttgcctataatccaagtgctttgagagaccgagacaggaacatcacttgagcccaggagttcgaggctaaagtgagctgtgagcacaccagtgcaccccagcctgggcaacagagtgagactctgccccaaagcaagataaaattatcccacaggattttagtcctgacttgtgtattactatgcagttgtgtctgtgtgaggctcagattcccccccatttaggatttgtgtggctaaatctcagatctcattttcaggtgaatttctctattaaggttataaaagaccaaaataactggaaattcaactctgtacttgaatacttggtaatgcccagcattctcttgactatcccatttcacagtttgccggtcatttccccagtgtactcactggattcttcccgcagccatgaaaggtaggtataattaactccagtttacattcaggacaatagaatgttcgtcaaaatgcttttgcacatgttttctcaccctgagtggctacacttgtacagtcataccctccaaactctaagatgtatactcttacataccaaaacacaaagaaacaacaggaagtaagaacaaaactcaagaggtctgagtgacatcttgccttgcttcacaacttcagagtttgcattgctttaaaaacattggttataagtgagtgtggaaacagtgtgttcactatttttatgctgtggctgtgctgtgcaggagctgggcttttcgtgcattttagacagaattgaccttggttaatgcttgacttgggaactatgcagaaacatccaggaagtggtggtggctgatcctgaccgtcctcagttttgtgaagcaacagcctctgtgcctctttctctgcatgctctgttgacggtctagtcttgagagagaacctgctgctgtcccgtctgtcgtagccttcctagcaactcttaggcctgcatgctgtgttttcatgatctcccccaaagcggcactttgatgttttttcagagtcaaagtatcactgtggatatttatcccaaacaaaattgcaaactgatcaaatgttatgtcttttgataccaaatcaaaaacgattcttggtggctgatcaggttgtctcctaaaaatttgccttttgaacctatactgcctttatgagatgattatgaaagtagaaaatagcctgtgaaaaatggtacctttgctaaaaagaaaaaaaaattttttttgaaactaagagtctctgttgtccaggctggagtgcagtggcactatcttggctcactgcaacctctgcctcccaggttcaagtctcccgagtagctggaactgcaggtgcacgccaccacatgtggctaattttcatatttttagtagagatggggtttcaccatgttgcccaggctgttctcgaattcctgagctcaagcagtctgcccaccttggcttccgaaggggctgggattacaggcctgagccaccgcgcctggcctgctgtaagaaaatattaaacttaggatgggaaatgtgatctgaacaggattcctgtgaaggtacccagtgtaggtcttagtctcctctccagtgtacatttatggaggggcaagatttcaccattctgtgaagaactctgcgtgttgacgactgctcacgcctagggaataaatttcagagcatgcgtagatagtgccattttctacttaaaatactataatccattatttacttcggaaaataaaagcattaaggctgaaagttttgggttagtaatcttgatgttttaaaatgccttagcattccttcatttgttttgcttgccacgtggttttgctctgatttacacacctctgtgcatggctaatccactgtgccactcttggggctttattaactcttctctgccagtttttcccttagagaatatcatggccattctctaagatgataaatgggactaagagtaaatgcaggctgaaaaagcatttaacaggtcaaggatctgaagcttttaagaaggcaaaacaataaataagaaacccaaacagagtcttgaagcacacccatcgaaacccaagtttcagaatttgctgcagccttgctgccaaatcacagtaaaagctgaaaaggcttttgtggttagttacgtgtgatacaagaaatcgatgtgtctgagagaagtaggatttctctttttgagggggaaaaatacagcaaggggaaatgttttattaacaataaatatgcggcttaccatatctgtagggcacagatttggttagtagtattttgaaggcaggataaaggaagatcctaaaatctctgtgctgtgtagcttccattcgagctgcacatgttaaaaacattctaggatccacacagtttaaacaaggtggctggcttaggaaatgcttctccccattccttggcatccccacaaccctattctcctactttctcttatgtatctggactggcttttaaaagatatttagtgaaatttaattttctagggaaactccactttgtcaaaagtgtagtattcctcaaggatagctttgctggtcggcaaatctcagttgagtgtatttgtggtttaaaaaaaattctttctgaatagaaatacaaagagtgataatgtttaacattttattttttaaaaagctttacgctgtgtaaattgtgggttgacttcatgtttctaaactttgtcttttagaatgactctcttgggtaaattattagcagacactctcgtgttgacatgtccattttcctttccattaagctgtctccattgcagttctgttgatatggctttatatagttttcctgagcttttttttttttttttttttttttttggtaacaagatacctatgcaagctgaaaaactcttggctttttagtttgtatcacttccagaaacttttagatgctacgtatagaagtggctttcttttagggttaggtaagatacttccttttttggaaatagttttgccatttggtctcgctgcctgatttgtgctttttcttcttcagcaggtagtaggaggctgtgtattgtattgccttttaccagacacccagaggggtcatgttggaaaatagcatcctcttagcaaaaacacaatcccttctctgagaataaattgccaagtctttccaggtcattgatggactctcaggtgctgcatttctgcacgtcggggaacaagggtgaagaacagagctagtccagcactgctccgtcctcccgcatttcttcttctgtagagtcttttgcaaactagagagtcttgcagagagttgttgggttttcccaggagatactgtatgcaaagaattgtcatgaagacataaaatcaagtcttggtgtaaaacttttaataaatttaaaggcatgtctctgtttttctcctcctctatggggattttcatgtggttagtaataaaactgtaggcagttgtatgtctagatttctatgtaatttgtttgtgttcgtatatgcacacctgtatacatgtgcacatgtattcaagaaagacctgcagtatgcttgaaaggattgaggtgcctagtttgtggtagtagctgaacagagtgggaggtcaaagttaagtcattgtgaggcaagggaacttgacttagccctttaagaattggtctgtccctgctaagccaaggctattagtgttttcttccctagctgtgttctgaaatggttcacctgacattcagctgggttgggggagaacctctttaaacatcagatcttattccggaggagtgtatccagccttctcacagcatatcctgttaaatatctgttcaaggttagcctaggcctggagtatggacagcatgaagccagatctaaaacagatcagttcatggataaatgatgaatttaataaaatttgaaaataaaccccacataactagtgctgctattgatcattcatatagccagcaggagtggtgagaggcttggtctgcctgaggtgtggagatgcttgtggcggggggcaaggtggacgagggctggggctgctcctggagcatctttacgcgggtggaggagctctgacacagtggcagtgtttgtaacactttccaaagggattaaaataattctgtagagttaaccctaggctagtgtggcttgatctgaaacagtcccagccagaaggtaagaactcctgtgttatgttgttagcatacaatttgctgaagttcacattttaaattttatatttaaaaaccaaaaagtagtactgatcattttggactgtttcaaagtgatattgtttttacttgttacaaacattggcttgcctgcatctaattgcactcacaatgggccggatgtggtggcttacacctgtaatcctagcactttgggaggctgaggcgggtggatcacctgaggtcagaagtttgacaccaacatggtgaaaccccgtctctactaaaaatacaagaattagccaggcttggtggtgggtgcctgtaatcccagcttctcgggaggctgagacaggagaatcacttgaacctgggaggaggaggttgcagtgagccaagattgtgtcattgcactccagcgagtgcagtgtaaatcccttaaggaaacagtgtgttgtggtaatcgtgatatcatagtaaataggttttgttcgttatttttttcttttacttccttttctaccagtgactagtcctaatgtgttctaacttttgaaaataaagtacaaattagatggatttaaacatacgggaagtaagacggaaattcattacttttaaaaaacaatttgttgtggataagatttagaaatggaaacacaataaactgtgtttccatgacacaggtatactaccaagttcttacaatgtacctttgaggtaacgaattttcatgtcatttggagtagggctgggccagtgagtcactcatctccttgttcattcattacgtgaatacctagtaaatgcccactaggcaccctggagtcatttgtgtagagtggcatctctatacaactgttcgactaactgtcggagacaccctaatcaccccagccacaaacaaatagaacattgtatgtgtgctgaatcccacaaaggccagacatgatgccatgagaccaagaaggaaaagaaataatgtggaaagggtttggggtggaaaggtggggaacctggaggcgggccacatggggccccagaagccatgttgagggttttgtcttcaccaaaggatcagtgggagattagtgtagaacattaaacagaggtggggtatgtgtcatatttccattaaaaaattcatcctggccacagtgtaaagaatagattagggaggaagccaatcaggaagcaattggagtaggcaatgcaaaaggcaaagtgaacttggactagtggtggagataagttgactgcagagagagtaggaagtaaaattggccaggcctgtgttgggggtgggcttgtgagcaggatatcaaagataatgtccaggattctggcttggatgacaactatggcaatgcccattactgagctaggagatgctggaggaagatcaggtggggactgtgagcatgagtttgatttttgcagatactgggtttgagacacttctgagtcaagcaggcatttggaaatgtggactggtgccgagaaggaattcccagcagtgacttggtttaggtggtcctggaaagtagaaacacacacgagataattctggggatggagcttaaagggacgtcagcgttcaagggccaggtagaggatcatgagctgtaaagggacccaggtggttccagcacagcgaggaaagcatgcgagtgtgatggccaggcttccagggagagaggagggttttaaggagaacaacgtgctaaaagccactaagaagccaagcagagtgagaaatgaagacctccactgggtcttgcaagaggggaggcctttgaggacctcacctgagagctgatgaatgaagtgatggctggaagcagctctggagagggaggaatactgtggggaggggaggaactgaagaagtagagaagcatggctgtgcacaggggaggtgggatggcagccagggaggagcagaggtggaatgtggatcttgttttccccaacagagatagaggggggctaaaagtccatggaagggactctgctgagagggaagggtggatccatgagacagaaggggagagctccagtaaggacccagaggtctgaggacaggccaaagcacagatggagggattagctttggatggtaagaggaaggacagatggccccttaaacatgacggtaatgcaaactgctctgttttttttttttcttttggcgtttgtgatgaactttgtatatgctttccttgtttgatccttatcaaaccttatgagaagaaactaccattctcctcatttgatggatgaggaccctaagccctggagaggccaggaaacattcccagagtccctcaggaggaggactagtgctgggctcctttcctcctgttctgctgcctctgagaggagccaggattgaatcgtagccttgtcctctgacctggaggtctgggagtaactctcttatgacttttttagcctagtagaattgaacatgaacttcatgttttaagggatggttgcatttgtttgaatggtcacttctttttctatcagtattagctaatatagggagaaggaagtcatgcttctcaagtaaagcaacagtatctgtgtatccatttacttgattgagctttctactgaattacaggagttaaattatactttgttacactcttggtattacaaaatgatggccatgcctttattataaaatgacaccagttattctttcctggaggatgtgccttgtgtcactagccgcactaagcacttccccactagtggccccatgtggttgtgtgtcatcgctgactacctgttacaggtgaggaagctgggtggtgcagagacagaaagccggtggcccagtcaggagctcctaagtggcagagccctgtctcctgggttccttctcctgtctttcttgcctctcacttgaaataagagaggacatcagaactggcctgaatggggccctggtagggcaggaacaggacacctctgtggttttgttatgatgtcctgaggataaaggagtgaaaaaaaaatctttgaggaattgaagatttctttatgaaagatggctgaaactcctgacagcttttcaaattcatctttggagaaacttccgttttctctttcctgttccgaggcttaaagctgccctgaaatctacacatttatcaacagtctcttgtcaagactccagggagacaagaactcttatacattgctgttgagagtgtaaaacggtacaacctttatggaaggcaaattggcgttataaatgcgtgttacctttgacccagaaattctacttctaggaatttatcttaccaatacacctgcccacatacaaattgcagcattgtttttgatagtaatacgttagaaataacccacgtgttcttcagtgggagactggttaatacactaagatatatgcacaaaatggaatgctctgctgctgagagaaaccacaagtatgccctgcacccctgtgaatagatctccagtatattaggtggagaaggcaaggcaggcttcttttttgtaaagttaaggagggtaaataagactgcatgtttgcatctgcttgtatttgtgcagactgacactagaagggaaaccaagtaactgaaaaacacgatgattcaccggggtaggtggggaaacatctaggtcgggacaggtatgggagtgacacacctcagtgtacatctttgtatcatttttaaaagtctgtgcttgcattatgtatcaaaacttagtgctatctcctcaggtgcagggttctctggaactctgtctaggttggtctcttggatggcattcttggagacttgccggaaaaccaaacaaaaggtgtgagtgcatgcctcctggatagatgtctttttagtgtaacttagcacaccttgtacactgtcagggcgcctctcagatgagtcatcccggcagcccctgctccatgagtgtcttccccacagtcctgagtgcttctaaaatcatctacaccagtggaggcaaaactagatattttcttagtttgcagaaaggaatatttccagacaacatgaacttgttctcctttggtctccttttccttgtcattgttcaagtcacaaggtctgctgattaaatttccccttgggtttcaaaagaacttgcttgtttggttgttgtgttttgccttttaatttgagagttgaggcccccaggtgcatgtggtaaagaattcaaagggctaaatgggtgtgtgttgttcgttatttctttgaacctcttggcacttgaatggtgtcagtaatttcactaattatggttggcaaagaaactctgacacatggctttggagctgtgttgttcttacatcatatctcttgagttgaacctatgctctcttgatggatgaactcgtaattcaccaggtgcgtggatcgctgtgattaattgtttcaagctatcagttatttaactctctagtgccaaatgttcaggagaaaatgtaagtgcagtgtaatgtaaaatcaagccggcaactccagcaatttgctcttcaaactatagctctatcagttcccattcatttatacacttacactactcaatttgtcgttgttgttgttgttgttgttgtttttgagacagagtttcactcttgtcacccaggctggagtgcaatggcatggtctcggctcactgcaacctccacctcccgggttcaagtgattctcctgcctcagcctcctgagtacctggaattacaggcacccaccgccacacccagctaattttctgtatttttagtagagacagggtttcactatgttggcctggctggtctcgaactcctgacctggtgatccgcccgcctcggcctcccaaagtgctgggattacagccactgtgccctggcactactcaatttgtaataaatcagggtaagttatttttggtgccaagtcgattaattgaatataggttattttgcatcttagattccctctgacgactaaatcttataagcagaggtatgtgagcatgagaactgtgtcgggtggtcctgaagagattagtggattagaaggagatttggagatttttaaaaaagcctctggacagtgagttaaatggtgggttgacactctgtggtcgggactttttggagagtctataaagttctgctgtatttctcaagagctagagagagatgatactatgaccaaatttggtttgaatgtattataatgtactgagtatcactaatttgttgggaaatgactgttaaaaatacttactgacgcttaaaaatatcacctatagcattagtataagtagccaactgatttacatatatttcatgtgtgtgttgggagaggggtgtggattcgttaggccaaagatttcggtaatatatttggaagagataaatgaagataaagagataaattaccttttgaataattccaaaactaaaaatgcttcccttaatttttatttctgattttcttatttctatcagagaaatgtttctcatgtgacaaatataatgctttcatatttacttctgcatgcacaacttttaattaagtattaattgattaattttttagagacaggatcttgctgtgtcatccactttggagtgcagtggtgtagtcatagctcactgggacctcaaacacctgggttcaagggatcctcctttttcagcctcctgagtagctggaactacaggcataagccaccttgcccagcaaatttattattattattatttttgtagagatggaggtcttgctgtgttgcccaggctggtctcaaactcctggcctcaagtgatcctccttccccagcctcccaaagtgctgggattacaggcgtgagccaccacatgcagtccgtgtacactttcacaccttttaatttctttactcattaggtgcattctttagcaattatgtgtaaagtggaaatgagcgtgcaaatcgtcattttctattgacttgcactccagaattggaaaattggaaaactgtaggaaactggaaaattagaaaactgtaggatctaaaacaaatcgcttctatgacttataatattcacttgtagaactcactggcctttgtcagctttcagagtatgtgaacactttttgccatgtaagtagttagtccattggcaatggatatatgtaagttggtatcttcactgcaaacatttagttaattgcgtttattcttgagccattcttgctctacccttaggacttgattttcagtagctacagtggttattccagaagttgttagaattaagagccaggaggaggtactatgtaagctacatttagactccactggacactcacatattgcacgtggaatatcttaaaggggttgtgtgctgtggtcagggtgggaattatctcttttctttccatgagacctccactgtgcattatttaagggcctgtcaattgcccgttattcaagttttgttgttcttggaggacactattgcctatttctttccttgtttaaaaaatttcatttaggtaggcttagcatagttgcagtagaatttaataaatccttttttttttttacagaataaatctttttattacgtaaataccctttaatttgcctatttttaaaattcttgtttctgtgcttaccttgttgttagacagccaaggggatatgctgctctttttagtgccaaggtaaaaggtaaagctgtatcttaaatatttgtatttctctttggtcttggtgacccaaagtgatttgggtcattctgacatttaatcaagtttaaacaacatggctcttagaagtatgtttaccaggtaatctgagggctggttacctggtaacgcaattgagaaatttcatcaagactaattgattaatttattaagcacttattgtccagtttgcctttaattttcatttttctaagtttccattagctatcatggcctcacttgttatttcataatgaatggttacaaattgtttgtgtgtttttgtaattagaatgtaatagcaatcgtctaccagatgagctgacattgtaatgacatgaagtcagtaacaattatgccttacaggaaaattaattctgtaatcctatcatcccatattttgcctaagagattcgatttggctgctgctaggctgcttaggcaggtgacagcatggtgggacacttctcatttttctggttagactacttaaccataacattcatggtgccacctgaaaaaataattttatcgttttagacttttaaaatatttttaggctttttttttttttggcttaaaaaaagaatctgttctacttgggtattttgttctccttatttcttagtgaacaaagatatttgctcgacttctatcccagaaggaccatcctttcttcttccttttccttacctctaagggatatgaagctgtgagagggaattgcatatagcaataccattttgattccagtgaaagttcttacctttctcttttgtcattctcaacctcttacctgaagagtccattccctcagtatatagagcatctggaagtctaaggtgcaggcaggactgaaagagctgagaaaggcctcacatcaggtgacactggggcacctggctgtgctcccttgttggggggtcccttggcctgggcagttttgcgcttctccctgtttccctgtgccctgagactttgtgggtcacaggcaagggggctggcctccctgatcaagggcccttggcctaggagggcccctggatttatctagtccagcttctcgtcgtccaggtgcaaaactgatgctctgagatgtttagggatttgtccaagagcagagttggagccacagtccaaatcttctgagcctagtatggtattctgtcatccttggtttcattttgttctgttcataaaaattgcccaaaactgctgggcaaagtggctcatgcctgtaatcccagctcctcaggaggctgtggagggtggattgcttgaggccaggagttcaagcctagcctgggcaacattgggagaccctgtctcttaaagaaaataattgcctaaaactattcagggttaaaaatttgtctctaagcttaagaatttggaaaaactcagaaaagtagccacctataactccagcattctgagaacagttaagtgtattttcttctagttttttgtttgtttttgagacgggatcttactgtcacccaggttggagtgcaatggcgtgatcactactcactgcagcctctacctactcaggctcaggtgatcctcttcacctcagcctcccgagtagctgggactacaggtgtacaccaccatggccagctaatttttgtgttttttttgtagagacagggtttcatcatgttgcccaggctcatctcaaactcctggcctcaagtgatccacccacctcggcctcccaaagtcctgggattacaggcgtgagccatcatgcccggccttcttctagatgtttaaaacaaacacattttagtgtagttgagcctctgatcgttacatgtttatttcctagcatttaaaagcctttcagcgacatacactccttattagcttaattttttcttttaagagccgtgttcttgctctgtcacccaggctggggtgcagtggtaccatcgtaactcactgaagccttgagctcctggcttaagtgctcttcccaccttaaccttctgattaactaggattacaggtgtgcatcaccacgcccaggtaatttctaaaaaaaaaagttttttgtagaagtgatgcctcgccatgttgcccaggtgtctgtcttgaatgcctggcttcaagcgatcctctcccctcaactctcaaaaggctgtaaccctgattttaatggtagtgtaaagtgacatgggatgaaggaaccgtaacattcttaaagtttccccattgttgggcatttgcattggtcccagttttttataagtaaagaaggctgcagcaaactctgttgtactacttaatctttgtcctttatttcaaattatctccctacaatacgtcccttgaaataggatttctgtggaaaggtatcagtttaaagctcttgacccatatggccaagttgctttccaaacagcttacctgttgagactcggacctatgcttctaaagcctatgtgtgaaatgttcacattgtctttgggagaagcttcccacgaataagaaaaataagggaagaacaaataacataattgtttggatatatgctgtggtttgtgtggacgtctcccaccctttcccttccccagcccaagtcagtcttctgtataaacaacttacataatacagactcttcactgtttgtattatacatgtattttgtgagtctgtgtcagtatttgtttacacgggaattagggcatcaggctgtcttcctagggttcctctgtgcagacttgtagacagtatgggttctttgcgtgctgagttgaggtggccccaaacctttcagacagttgctcagatacctggcagttgctcatttacccttccagaccttcctgcctctatattagccaatgacaagcagatgctttccacaaaacattcgtgtgtgaactgttgacatttatgactgttttctgagcccacaccaggtcatttttctataaaatcagaactgtgagagctcagggcatgtggccatcctggataatgggtcctgctgtctggggagtcgttttcatcaaaattcacttttaaagaatagagtgtttattaacgaaaatatgtgagccttggctgggcactgtggctcctgcctgtaatcccagcactttgggaggccgaggcgggtggatcacaaggccaggagatcgagaccatcctaacgcggtgaaaccccgtctctactaaaaatacaaaaaaaaagttagctgggcgtggtggcgggcacctgtaatcccagctactctggacgctgaggcaggagaatggcatgaacccgggaggcggagcttgcagtgagcggagattgtgccacttgcactccagcctgggcgacagagcgagactccgtctcaaagaaaaaaaaaaaagaaagtatgtgagccttatcccccaaatgtacctgacatgtgaataatatggctcaaactaatgatgtgtataatattaaattgactttgttattataagtgatacataattcaattttagttaaaatgcattatttcaatcaatatcaaatattgcagaaggaaaacctaaaatagtagccaaagttactcagatgagataaagaatatgtttagggctggaaaatcatactttttttttttttttttgagatggagtcttgctgtgttgcccaggctggagtgcagtgacatgatcttggctcactgcaacctccgcctccagggttcaagcgattctcctgcctcagcctcccaagtagctaggactacaggcacgtgccaccacacctaatttgtttgtgtatttagtagagacagggtttcaccatgttagccaggatggtcttgatctcctgacctcgtgatcacctgcctcggcctcccaaagtgctgggattacaggtgtgagccattacgtccagcctttttttttttttaaataaagagggtctcaggctggcgtgcagtggcacgatctcggctcactgcagccttgacctcctctgctcaagcaatcctcccgcctgagccccccaaatagctgggaccacaagtatgcaccaccatacctggcttttttttttttttttttttttttgtattttttgtagagacggggtaattctatgttgcccaggcttgtctcgaactcctggcctcaagcgatccacctgccttggcttctcaaagtgctaggattacagatgtgagccactatgcctggccaataattatataaattttgatataaattcctgctcttcaaggagatgtgggttttttttcctcctgagagtatatttataaagttaattggattttatacaaaagaagcttttgactcatttcatttagcttttaatgttatcatctgggaggagatggtgaagaattctgttagccaaaccatggcgaattaatgtttcttacagatggttttattactttttatgatattatttggatcatgaaacaagtatcttggaaaatgtgagatacaaagatgtgagttgggaggtctctcttgtatgtgagttccttctataacagagaaaggatactttcagtttaagctgagatgctttttccttttcactcttgaaaagtctttgttgcaggaattttctgtgccctccctcctctgggacagatctgcttcttgatactgcagggctccagccttccttccagccagctcatttctcagggaagccttgttttcctttttcagaaaatttaaatgtatatttaacgcacaatttaactccctttcctgttgataatttttttcttcttcatattttgttattaataatagcttacagaatgggatcagtatcaggatcgggaggtaaccaggtctccaagttttccctttcgtttttcttttctgcttttaatgagccttaattaatccagggagctaggctgcagtatctgtggctctccctgatgttttctttctgcctttctgtcttggaggggaacctgaggatttggaagtagagggctctactagtgcttcctttttgtccttttctcattgtccaaaagagtcttaagcgatctccaggaaatcccctgctcctgccaggaatctgcctgtgagtatttgagtgagttgctgctttttaagtaccagttgagaagctgaaggttggtgttgtggttgtgataaactcccaacatgaaaactgaggaccaccagcgttttcagctcacctttgactcacgctggcagctccaggaacactgaacaggagtccccactgaacctttgctgcgttccgaagcagcacagccatggttaggcactgccaggcagctcttggaaaccacagggagggaagttttggttccttctttctgtctttgtttttgagaggaatgagcttggaataaaagaacgctagtaatgactgatttgcaggttaggtgtaaacattaaatcctcataacaggctaatgagaggtgggagaaattatccccattttacagatgaaggaacagaggctcctagagactaaagaacttgctactcaatgaggtcaggattcacacctaggttgacctgaggatagctgctgcagtgctcacccttcctaccttcccaagaaacaatacgcagagaatttcttttctaaatattgtgtgcctagaaggtgctttgtgttatcgaaacagatatatatgtgtatatctggtctctttaaaattctctttaataaaaacaaaaagtgatgctagtgtaaaataaaagatatatatagaaaattgtgtgtcctcgttaatcttctttaggaaagatatatgcatatatgcagtatagttttgggtttttataaaaatgagatcatgctattagtatagtgaatagcctctatatagtctttcgtaacatttttactttttctcggtgtatggatatcaatttaggtcagttgctgcggagtttgaaacgagttaaaatttcagcagttcacaaaatggatgattcatagtttagtcgagccatcatctgttgatggacagtcatgtggtttcttgttttttctttctctgtgtttcactaatgaaacaggattacagtaaattgactcgtgtatgtgtatacatccatctttgctggtactatagaaaagtgtattgctggctgggcatggtggctcatgcctgtaatcccggcaatttgggaggctgaagtgggtggatcacctgaggtgaggagtttgagaccagcctgaccaacatggcaaaaccctgtctctactaaaaatacaaaaattagctgggcgtggtggcagtggaggctgaggcaggagaattgcttgaacccaggaggcggaggttgcagtgagcctacatcgtgccactgcactccagcctgaatgacagagcaaaactccattgcaaaaaaaaaaaaaaaaaaaaaaaaaaaaaaaaaaaggcattactgccttgttcctgatttaaataaaaaaatgtgttttaacaaggaatatgttaagttttggtaaatatagtttatcatatttaagttgtgtatactcattcatgttttaatttttatcggaagaggctgatgaattttatgaaatgcctttttggcatgatataattgtgagcttttgcttttatttggtggtgtaataaattacgttgattagatttcccaatattgaatcatctttgcattcctggaataagccctaatttgttatggtgtgataatctttggatatgttgctatttgatttgctaatatttttttaaaaattgtgactgtagcctacaaagccctacagataggggtctttagtttttttccttgtttgcattctatcaggtattgatattaggattatgttttttaaataatttaagaagaatttcaccctttcccagcatctagaagcatttacataatataggaaataacctgtttttttttttttttaagttagagtaaaattaactggaaaacttcataggcatcccctgtagtcccatcccagaacattttaaaacaaattttttagtttttcagaatatattatagttgttctgttcagcttttaagccttttctctggattttgatattttctacttgctgggaaagaatttatctacaatttgagtttatcgcacagttatttgtaatattgttatcatttctctggtaatcataaccctttctcattactaacacatatttttgctctttttttgcttttttcccccttaatcaagtttgttagaagtttatatattttattgtcttcaaaaaactaggtatattaattttatatttatcctgcttttaatttcatctcagtatttaatttttattcactttttccattcctttaagtttattaagttgaatgcctgtctcatttgctttttagtcttcttaaaataatggcatttaaggctatacattttctttgaaaattgcttttgttacgtatttttggttttagacagttgatctcctttttgttgttttctagatggtttgtaattaaaatatttatttgatctttgattctgacattacttagaagtatgtctgtccttgaatttttcttttgcttaccttttgatattgtttatatgatttatgaatgcagctctgaggtatctgagaggatttattaacgtttacttgcgtccaagtacatgattaagttttaattgctttgtggacattaaaaaattatgcccttggtaaaatgcaaaggttttattttctgtatttagtaaatcaaacttactgattgcattatagtcagatcttccaaattcatgtatgttttcagttgtcaaattgacagttaatgatgcaccttttataatttttttttttgagacagagtttcactctgtcgcccaggctgtgtagtgcagtggcgtgatcttggctcactgcagcctctgtctcctggattcaagtggttctcctgcctcagcctcctgagtagctgggattataggcacatgccactgcacctggctaattttcatatttttagtagagatgaggtctcactatattggccaggctggtctcaaactcctgacctcaaatgatctgcctgccttggcctcccaaagtgctgggattacaggtgtgagccaccacaccgggccccttttataatttttaaacttttcatatttccaagagaaatgcttagtgtatttatctgccgttttgcttgatgcatcaatatgtgtaatttttttatttttcagggattacatatttatcacatgtaatatccctctctgtccagtttaatgcttaatggccttgagttcttggtttgattttactattgccagctttgctttctttttacttgactttgcttggtatactcttgttcaattgtttgtttttaaatagagctggacttttaaaacccattgagacatttttgttctctaatagggacgttctgccttgtctttctttactgtgataatgcatacattttgctttattgctttcatcttattcaatggttgccatttattttactttctgttattctcaattcccatgttaattgaacaagtcctttgctaatttgaaaagtgtgttattttcaaagctaccggtgcctaacaatttgaaaatctgtatttttctcctgaaataggtaccagcattaaattactaattcttccaccagggtttgcatttccgcaatttctgccgttcccatgactttctctgtctcctggatgtgttctctgtcttttcactcatggattctagtagattcttattccttgctcttgggcgctcgcatttcttcttcttaatcctccagaatctgatactctagagcaacagatcttttctgttcaatttaaaattttaaagtgtttttttttttttaattcctgaaagtttttatactccaattgtgtctccacatatgctcttagactcctcttcccgtctagttctcctttcttggttcaattagttctgtttcagctggtgccacctgttgcagctgagcttggtcaccctccctcaggctcctgcgtcgtcctcagtgggtcatggtttttctttgcttgccgatggctgccctcagccgtcacacaagtcatgggttagtgtcactcaaggaatggcagaccagcagatggtaggtgataagccaggaaacagatactgtgccgctgagttgctctgttcccagtctcttccgacaacataaggcttgggaacagttccaccttccatggaagccccccttccctctggtttcacctgggacagcaggatgagcagggtgcagggccttcttccctgtggatggactctcagttacaatgaccatggagaactgtacccgctctctgttttggagatttgggagatcctgagggcctcagaaggccctcactctcatcccatgcactacctgtaagctcattagattactgtccttgttactttagagaggggactgtgagggaggcaggaccaagtatgtttattcaggccactgtcttccccataaagactatatttgtgtacatttttctttgctgtattgtgagaaggaggtagaaaaaagatgtgcatgtctgcatttggaaacagttctgagagtggtgctgcatcagcggggctggattgccctcaactataagaaagtgggatacttatataaaggaagcataatacagcatgtttctcttacaggaaggactgtttcttagagtcctcatcctctgtctccatcactcagtatagcaaatcatacattccatcaatgttaatgacatcaattgtatgcctgtaagtatgtacacacgcacaggggcagggggcacttcttcactccacagctggaaaacttgggacaaaatgcctagccagcttggcccaaatttgagggtattgccatctgtatctcagtgcaggtgtttctgtctgatgttcacagtctgtttatccagagtgccccagaaaggacagtagtgttaggttaaacctgtgtatgtctgttcttggttttaataacagtcctgtctttggaattatttagtgtgttctctcatttctcaggaagtcaggatgttagtgccgaagcacttctctgacttggtccgacattgaagtaccttcccctgcattacagaagaacggccccccagggggtctgtttgatgaacacatgtattattgcagtgagatactctagaaatagcttcatgtccttgcaaaattgccagcacaagtaaggacctggaaattgttgctatgcatgtatgtcagaagatttcttaaccaattctgtactgaataaaataaaatttattttcaagttttgtagggacctggggcaatatgtcagatagagttgaatattttcaaggcatttttagttcatggggcacatagttggcttaagatatctatgtgtatcaggactgaaaggtaaagtgcccgaacctgctaatgaaagaggtgtctgtgtggccatctgaggttcagccacaatgtgtcttgcagaattattttattttgctagtttttaatttctcaaacagttcagctgcctgtcccgtggtaccgtgagacttctaattcaagatgaccagtatttgcagacagagccactgcctttgctgccacattttgcttggttattgtgtgagaacaccatttttctctttttaaatgaattgtgtttctctttttaaattgagcatctgactgggcgcggtggctcacgcctgtaatcccagcactttgggaggccacggtgagtggatcacctgaggtcaggaatttgagaccatcctggccaacatggtgaaactcctgtctctacttaaaaaaaaaaaaaatgcaaaaactagctgggcatggtggtgcacatctgtaatcccagccacttgggaggctgagggcaggagaatggcttgaacctgggatgcggaggtcatagtgagccaagactgtgtcattgcactccagcctgagcaacagagagagactgcctcaaaaaaaaaaaaatccgtttacatagtgataaataaagtaattactatagtggtggcattctgcctaagtcatcttgaaaactgaatgcaaaatctttttaatagctccataatggtctcttgaagtgttacagatttttataacgatagctgtaatacaagtgcctttatttactgtgagacttgaacattttgaccatttacatgggtacttgtgtgtctccagctgagctgagtgcatgtcgctgcggcattgcaggcgtgtgtgcatgttggctcttgcaacggggcgtctgccaggggttgtctcgggcaggagaaggaggccagactggcaccacttgtagtgattggaatgtgtctagtccagctcttcagttccatgtaggaggttttaggatggagattgtgttttgggaactccaagtcactgtccaatttggagagtattatgtaagaaggcttatgttttctgattacccatccttcgatacagaccaaataataccacagtgataaaaatgggaaaggagctgtcgctcagctcttcttggccgtgttgtttgcttttcgatgtctaatttatgaaagcatttcaaagtgacatatatactgaacagcttcgtcttgccaaatgtaaaataaactggagatgagtttagcacagagctttgtagattgttgtcctcttggtagagtcggggcctaaacaccacctggcctctgtgccagtggacaggtgacctgcctgtcctactgctggtctctgcagctctctgtcttgggcaaccctggctctgagttccagagtgttctccagtaggagagtctgcaggggcactgtggagcacctgggtatgtgcacatctgttgttggctggcgttgtctctgatggcttggggtgtcacagagacatgacagtactgtcactgcatacctctcaagcttttgctgagtcctacatgagttgcaggggcagagagggagggagaaaacaatgcctagccacactgagaaaggggaaagtgctacagagtcctggaaggaagcgaggatggacatggacggggaagcattcataccaggcaggaaaagtgacttcatggaccagtcacagaggacagggccagggatcaaaccttccgtaatttgcctccacagtttgtctgagactggctacctggttgagtctgccagagccctgtgtgcaggtactaccactcactgtcacctccaggcaggaaaggccatgtgaatgcatgcatctttgcaggaacttgcccctttccactgaggtttgaggcagactccaaccacatttccatccagtggcttagtggtcttacccgtgagcttgaactgttgtccctgccaggacagtctttgcctctgtaagtatctccatattcctccatcctttcaggtcccattcagtccctaggtcctccatgatggaatattggttgatgcacttattccacaaacatttgttggccacctttcaagtgccagacaacccttctaggtatggaggggtacagtgatgagcaagccactgtttctggctgcagagggctcactgtttagtgggagaaacagacaaatcatacatcttaactacactgcccttgattgctctttacctgttatatcagtcgatcttgcctgcctagcatttgttccctgtttgggggcctgtatgatgttcgtttggatacctcagggtacattttcccatctttgtgatgatgtagctcacttggtctgaatgatatgtaatcctgcacatgtagagtgaccattatatttgcataaatagcattggaggaatatataagaaatgaataaaagttgttatatcatttgatttttcttttcttttcttttcttttttttttttttttgagatggagtctggctctgctgcccaggctggagtgcactggcacgcgcatagcccatcgcagcctcaaactcctgggctcaagtgatcgcctgcctcagacttcattttgatttgtgaacctcgtgattctattacttgttccacaaaaaattttaaatgaaaaagtatttcaaaaatacatatattccggccaggcatagtagctcatgcctctaatcccatcactttgggaggccaaggcagacagatcacctgaggtcaggagtttcagaccagcctggccaacatggtgaaaccccgtctctactgaaaatacaaaagttagctgggcgtggtggcacgtgcctgtaatcccagttactcgggagactgaggcaggagaattgcttgaacccgggaggtggaggttgcagtgaaccgagattgcatcattatgctccagcctgggcagtgagtgaaactctgtctccaaacaaaacaaaactaaaacaaaaacaaaaacaaaacaggctgggcacggtggctcatgtctgtaatcccagcactttaggaggccgaggcgggccgatcacaaggtcaagagatcaagaccatcctggccaacatggtgaaaccccatctctactaaaaatacaaaaattagctgggtgtggtggcaggtgcctgtagtcccagctactcaggaggctgacgcaggagaattgcttgaacctgggaggcggaagttgcagtgagctgaggtcgcaccactgcactccagcctggcgacagagctaggttccatctcaaaaaaaaaaaaaaaaaaattcctccacaacatatattccaatgtttagtttttctgttacagagatcacatgtactctaacttgtcaactaaatttaaaaggaaaagacaactttgagagaaaattaaaaccaatgcagtgtgtgtaaatgccattttgataagctcttatttcatgttgacatattctatggtgctcgtcttacataacctagttagggaaatgttttgttccagtctggctttgtttttcttcatgtgtttaggtccttccactttccttttgttaatttttggtgttgtacttcaggaaatgaattgagggttgcaaatgacctggagggccttagtttgtttgcttgtttgattttagcaacagtcaccgtggtacacctgacgtggctgggactcctgattttttttttttttctttttgagaacaaagaatgtgtccttgtcttggcatggactgggtagccttgttcacctccccacccatctctccttattggtgaggcattgtaaaccgtgttaacaggtagcatccacagaaccctggaaaggttgtgaagtccctttggaagcctaagggttttgatctcatccaggttgtaatcttaaattctggtacaaattcccttgttacaactgggttaagtggttttaacctcttttgtgccttcattttgaatgcttagactggaaagtcgttcagagactcctgaccgaataaagcctacttccaaatgagtgggttgtccaggtgtgcttgtagatgtcacatacttctaacaaggctctgcagctgcgatgtcaccttgcccagcgtgacctcattagcatgtatgtggctttcagtggccatgtactttgcttctagagctttctttcccattctgggttcttaggagggggctgtgctttgtgtgtggccaggcagaagtccatgttttagcttttcaattctcttgaagaaaacaaatgttgttgataagaacacttgtcatggcatccgatttgttcttgtgagggctgtattagcaataaatagacatttagtttgcatatttaacacctcatcttctttcagcccacacgtcttcactacaggattagcttttcattacttagtagagcttttaattacctgaagctttcgtgtctttactgggatataacttttctccttattaaccagaaaaagtcacagaaaatcttgtaatttataatggaatggagtaatattcacaaacaggctttggcaggattttttttgttattgtgttttttgtttttgtttttttgttacactagttttatcacaagacaagaaagaggggaacttttagaaataaaaattatgtgctaaaataattaaccttcctgagtaacacacacagaatgttggtatagtgtttgcaccagaggaattacatatggaagaatgctgggatcttttaccaaataagggaaagtagagttcattacaaatagaggcttctagcacagaaaagaggacattttataagtactgtgaagcattttcagagataattaaataatagaaaatattaaaccaatttaaacaatttgtagtttttttctaataaccagtaagttcttcgtcttcgaataattcttttatactgttctatttccagctccactgagtgcccctgtgttttcagagaaaacaggagtctgttttggacttcctctttggtatatatggtgggagatttgtttaaaaaatttttttatagaggtaaaattcatatgacataaaattgtccatttaaaggtgaacaactcagtgacatctagtatattcatactgttgtgcaattgccatctctatctagttccaaaatacatttgtcatgccgcaaggaaagcctgtaccccttaagcagttaatccccattcccctttccgctcagctcctggcaaccaccagtctgcattctgtttctatggattcacctattttgcatagtgcatataaatgcagttatataatatgtgaccttttgtgtctggcttctttcacttagcataatatttttaaggttcatccatgttgtaatgtatcagtacttcatccctttttatgggtgaataatagtccattgtatccagttgtatccagaagatttgcttttcattgcctaacttcagggcttcagacacctcaatctttgttctgagatggatgtaaacttaatgtatatctctctctctcacccaatgatcatgccaacaccttttttttttttttttttttttttgagacagtctcgctgtgttgcccaggctggggtgcagtcttggttcactgcaacctctgcctcccaggttcaagtgattcttgtgcctcagcctcccaagcagctggggccacaggtgtgagccaccacacctggctaatttttttttcttttctcttttttgtttttgtagagatggagtgttgccatgttggccaggctcgtctcgaactcctggcatcaagtgatctgcccgcttcagcctcccaaagtgctgggattacagacataagccaccttgcctggccatgccaacaataattatttagaagtatgttgagaatacatcccaataatagaagtgaaagctctttaaaaagaaaaatattcaaaacttaccagctgatcttatgtttcatttagaatggctgcattctttgcagtaccctagggttgtagaaattctcccccatgattgcacaacccactccttctcagccagtgtgcacctggagtcagctgtgtttggccttaaggtgtccatggtccagcagggagagggcagatgggtcagtgttgtcctgctagtgatgagtatcccatggtgggcatgctgatgccacgcaagggagagggtgtctggttctgtgcagtggcagtggtgcaaccccttaccaaggtaccgtggggacctgggttagggcaggaggaggaaggtgttctctacagactgcagggcttggaggcagcctgtcatggggaagggtgtggatgaagggtgagccgggaccccaggcaggtacggagcagttcaaggccgtcaagtgtgcttcattcttcagtcattagggtgtctctgaaaggtttttcattgaatcagaattcccctaattcacgaattctaaagcttaagtaaattcagtaataataaactgtcaattatccaagcgatgaatataaatccataaggtttttcaaatccccagaaatccctttcatctcccacctggttttgctgagcgcctgtctcttctgtctcttttctgattcccacctttcacttttcctccatttttcgcttaatggatttatactttaaagtaggtattctgaaaattccaattttatgaatggtgtgacggtgagaactttgattcattgaaagataaaaataatcattacattttatactgcaagggtcatccttaatattcttcgtatttttaatatagctgcatgatttgagtagttgagttggggattggataatgtatttattgattgattaactctctgggggtccatacatacccctctttatatccctgtggtccctttttagtccttttgtaaaaacttgataatgttaacctctgccaaagttgatgcggtagttgtgagtggtgggacgcaagcgtgttgatttattcttggagacagcagaaacagcaccaccttcaactgttttgtcatgatcatcttgtaaccataattctgtgctaagtcagaattaatgttattttgttaattcaggttattgtgaaaatctccacaggaggttatttaagcaagtcacaaattgatgattctgtttgtagaaaaactccagctcatccagccagccacattattccagggctgcatggtgtcagcgtagggaccaggctcggtgtagagaccaagggtgcctttccccttcctttccgcccgttaattgcctactcgcccagtggtaccttctgaacttttagaaatccagataggatttccacatggttcattagaattcatttatttttttccatctgtatttctttttgttgtactccctagatcattatttttagttactttttacatgcattggttaggtttttcatgtaatctctcagtaagcgtactgggggatgagtgacctcagtatttaaatttttcataggtgggatgaaatgtcttttctgagtgtgagtatttctgttccattcttcttttccaggcaggctctcattctgtgctgcagtttggattcagggagcactgacccttctgtcaggttgctcctgctatgaaggatggaagggcattttgatacatgaggcataactgtaattatccggtggggcttggtttgtgctgttttccacctcttcgtcatattttggaaaactgaggccaaaagcaaagttcattttcccctttaaaagcttctttaaaaaaatgatgaaagagctttatcaatgttttgaataacccagaaaatatttcttattgttgataatctgcagtttgcaagtgcagcgaatcttgtaggtagatttaccttgagttttttgaaacggtagaattaatatattaaaacatatggtttttagttaaaataggatgttaaaggaatagagcgcacgaacaaagaactttccacttgaacccatgttgtttcatctgacagtgggtatggtgtccctggcaggatagggcttccacctcctgctggtgccggtaggacagggaagaggtggggaacactgtgtctccatctcccaagcatcttacctcccaagtcagatccctggcattgtttgcatacttgcgtgtttgtgtgtggggtgatgttttcctgagaatgtggcaaaataatagaaggtcccagggttcctcagtctgcagaccatagctgagtggtgtgtgcctctagccatgaggtgaagcataggtgaaattcagatccataggaagacagacagactttgcaagttagtaagctaacttgctagaggaaacggtagactcctgtgctggctgccaactaaaaagcctttctccacagttctgttctcatgtacaccctcaggaccttggatgagcttgtgtgttcaggaaattgggcaccgagattttttttgtatctttgattttagttgatatgtagtccttccaaggaaagtattcgttggatgccctttctacactttggcattgtgcaagaggtatcaaattttaaagtaaaagtgcacaacctggccaggcgcggtggcttacgcctataatcccagtactttgggaggctgaggcgggtggatcatgctgtcaggagatcgagaccatcctggccaacgtggtgaaaccccatctttactaaaaatacaaaaactagctgggcgtggtggtgcgtgcctataatttcagctacttgggaggctgaggcaggagaatcactttaaccagagagttggaggttgcagggagccgagatcgcaccactgcactccagcctgggtgacaaagcgagactccatctcaaaaaaaaaaaaaaatgcccacaactgggcatggtggctcatgcctgtaatcccagcactttgggaggctgaggcgggcagatcacgaggtcaggagatcgagaccatcctggctaacacggtgaaaccccgtctctactaaaaatacaaaaaaaaaaaaaaaaaaaaagccgggcgcggtgccgggcgcctgtagtcccagctactcgggaggctgaggcaggagaatggcgtgagcccaggaggcggaggttgcagtgagcggagatcacaccactgcactccaacctgggtgacagagtgagattccgtctcaaaaaacaacaacaacaacaacaacaacaaaacctcacaaccctggtctcccagagcttccatattaataaatctagacaatgtgaaatgcaaatccacttaatatttgatgcaaaaaaaatttatttgacctgttattttaactctttgacataaaatctctaaatcaaaataatcagcaacagttttaagtgtataaatatgtatttctttcagtgcttgaacatttttagacaggaagattcttgatcttctttgtaagcaaatagcatcaaagagtaacatttctgtacctttgtggtatgtaccttgtggctaatttgtccatgaagggataggcattgtgttttgttgcttaagtcgcttaaggcctttaaagcatttccaaactcacctatttttgctctaaggggtataaggtgttaaaaaatgaatggaagttaactcattctcaccttgtctgctaacttccttttgttctttttctgtaagaactcataaagctgtatgcatcagctgctcccaggggccttctaaggcctcagtccaacaacagtgctacaggtgaggaaaggaaagaaggcactatgtcatcatgtcattcttttagacttggtaagaagtatattcaagcagatcagatgctctcagaatcacagcgtgttgtactgctagtaattaaaactgaagtccacgttgaataagaaataattttttattgattgctggcatttgtgagaaagggtttaattagaccaggatatggaggggacttatcgacagttccgttgtacattgttgacatggttattttctgtatctcattttgcctgggaatttgtcattctcttctattttcttatcagtagcactgcttttacacttattagccctagctgtttgtcttgcttatttaaacttgtacatggcacatgctcaaagatttttccaggcaaaatttctttaaagcaggatttgagattttccatccccttccgtctgctggattattccggtgagtgttaatctcccgcctttgtcttagcctctctgtggtcttcggttgcttccttgttctctgtagatctcctgagttggccattagctgtcaacagtcagcacttgctgcctctcaagtctcttcccctcctggctctgccctggttttgctctctgacggggatctaaattgggattctttccagtgtggaatcctgggtgtccaccatgtcactctgacttccagatgataatgagtgtgaccatgggctgaatgaatgtctctctgctgggattaaaagttagaggaaggcaaaaacagacattgcgtgttctcacgtatacgtgggagcaaaaaaagttgatctcttggaggtagagagtagagtgatggttaccagagactgggaaagggggcgatgaagaggggtagagaatgagtacaaacattcagttagatagagggaatacattctaatagggtgactatcgttaacagtaatttactgtatatttccaaatagctagaaggttagaaatgttcccaacacatagaaaggatacatgtttgaaatgatggatatcctaattattctgatcattatacattgcatacatgtttcaaaatatcatattaaccccataaatatgtacaaatatcacacatcaataaaaaataaaggggaagacataggtgtaggcatagatttttaagctgagaaccttttgacagggaagaccagggatggttttagggtgtggggaatctgtgtaagttggccgttagctgtcaacaggcaacaatcactgtctctcaggtccctcccgctcccggccgtgtcctggttctacttgccggcagggatctaagttggaattcctttccaacatggaatcctgagtgtccaccatgtcaaaattgtgtcaaaattcgtctgtatgcatttttcttggtagaagggtccccaaaagtcaccacattctcagagacttctgatccctaaaactttagatcaacagtcaataaaaaggtcccagttgtgtcttagtccccatggcagtacttttgaacatttaaaggtggagaattgctactgaggactttgttctgtggatgaaacttcgaatgaggattgttggtgagagttggattgttgttgtatgaggaagtgcaccttggaatctaatggggtcttcacggagggggagtcagttgtggcactgtttgtgtattccattcatcattcatccctccatccaagcacccacgtggagctcagaaagatgactaacacataccccctgctgctcctgtttttctaaggtgtgctgggaccatttacatttagttctttggagaacacaactacttaggatttttgttgttgttgttgttttcctgtacattgtcttcctatctcccttctggtacccattccaccctctctccccttcctcactgccgtttcataggggttctcagattcctgtgaataaagcaaaccgatgtgcagatatgtgtgcttacacatgtggacgtatttgaggaggtaagagggacctgcacaaggctttagtgagtaagcagagaagttatttatatatagtgagacccagtaaacggcgatgtcgcaggtgaggcagttgatctggtcagaatatgcctccagagacatcactggtgaggcctgcatgcatgttgaaaagagtgtatcttacatctaggcttgggtttccccctgcagctcacttatgaataacaacgtatgcaagagatttgaacattttcatgttcaaatgaaacatgaaaagggaaaaaaatttaaggttacggttaagtttggattgtttgcttattggtttggttattggcaattgctacaaagtccagggtgttctttatcagcagcatgcttatcaagttactgacgttcaagctgagtttccttccctccctccttccttcttctccactgacattttttttttttaaataggtagggaggcatttaatcttgtagcagcatgagagtagcttaaatgtccctcctctagcagtatgtttatagcagcgtaggtaaggaaagcccagcttgcacagctgagctctaaagtgcatacatcccttaagttctcatacacacactggccagtgagacccccaaactgcgaacagagaattctaattgaagtaaaagcatgaagtttttctttattgaccatgtagcaactgtggaatcatttgaaaatttctgaaaacatgaaacaggtgtttataaggagttttctgacttaacaaaattggtgaaataccaactttactaaaaactactaattcataattttttgattaataatttctagtctggaaaagaggaattttttgaaaatcactgatatttttgatatactgttgttttcaaattgagttctcatagtgtggtcggctctgttctatggaattaatattgaacaagctgttctgaacctaagaaaggtttgtaaaaaataaacatgaaggaagacttcattcaagaggtcacttaaaaattattattattattattattattattattattattattattattattgttattttaagaattaggtctctgttggccaggctggagcacagtggcacaatcatagctcactgaagcctcgaactcctgggctcaaacagtcctcctccctcagcctctctagcagctagaactgtatatgtacaccaccacgcccagctaatttttttttttaacttttttttacttttgaagaggtgagattataggcactagccactgtgcccagccaaaaggtcactttttttttttccttgttggggaggaatcaataacaggaacaccagtcatgatttggtgttttttccagggcagacaaataaagatgatattacgatgtttgttatcacagaatatgtttgcttttgataggggttgggtgctgaagggtaagtggttagaatcattctttttctaagggtacagtcattaatactccttgattcaaatcactatttaagttataaatacatggatttattttctaacctcaaaattatagcatcttaccacatatttgcatgcctctcttgagttaactactggtgatgattcttagctcatctgtggccaagtatagataagagaattagaaagttgtttccagcgtgtgaacttttatgattttcttccttggttactgtactcagttcttttttgttttgtttctatacaagatgagtagctggtggctcagatgacccccgtgctgcatgtacagtcccatccagagagtgttgggggctgtgtaaacctcgaggctcagagtggctgccattttcctaaaagagaagtatggctgctgttggcctcaatgttcagctttacaaaaattcccgtaattaatgaaggtcaaggcatctgcaaacattaatggggtcacaagggacaaatcagttccttgaggggaagttaaaatgctagattgcttaccgctccagacaaggcattctcaagaagtatgtgcagtttcagcacaaggattaacacggagcattacttgagccatggggtgccttgggggacatggatcagcaaccatttccttttgctcacagcgcccagattttgttctggggaccactcttatctgcactgcatagcagccacacattttgagtgaaattaaccccaactagcattcgagcgtcctcccctcccccaaaagatggactgtaccccacactgtaatcagcagggaggcatttcctggccacagttcaggttggtcccttagaacgctgctcagaactgtggtttggtggctctgggaagcagtgctctctctgagtgtgaataaggatccacatagctccagtaggtgtctgacgacatcttgtgatccggggggaagccagcctaaggacaaagccattgtggggtgagagacaggattggcacaatcactgacaaccgcagtagtagcccagaataaactgtgcctgaaacctaccctatttttgtattttttccagttttaaggaaataaatcccctttattgtatactcagtttgaatcaattatttttatctctttgggattggtttttggttaatctcagcaattcagaaatagctgaagaactatgctgtgggtttagacatcatgccgtgacaaaaagaagaggatcttagaagcgggggacattcactgaagctttatgagcctttcctgaatcccttcaaatcagatcaagttctctctctcctgtgcttagaaatgctgcctgttaagtcacgttggctacagcacccatctcagatcccttgtgattcagttgtaaagtagattcttctggtctgaattagaggccaaaacacaagacagatcaaaaatggggaacatattgcaaatttccccacaaaagactgaaggatgtgtttaccattgattgcacagggactgcagtgtctatgcttttaggcatggaaaatgcagggtttgactatcgagtttagattttaaagttgaggattgtttctttaagaagaaatatagaatattattcagtcctaaaaaggaaggacattctgacacatgcaacagcgtgaatgaaccttgaggacattatgccaggtgaaatcagccagtcacaaaaggacaaatactctatgtgatttcatttagatgaggttccctggagtagtcgcattcagagacagaaaacagaatgatggctgcggtggtgggggggtggggggtggtttggggaagggagtggagtgatggtttcacttttgcaagatggaaaaagttctggaggtggctggcggtgatgttgtacaacagtgtgaacttacttaacattgctgcactctatacttaaaaatggttaaaacggtacattttgttatggatattttcccacaattaaatttaaaaggaagatgagtagtactcgactcattattggatattacatcagggaactggaggtagggtctcacttactagttacgtagctcaggaacctggaaccagactccttctccagctgggcagtcccaggtttgagtcctggctccactggaggttgtctgacttggaggttaataataacctgccttagtcccagagtccttagagggaaaataggttataatacctgagtccatgtgtatcaagccattgctggttccaggcccctggagcactcagaaatggatgacccccagctgggtcaggccaagtcctccctgctgtagcaagcgggaccattgcctcgttccccccacctccacatggaaggtgccttttgtgtcctgccccatctctgttttaacagtcacaagactgtaggcagatctaaacttgtttgcacattattatcacctggggagctttgacgattccaaagccaggctgccacccccacctctagaccaactgaatcaccatttccaggggtgggactgggcatccgtgttttcgaggcttctgggtgagtaccttgtgcaaacaagttcagggaccgttgccctagacactgttcttcccctcatgtctcaacctgggcctcctaccactgccaccaccacagctatgccacctgggatgtgtcccaagcccccacttgtcggggaagcagctggggaggggtctttggccacctctgcagctataaggatcagagcaacacctggcttctgtgcctgtggcccctgctggtgctgggtccctggtccgcactgaaggatccaggcagagtacagtgggtctcccaggtcagaatcccctgggttgcttgttaaagctcacagggctgggccccaccccagggtttccgattcagcaggtctcgggctggttggatgatgagaatttgcatttctgtcaagttcccatgtgatcctttttggggtctgggaccacactttgagaaccactggtctattaaacaaatctttgcaaattagggaggtgtgttgtgggaggaagagactgatagttgaaagaatatttgcctaaatacagtgcctagtatttgccaagtacgcagccttctttctggctttaatcatacagactttctcaatcacatgtaattgcacatcctttaagcagcttttgactgactttggttttctcttttgtggtgattttccttaaactcccgaagggagggtggaaggggcaagagaaatttttatttatttattttaatttaattattttttattatttatttttttattttttttttgagatggagtcttactctgtcgcccaggctggagtgcagtggtgtgatctcaggtcactgcaacctccgcctcccgggttccagcaattctcctgcctcggccttctgagtaacagggtctatgggcatgtgccaccatgccgggctaattttttgtattggtagtggagatggggttttgccatgttggccagactggtcttgaactcctgacctcagatgatccacgcgccttggcctcccaaagtgctgggattacaggtgtgagccactgcgcccagccagattttatttctttaaaaaagaaacttactagttatcaggacacttgtgttcttggtacttgattttgtcagcattatttttaagagcctcttccctccttccccctacctccctgttgagcccaggctctgaaataacataggtgcatgtgaagttcccctacctgccattaccagacattggtgctgggcggccctcacctccacctcctctcacctgaggccacagcggtgtgcaaggatgtggtctgtcttgagtgtgttttcaaagcagctgtttggtctgtgccttggatgtttttccacagataagcccaaaagagaaccacatcttaaaacgcccgtgaccttgaatggtctttccggaggggcggctggatttgtgctctcatcgtctcaggtatgtgtcaagccactgttgtttcagagctggacacaggtgcttaggaaaattcctcactgaagggttttcaggatttacaagttcttgctgtttttgtgaccttgtgtggtttctggtttcacagaaggctttgtttcttggttcttgttgctgctttcagccttggcctgtaatcactgggcgccagggagggctgcggtctgtttcccggggtgtgctcagataccgtgtcagttcacatgtgttgctgcagcggcagggggccaggcaggaggggcgggtgtcctgaagcacgctcaatttgctgatcagggccttcacttggattttgcacttgccgcagtggagacattcctcgtagctactcagtgtggtttgttttaagtgggccatccgttaattcatgtgacctggaacttggttaatgtacttgccaaggttaaagttgagacgctgtttgttaaacctttcaaagagggaagaaggttgccttgaattcagttccagggtttgggagtctgagagggaggtggtgaggggcccggggaggccctgagaaacaaaatgctggttaaggacacagtctgctcaccgacctcggaagtctctagacgtctaaagaagtccaagcaaggaatgatgaccgaagaggaacctcaagggtgcaggcggctctgggatctcagcacatctcagtgatggaatgagctgccggggaatgacccctgtgggggctgtccaaagtcagagcagacacaaacgtagctctccaggccccataccttggtgggcaagagggcagcaagtgcatcctcacagttgatggggagagcagcatttcagcctgcagaaaagagaaccacacagatgtaagatgaggtctgcactcacttgcctggtcatgcagagacggagctgggagcagctgcatgacttttcagagaagtggcacacgtttactgtaagggtcccaaatgtagaccactgcagatggtaaggtctagatggagggaccaatagtagggaagtaggggagaagaaagtaaaaccttacagtataaagacccatagatgctcttttgtttttgatgtgtgtacgggggttagatatttattgagcacctactgcatgacagagtgttcagcaatgacaatgcagagcttaataagaacaggttctagactaatcttttagggggtgaggatagaacagaaataggtaattatgtcctgagaacatgagagagtgttggtggacagaacggcgatgtatccccaagggcaactgaagccttcacagaagatgcaaagcctgtacgtggtcctcggagtcatgccacatggtgactggttatcttagtcgtaggaaaactgagaagctttgaggcatgttctatctgtctttgtgggcatcatcttcattatttgaacaattcagagtgcttgatgccttttgcttcgttctcacaatccttgacactaagctgtgggcttgggttatagtcactcattctgttattcatgtcattttgcctatccttccacttcacagatgagaagactgagacccagagagggtcatggttttcattagccaaatggtgcagaaacccagtggtcacagtggctctctagctctttgtcacccacagggcccttgataagagtacggtctttctccaggggagcagggttgaggagtgggggcagccctggcctgggtggccatatcctgatttcccctcccttggcccatagctctctatcttgggtgaggtgagaaagtaaggctgctccttgactgtggtcccttttgtgtctgtcctgcactgggccaccttcccaggggccttgtgtcagcctggtagtggtgctagtggccttgaagtgagagtgggtggatcacacatggcagatctctggcagtgaccttttctgtggatttccggtgactgatgatagcctctttggaagtcagcatatgcatagctctctgtcttttgaaaacaatggaaaaacccaccaccagccccaaaaccagctgtctttcttcttatgaatagatatccatgaaaagcagaagagtagtttcttgtaagtactctgggagtgcataatacattttaaataagattaaaaattatgttttattcttactagcatcactgtcagataattgagcgtgagagcattcagtgctgtgtgcttggtacgaagtagtaacatcaattcagtgttcagtacatccactttgttccagaacaatgtattcaaggtcggtgtattttggctgtgccacagagttctggaaattcccaagagaataagttttcacctgttatataatccagcacaagtgactgtgtagcagcaacctcatgtttcatgatgactttaaaatgcaattgattctaaaatttagcttttaaaaatttcgacttcagattttctctgaaggtttaaggtaggcttctcctttattaattttttcaagaaatatttaagaacactgctctgtgctatgtaccattctaagcactttacagatactaattcatttaatcctcagcctggttaggtaagtactgctattcccaccgtacagatgaggaaacagcctcagaggagttaaaacaagttgctcaggttacaccgtcagcggtttggactacttcagtttcagataatcactgtgaaattttactgttttgagctacacgtttcaaaatcttttctgatgcggaactatcattaaatcatataatccgcttctctggagtcagaggttgacaacacattagcacttgactcgagcctctccctggaggaggacattccgtctgcggggagccgagtccgaggctggagcaactctggaaccacagccctccagtagagggcacacgagagcaggctatctgtggagatatcctgttggcacaggggtgaagatgacagaggcgaacccaagcaaagagagttaattagcagagtttgccctccaggctcggagggcaagtcagcctggggacctggagttagttcccttttcagctgtgaccattgaagacattcatcaagttctctggctccgggatgtcagctgtggtagtgacttgcatgggaggttatccgacatacctcacacactttaactccacctcttcagagtttgtggccaagaatggagccaggtggctattttttttttttaaatttatgtaataacaaacattcgcatttattgaaaacttaaagtataataaaaaaataaataaaataaaaaaagaaaaaagaaaacttattcctgtgtcaggcacttttctaagtgctttgcagtgtattgtctcatttaatagttgtttaaattaacagagtaggccgggtgtggtggctcacatctgtaatcccagtactttgggaggctgaggcgggtggatcacctgaggttgagagttcaagaccagcctgacaaacatggagaaacctcatctctactaaaaatacaaaattagccacagtggtggcgcatgcctgtaatcccagctactcaggaggctgaggcaggagaatcgcttgaacccgggaggtggaggttgtggagagccaagattgcatcattgcactccagcttgggcaaaaagaatgaaactctgtctcaaaaaaaaaaaaaaaaaaaaaaaagagagtaaataaaattgtaaggtgaatatgttatctacttgatggaattttttaaactaccttgaaaagttttatagtttcctatttacagatgaaattaacatactaattataaatcatgcctcactattcactttaggcagtctatctccttaaggatctccttacggtttagatagataagtgaattgcttaatgtttttggaagtaataaaactgcatttctttttaattaaacaatccagataacaagaagtaattctaataggaaacttgtaggatgtatttacagaaaatctacacaatcttactgaacaatgtagaaaagaagatttaccagcctgggcaacatggcaagctttgtctcttaaaaaacaaaacaaaacaaaatttagccgggagtcgtggcatacaattgtcatgtccacttctcaggaggctgaggtgggaggactacttgagcccaggaggtcaagactacagtgagccacatttgtgccgctgtactccagcctggatgacagagcgagaccctgtttcaaaataaagaaaaagagatttaaatgaagcgaaatgccattttctctaggtgagaaactggaatattatcaatgtcacttcttcccaaattgatttataatttaaaaacaatttcagtacttctgcagcttgtttggagcttgataaaatgattgtagagtttgtcttgaagctttaatagtgaggcaggtttaaaattgggggcaaaaaagaaatgggttttagggtgtagaagggacttgcctgatcacttttgctagaaataaatgtccctccaaattaaattactaatgtcgcacatcagatcgtatttaaatccattagaagattttactgttccattagagctacccatagctggtgaagactctgcttatagtggaacctagtttctcagttttccatttatatttatttacctgagctttttgtaaagtagtaagtacttgactgaatttctgctatttatcaaatgctttttgaatagaaataatgagttaataacatttagccttttttggtaaatagtataaacaagatagggcaaatatgtaaactacttagaactttatctaccttgcatattttgtacctcttatttgcatatgcatgtcacatgctccttatgtaccatgtgctattactgtgccggggtactggggctatattgagtctatttcctgtctttgtagacttgatggataatttggacagcattgtgatattccaggtttaagagtcttaaggttcaagactacattaaatgttaatgtagtccaacatttcttgaactctgaaatcctctgagcatcttttcatgcactggcctaaaatgttttcatagcccagcaaaaggctgattacttatttccctcctattgattttttttgagatggggtcttgctgtgttgccctgtctgcttgtgaactcctgactccggtgatcctcctgccttggtctcctgtttatgttttaaatagcatttctcaaacctatttgagcaaataactttcctgttaatatgtagtattccttgaaagaattgaatttgtgagtccctaatctagacacttttaaagaagaaacaaaactcagtaacacatttggataaaaacctgaatatgtccattttgggatgaaaggaagcagctttgtttaccatgttgaattaagtggaaaacatcttattttaatcatgattgatagaaatctaaatttgtaaattctgatttttatgttttttttacaatgaaaatacattttaaatgtcaccatccccttccccatgaagtcttcattacaactaattttgaaaatactctctcatttatttatattatatatgcatatgttctactgtataattttaaatacttaaatggggttatctttttgcattgttctgtatcttttttcagcttaataatttaccttgcttataattattgtcagtgcttgcggacctgctctttatgcatttttaaccattgcataaagctggaatgatggacatgatttctttaatcactccaaattagtcatttagttgtttccagttttttagtattacaaataactctgcaataaacatgtcttgggtatgcattcttttagtttaaaatagtcttgttccttcagaaagttgctcaataatagacttagaaattcttttgtgctaattactgtaattgctcattttaagatctccttttattgttttcatagtatataatcctaaactgttacaactgaaatagtccttgagctaagaaagcaatgtggcttaaagataggatttctaaatagagacttaaaaattaacctttttggagctgtgacttcctgatgaagtggcagcacacaggctgaatatgttctacatctggatggcccaacatcatgatgctgtgatttgcgagaagctctctgcctgcctaggctgctggaggatggcaagttaatttatttgttgttgggagacctccccctgcccccattaaaaaaattattttgaaatacttgtagattcacatgcagtttcaagaaataataaagagtaattccatgcaccattttcctccaatagtaacattttgtgaaactagtacagtatcacagctaggatattgacgttaatatagtaaggatatatgtcatcaccacaaaggtacacctacttcccttctatctctcctctctccttcatgcctggttacaaactaacctgttctctctatataaaattttatcatttaataatgttctgtaaatagactcatagtatgtaaccttttggaactgaagtttttccatcagcataattccttatagattcattcaggttgctgtgtttatcaatagtttgtttctttttattgctgaatggtattctgtggtgtaaatgtactgcattccatgagcatggcatgtccctccatttatttagtttttctttgatttacttcattagcattttgtagtttttgtagtcctgtgtatgttttggtagagttacaccctaagtatttaatttctttgctcattgccagtatatagagatacaacttattgaactcactttttagtttatgctagtttattactaattatcaatacatgctcaagatatgtcaactccttttatttttattaggtgtcacttgctacattttgtggagaataccgatgctgttgctagaaagtgctgctgtcacaaagtgggtttatagatagtaccacgctatccttcttcctaggctagattagaagttatttatgtgctatatgcacatagagtttttgattggtctattgcaaatactatggcatctgaaattttttttttttttttttttttttttttgagatggagtctccctctgttgcccaggctagagtgcaatggcgcagtctcagctcactgcagcctctgcctcccgggttcaagcgattctcctgcctcagcctcccaagtagctgggattgcaggcacccgcaaccacacccgggtaatttttgtatttgtagtggagacagagtttcaccgtgttgaccaggctggtttcaaagtgctgggattacaggcgtgagccaccgtgcccggcccctgaatcctatttttaagtataaaaagtcttttttcagctctggattatggtgctgcaagctgatattcttctcatggcagtaaacagagaagtcctaggggtaatcttacccctctggggagtccaggatatctgagcatctcccttttctttttactgctagaaagaatttctgctagtagaatttttattttggccaactctgaccccttaggttgatgtcagaatgaggtgtaccaacctaggtggtcagagttggctcaaaatacgacattttcctgctgagcaatttagtctaggttaagtcatacttgaccatatgccctagtttagcgtccagtttgtgaacattctttacctgagttattgtaattctaatctcttatgtaaaactgcaggtagtcagccctttgtctccttcagttctacatctgcggattccttcaactacagattaagaatatttggggggaaaaacagtaaaaaaaaattacaatacaacaataaagacaacaaatttaaaaactagtataacaactttttatacagcatttgtattgggtattgtaagctagagatggctgaaagtctatgagacgatgtgcatacgttatatgcaagcgctgccattttattgcagagacttgagcatccaaggattttgtatccgtgggagtcctggaaccaatcccccttggatactgagggatgactgtatttacaacatgtctagattttcgacaacttgaattaaaccagaaagaatatgaacacacagaagttcatgtgtatatatatatgtgtatgtgtttagaagggagcaagctgttaaacatgggaaatagttgctagtagtttgtaattttatgattacaattttaaaattcaattttgcaactggaatttgacttgattggttagtgccttacagtaattaacctccaaatcatcagaatgtcatcttgttatttaggtaattgaatctacttttcttgtatacagaatgctttttggaaacaatacactgtatatctagtttgtaccaagaactaattgtacacagtcagatacttgcagttcttttggacttgagtttctttatccttctatcagatgtcacaattccctcttccctttgtagcatatgaaagtagttgtgtgtgcactgtatttgagaatgtcaagtaatagaatctctagaaaacattcatgatttcagtcccaggtaatccagagttaaaaataatgttcataaggaagggtagcaaaatttagattttaatacttataggaggtgtgttaattggccccagggccgcaggctttagcgttcagaggactttagccccaaaggttttgtggaacttttccagagtcctcaccagtacattgggaataaatggaatgcctttggaagtactttgaagattgaattcgatagtgttggtaaagcagtctagcctgctgtgattgtgctattgatgcaaatattctctagcctgtattatttttccttggagctcaggaagtgatccccacccacctcaagcagtaaaggaaagagaggcaggagggtctgaccatgtgaggtgccccaataaagcatctgtattgtaaatcaggaatgtaggtattgggtttccttaaaacaaagcacacctacgtgaccactagctggagcacaatgtgggctcggtctgctgaaagagtcagttggttgcggctgtctaatccaattatggatggtcccagcgctcagcctttcagctgctgcccctcccctgcagactctgcctctctcaccctcccttttagggcttggtctgtggctaccccagaaatcacgtgcactcctaggcttcagcgagtacagccttgttaatctcagacatggaaagcaagttgcctaggtctacagatgagtattcagtttccccaccagttgacctcagtgcaggttttgttggttccagtcatttggggtcagcacctgtttgaagccaggacacttagaacaaggtggaggaaaacctgagggtacatacagtgtggtttccttggctcatctaatgcagagtcagaatgattagccacattgcaaattgtctttactcagtggtttaattgttaaccagggagttaatttttttttttttattaaacaaagaagaaaacacctctagatttttctgggacagatggccccattgaaagaggccatgtgctgcagcgaatggccaggcctcgggtgtggcaagtgccttccagctcagtgcttgctttgtgctcctttgcctatttgaagacgtggatgaatcaaaatctataagcctatttcagtcaagtattctaaggaacctggaaacacaggggatttctctgttgcctctaatacagtgaaaaaccactgtctttttttgttgttgttgttgcattgggggaagaaagtccaggtttgcatgtacattttcactcataggatttttttttagaatagtttggggaggacattgtgctctggccaataactgggccagtgtctggtcacaagatgatcaggcaggtgcctgcatgactgtaggacagagaactgggcagctagagagcctgtgtggaacgtgaagcctttccccactttgttgccgtcctaaccttttctcaagtcatggagaattgatccttagacattccttacctctctcacccacttgaggattgctcagagcctgggtttcggattgaaatagcactatttctggttgatgacgacattctgtgagccagcaatgtagtttaaatatccacaagagcgccctggttccatcagcgccccttcgtaattggtcatgagacttggacctccttcggggctgggactcgggcaagggagttgagtagagcttctctttctgggctcctgggaaggattcatggcataaaagtgggacttcagcattctctgggcacacctgtctctgtttttgtcctctcctgaatctttctggcctgcagagcagaataaagtcactctgtgccaacctgacttttgttcatgactatattaggggcatggatagaaagtgcccccatagcactctcagataaaacaccttcaaacaaacccagaaacccatgctcacaaaaccacccaccttaaattatgaaactttcaggctgactaaatcctgaaggcgttggagcgtgagcaaagggaaaatggtgacacagagctttgcccttcctaatccaaatgaaaagctctgtaaccctccccccacctttgctatcaagaaatgttggacctttgggaagcagatgtagagtattgatccttaaaacagagacctctcaccctaggtctcttaaaacagagaccttaaaacagagtattgatccttaaaacagagacctctcaccctaggtctcttaaaacagagacctctcaccactttctaactgaagtgggttccacattggaagtactttgcagaaacttctattaccgcaattacttttgcaccaacaaatagtatcctcaactcagaaggaaagaattggaacactcagctggaggtgtctggtagggacatgtgtctgctttttgaatcagtcgtatatgtttttgttcctgtgcctggaggccctttgtggtgtgagaacattgaatttggagagggaaagggagacaaaagagaaatgggggtgatgcttaagggaaagtagggtttttagtttgttcaccacgcttgatggcagatttgcctctggatcctcaggccacgttcctatggtgggtagggatctctctctctctctctctctctgtgtgtgtgtgtgtgtgtgtgtgtgtgtgtgtgtaaatagtgatttctctaagttaataaagaatgtggggtgacctcctacacatgcccgtatgctattgtgtaggaacaaatgcatggtaggaatgggtagactctaatctgaaagcatcaagttgtatgcatcttctgcaattaggaatctgctcaccagcacgagtgctgtggtttctgtagttctgggattcagaggagcattttaaagatgtaggatgttggaggaggaggtgcagggatctccccttgggtaaagagtgggagacagtctctgagtcataatctgggaccagtggaaggtcaaagggaagaactgtcctgttgtctgctaagtcacaggcttccttcctgttctctgagccctgtcacttacccaaggtgcagcaacaattagtgtctgtttacacataacagacatctctttcataaaataatttttaaggcatttgtttggtagaagcttccctgtttgggggagtcttttccctgaatgcatgtaaataacttcacagtttgcgcaagtttgcaaacggtctatactgctcagccttgattgggctacccaaggatgcgcccgccctgctgaggtctgacagctctgggaggccagtgaggcctgtcctaatccctgttctggccggtgattcagctccaggtggaggctgtgcagaaacagccccggtcatctttgtgtgaaatacatttgtcgtcttcattttcttttttcttctgctggtatcttcatggttttcagcaaaactgtgtacattacatttttttctttaccatttctccgtagttatttctagcatttttttttcagctgatgaaagcaaatgaagaatttgtatgctccatagtcagtcaaacattgatttctctgacttttaacttagaaagtcattttgcagtggcttgcgtgtgtgtatttagactgtgcttctacaaaaaagcacacgtaggcttatggctcagtttacttgttccagctcactttcctgttcatttaccttcttgtaaaatggaaagacaaacataccttaaacttaactcagatcgtgattgccaactttgttctctgtgtgtaagtagttatattattcctaggttatggcatcttgatttatctttgaaagaagaaaaccctcactgagttgacagggacacattgttctaggcttctacaattgtgctgatgacgctttttcccattggaatgacagggatgataaggtcggctggctagcctttttttaaaatgtagaaaaccacaactttaatttatagcatcatcattttccttatgtatgtagtatgtttcaaaaataatccaatgtcagattcttgcttctgtgatcaaggtcttgtttttgccctttctttgctcaccacttccctgcccctgacgccgagtcctcgccttagaggaggtggtcagcttatattgcaacattgaaaatgttataccttacaaagaaggtgatatgccatttcttaattataatgatgtgcaacagtgacttctgatgtagacctttaacattgggccacgcagctttttctttggaggaggggcatttcaaattggatgatgctcttatagtttaataaagaaacaagcaaacaaaataggctatacagggcatgtgttcttaaactctgtgacagtggaggtgaacccaggcccctttcatggccttgggagggtcctcagctttgggggcgagttatctgggtggaaaagcaccatgggaggaagaagtcagagaggcgggttgctggagctcagagaataaaagcaagtctctgccctgaaaatggccctgatttgcttcagatgtactctgtctgccaacatttagtgtctgtgacttagccaaaggaaatgtacattaactgttcagtttctatgtagtttgtgctctaggattttgcctccggaggatttctgtgaaggaagctctgttcaagtggctctgttccacttgggtttggaaagaggccgggacaggtgatttcgaaggaaggatgaggacaatggaggagatgggcttggtcattgcagtgtgtgaggtggcccagcttatctggcattttggggtactatatgtgccatatgaggtgggtatgggtgtttgaagggaaagggggtggcctgggcaacttgtgtccttgcctagaaagatcatcactctttttatttaaaagaaacatgtgaaagagccatcagggatagttttgtcctccctcttcttacaagtgatcattcccttggtagggcagtgccagaccctgcttgtgagcacagaaaacgccataagctcctcatgaaagcatgtctggggaagcttatctcaaatgcagtttgcacttgcaaaggtcctgtggtatagcgggggagcaggggagatggagtctgggagcggtgaaggctgggtcactagctggctttgtagcctctgggcgtgttgtttttatcctcagaggggccactgcacctgctccatggtctcttcccacagcagacccttctgtctctgtgcctcgaggggctatgtggaaagcagagaaagactcaaccagagtcttcccttaaggaaatcggaaggaaaacaaaattaacggcattagaactgagtatgtattaaaacttctactgtcttacaaaatttagttttctttcttatttttctttccatgttgactcagtaggtaaatggactaaacacacattcatttagggcaggaagaacttcatcatttgattacctttagttcatttaccttataatgcctaaaacaaagcagaaagtgacgttggttaatcaaaaagatcactttcttttttgtgttcttttgtgctattgtgagatgcctcttctccagcaagctgtagttgttcacaaagtaaagctgttcctaagccttcattagattgaagcttgtcccagactttctttaaagaagtttgcatagcttagttcatgctcagatgattcagtgatgatgatgggttgttggttagaaattacttaaaaatgcctaatacattattgactgataaatgttaagacatattctttaagggtctaaatcctattcttgtggagctgcaaagatcttgggggtgtggttgcccttgtctgttgcatcatctttcaaatgcaacagctgtaatgatattctgtatcttgaaaaacttaaaaaagcaacaactaacttatttgtatcttttcctctaatatttagtttttacttcacttgtaacttattacatgtattaaggagtttatttttttatgacattttactcataaaaggatgaaaccaagattggtgatctgttcacatagattaaaatcctgtttgtgaccacttaggtgtgtaatgtgtgacttgtggactgtgtcagaggaagattttccaaccaaaagtacccattggtatcacagatgaaaagtccttataccatctgaaaaaaagtagaaggtggggagaagcttgaaaacctaaggaggccattaggaaaggctgtatattttctgattccgtttaaaattttaagttggtgaaaatactatgtgatcgaaggatgaacatattttagtaaatagagttatagtgctacaatgagataaatttcacaggtaaatgtgacgtagctaatgcataatcattctttgtgttgcatggcaattctgtacaaatagaaggtagcatgtttaacgttcctgttatttcacataaatacagactgagagtttcagtggtctggtttgaaagggaagaaatagaagaaggaaggagagaagttggcagaggagcaatctgctctaatatcctccagtacacaatctagctataggtcctcacctggcagggtttgaggatcagaatggtggctcaggtttagacaattctccctgtttgtggggcccagcagctagttaagagaaaaatcttttttccttccctattaccctataaggtccccaaattcattgtatgtagaatacttgagtcagaataactttcctaacacttaggtttcaggtttgttaggtatgcctgacagctctcttatcaactcccatttatttgctaatctaaatgaaagtttgatggtagagtattgtaaatgtagggaaggtgaagtgttcaccttcagatggtagctatttatctcagcaagaagagcagatgactaacacccaaatacataaccattattatatgacttagcatttataaggcatttctatgcatcctgagagactagagcactctcaaatgaggtttcagagtaagattcatctttgcaaatgaagacaaattagcaaaatcttcctatttttaaagtgtgccttttgatttgatacctatttatttgtttggaaagaagcttttaaaatcaaaaccatgaatctgtggttatcttcaaaggataaattatgataggtagttgttacccaggttaccattttaagatgattatggctggcccaaattaggggatcttttcatatatgtattatatattttaacttcagtcttttaaaaatgaatattcctaggtggcatgggagggtgggaaggtcaaaagcccaaacttctcttacttattggctgcttccttgaacttagcgtttttcttttggaaaagtgagcttttgtttttggatattttgtactgatactctgtgcctacacagattttgttttggttcaataagagttgatattttgccaggggttgcctcccatgagattccaaatacagatgtaagtttaacaggcttctgaactggatgtttctatgcgctgaaactctgtaaacgcgtgtagctttgtctaccattgtatattgctgtattgatttgttgggttgttttttttcttcctcctgaaaagctctggtctgtcctctgctgatacaaagactggtccattccccagggtcactgcaagagaacctccagggcctggccactgttagatattactaatctgtgaagttgctccaaattctcttgccccgatcataaagttccattgagttcaattttatgtgaaggttctttgtcaaaaggaataaatgtttattcaacagatccagttgttgtcagcattgacagatgtgaaaattagcaaatagcaagaagtctcccctttagaaaaggaaaacaagtacttaaaaaaaatcttgtgttgtcaataaacaagtccattttaaaagcatctttgaaggtgtgtaatgaaaatggaggccttaggttgtatcagggtttatgaggagccagcttatctgtaatcagatgttcctgttactgttatcactgtagtatagggcttagttctgccctttaagtcacagactcaagttactcctgattttaccagcagtcagaatacatttttctttaaaaggaaaagagacgatatcctagtgcttctctatactaaaacaggaagagaagcttccttgttgaagtgacagtttagatgttgttattttgacagaaatattagtaaatatgtcacattatcccttgctaaatatttatagcatagaacgtatactctgatgcataatattttatgaaagaaatatcttttgcctcaaatccctttcactgttttgacatgaatctataatttatacccagaggtctgcaggaaaaagactttattaagacccttttatttcagccaagataaaactccatcctaagagggaacaccctggaatctttgagacccttaaaggtggggtattctgaaatacctgtgttcgttcctttgctagaatttagatagcttcacttttgcaaaaaggcacaaaatgagggcaatttttgatggaaaattttagtttttgagatgaagcagggggcacagtggcgaagcgccctatcttagcacttaggtagcagccgtaacaagtgtcctgggtattcctccctagaaaggaaatgttggtcacaaatggcagtgtcctctgcattcagttcagctatgtgactgaaagacactgttcttcagcagctgtgagtttacaagatgtcgcacattgagtatttttctctagcttatttagaaacgccagtctagacttccgcagttttggattcgtggccatagttttggcctttattagatggccctcaaaggtacttttcaggtggacattgatttcatgccagctgtcagagatgattttccctagaaatggctgggtatatggagacattctgtattagaatggaggtatacacccatctcttctgtattagagagcaggtgttgccccccgtggtgctcagattgcttagtgtgagaaggaaaagaccagtgataagaggaggaaaactgcgccttccatgtagctcagttaacagcatcatgattctccaggatggccccatttctgtttttatttacaaaatggacttgagaattaattagtaagcaaactgtctccattaggtaagtggcattctgatttgtctgtgtaaagttccatttcccaagtaatgtgttccaaagcatttttatgtacaactactggaaactgctgtacaaatgtttgctgctatttggttgtaacaaaatcagtaatgagtttcaaaatggaataatttcagagcccttcatctacagtagtttgggaaacacttgaaataccaagtgatctgaattcactacaagctctccaactggaaaatgtgcctggtgtcgtcttcaagcaagaatcccccgccccttaaccactgctgctgtggacttgagtcttcaaccttgttttgtagactttagcatttgtattgtgtcatccttgacacctccccaaccccagccttcccagctttgattgcttaccttagcaatgctctcagcttggaccagaaggcacggatgtttccctgaccttaacctcactgtgtatcagctcaaggaagaagccagatttgctgatgttgtaagcactaaattatgttcataacatttaaccctcacatccataagcaaactaagtgggaaaataaagattgactattgtagcagtcatagattgtttaggaagcagcaaaaaggcaaatttttctttaaagttcaaaatggggcgaaagagggtaggaaaggaaaagtttattaagaaaattgtatactacattaatttgactttgccgtctagacttaaattaaattcatgtatttttttggtcttaacacattgacatgtatcagtaagttaaaaacttaaaaatacacaaatgattagattagcattattatgtgtttctttcttgttttttgttttgttttgttttgttttgttttgagatggagtctcactctgttgcccaggctggagtgcagtggcatgatctcggctcactgcaagctccgcctcctgggttcatgccattctcctgcctcagcctcccgagcagctgggactgcaggcacccgcaaccacccctggctaattttttttgtatttttagtagagacagggtttcactgtgttagccaggatggtcttgatctcctgacctcgtgatccacctgtctcggcctcccaacgtgctgggattacagtcatgagccactgcgcctattatgtgtttcttatagaaaatctctctaattttttaataagcatgtttttacaaatgctgtttcctgagaactgtcgcaccacatgcgacatgccatgcatgcgactggaacatgccagatatttgtgggtggtcccttcgtgtcacctgtgccttcttaccaagtaatttgaaacacccgtgtaaactacctttggcaaataggatagctaaatcaccgctaagatttataatttactttttggatatctgaaacatcaacaatatagccatccatggcgtgttcctctggagtgtggtccgtgccgtctctgcctgctccatctggctgatcccaggcaggcagctcagctctcagcagacacagatccccagcacatatgaacgtgaaagaggcttctccgtgggagcgaagtggccagcaggtgtcacaggctgtgtgggcccagcatcgtgtgggcactgctgggggaatcccatcacagcatgtgctggcgttagtagtagactgtgtgtgtctcagagggtccagaaagtaatacagtaaaggcgcctgggggtgtgtgggggtggttggttggggtttgcttgttagtttgttgtaaaagcccagcttttcattcttggaaagatttcagccaactcgagagggttacctgccaggaatgctgcagaagcaagaactcagtgggtgagcacttccatttcttcaacaaatgcttctgagtccctgacctgtgccaggtgctcttcttgagctgagaatcctgcagggaaaaaagagataaagaccccatagtcctgtggtttaccttctaatgagcatacttttgtcgatcaaacagggtgacctctctggtgtctctgcacactacctgtatggtctttccgtagctgatggggtctcctgactagtgattggtgattttaatctggattttgccacagcacttattttctaacatatgacttaatttacttaataattgtgtctattgaatgtattcttatacatacacacaggcatgcacacacggacacgaatataagctttacaaggacagaaaccttattttttatttatttcttccttgtgtatcctgagcactgagaacagcctggcacaaagcagggctcaggaaatgtttgctgaatgcatgttcacactggatgtgttcgaaggctctcactcgcgactcctgttggcttgtggagagtgcatctagctgtaaaagccatggtgcttggatgtcttggggtgctgagcctgttcccccctcatttgggggtgtggtgctatgctggcgtttgggtccatgccccgcatttctgatggctgccccatctgccctgtgtggggtggcagagttctgtgtacacagagttacatttcgttgttcctggcttctctatggatgacagcagcactgataaatgccacacctgctttctcagcagtcttgcggggtgatttttcctcttaaggaagtcacctgatgtccatgctgagtaggaaatgcatccaaagctttgggagctcagtgttggcccctgggctgcagcccgagccccgttttagagctgtgtctcccaggcagctgtgatgactgctcgaaagcccactcagggggaaggtaaacctgatgcccgggtgtttggacagtgagcatggcgagtggaccgttacctgtgcatagagttgttcatatgtggtgacagatgttgggctgttatttagtaacttcaaattgtttttctttgcgtcggagccatgtctaggttctgagtgcttctcccaggtcagatggagagctcttcatttggggttgggggagcggggtggtgttttcaggtgcccaaggcattccatgcacatgcacctgcagggtatgtgtcatctggggtaagacagagccctcccggttcctcttctggatgtgtgcttttagtttttaaagaatgtcagtatatacattgccatttattcaacaaatacggactgagcattctgttgtgctgacgtagctacttggggttacagagacaaagccaactccattctccaaatggaaaacaaatggaaacattctagtggtagaaacagacaacaaacaagtagacagaaaataatgtcagacagtggtaagtgctatgaaaaaaatacagactcactgattgtgatggagacttttaagttggattctcatagaaggcctttctgaagaggggacatttgccctgccactgtgaatcagccatgagaagacgtggagaggaacatgaggtggtaggccccagcgagggaaagatctccatgatggcatcgattattcgctccacaaatattattgagcacctgctgtgtgccaggcactgttcctggtgtcagggttatagaagtggacaaaatgaggcctctgcctctgtggagcttttattaaagtagggaaggggatgggagggctgggtcacatgttaggtgtggggtacagggtacgtggtgccaggcaggtatccgggtacctttttacgtagggtattcagagaaggtctctagagaggtgacatttggacgaagacctaaaggaaagggaggggaaaggcgaggagcttggagagcttggtgcatcttggtgggggatggggtaaactgagtcagttatgtagggccctggaggccacggtgaggacttcggctttgactctgaaaggagatggcagagtttggagctggtgtgtacgttaacaggaccatgctggcagctgcgttaagagagactgtaagggcaaggacagaagtagagagaccagtaggagtaggctgttgccccagtgtagggcagagaagatgaaccttagaccaggatggtggagatggtcagtggagagaagtagtcagagtctggaagcaccagcaagactgtctggtgcacacaggatgcacgtgggatgtccagtgaggaggatgagatgaggttgggtggctggagcctggtgagtgacaggcagagagggctattagatcacatgggccctggagccatggtgaagaatttggattttgttctctgtgttggaaagttagcagagagcttatatggggggtgagatggcatagggacaatgttaataacagcaacgaatatttattgagcacttactgtgtaccagctgttgcaacagcctctcaagggttcgttctgctattagagccatgttataaatgaagaaactgaggcacagagaggttagctaacttgtccaagatcacacagttagggacaaacttgacagaattatgtgtgtcctggtatgtatttcagttttctttagggaaggtaccacaactttgggtaactatgcccctaccccaggatttaagatgttttgatggttgaagggcgatgtttaagagtgggaccagagaatattgaggtattaaaatctcactaaatctgtattcattatatctgtattcatggtataattcatgtgcctccccctttcgtgagcccctcaaacatgatcatggatatgttttctccacccgtaaagtacgttcatattcatagaaaacccacagagaactgcagacctgaaggtttctttgtaagagctttcattggatagctagaagggctgcagtaagtttaaaaaaaaaaaacccaaaccaccctggattccaggctgcacagcctctaggaggtgtgggtaatccctttataaagcttggcataatttctgttaagacttgcttattttgctctcagcttgctatcttgatatgtttgcctttgaggaggttagagttattgtgatttaatcacagaccatgtatttcgcaagattcatttggtatctccagcttgttttcttgtttcctcggctgtcagtccacaggcagaggtgggaggcggccggcatgggggaccgagtgtggtagaaaggagtgtttacttagcggaggggagtgctgagggctgctgttaccttcccagaatggctgatccccagcagtgatgagcaggctgggatcgtggtgttaaatttggtattttctagaaatatatagcaggctttcccctccacctgccccccttcaaggtttcgaagccttgtgttttgcaagagttgagaggggaacagttaatagcttggattatcttgtctctggagagaatttatgtatcaattcaccggaagactgctctggtattagggcaacaagaatggttttatttctcccttcctttcctgcactctgttcttatgtaattcttgtattaaaaccattcctggtaaattagaacatgctcttgtatttgggccctgctttgaagaaggctgctgagtctaaaaagtttggtagcctctcgtttctcatggtgatttctgagatttctagggacttggtgttttacagagcttgttgagttgcacaaaccagcctccttggcccttctaggtgataaaagatgctgggctgggagggcagctgtggaaaagggtgtgggcgagggagacagtgcttcatcctgcctggatgaagcatgttggttgttggtttattcataaattagaaaaatatattaagaattgaagttgttccttatctcataagatttctagcaggctgcataaagtctgtagatggtaatatccatttaaaagtggacaatgaaaaaattacctctttgggagttgtgttgctatctctaccccaatttggcaatctttaattaacttggcaacccccgttttaccaacaaagaacaacctttgattaaaaaaaaataaaatgtcagggagtgaaagatacggagtgtgactcagcagatgggaattcctttaataacacgctgggtgttagcgttagaaccgccactgaacagctctgcaggatgccctcccagccctccctccgcctatttggattagaccaggagactgcagcaaacttctcaaggggaggcgaacttggtgttggtatctgagcgattgtctgtttcaattgtttccctctgtcttggaaaacaccggcacaaaacacaaatccagtcccagttcctgcagctgctggggcgaagcaggctttttatgaatgaggcccagaagggggaggagagggcttgtgttacagcagcagttgggtaatacatttcattcacttgcagccatctagcccaggcttcattttaaaggatattgttcatttttggcaattcagattagactttttttcttccttgtgcaactgttggtaagttagaacacgaagcatgtgtgtgcattctttttgcttgcttttttgagtgtttgctcctttagttgggataaatggtaggagaggtaggaaggctttgtcatccccggggaccttgcttacttctccctcccagcaccacttaagagaagaggaggtggcctccctctccccaacctcagagccctcaaagcccttgatagtgagcctgagcacttgttaggaggtgacttctacctggggtgtgctggggtccacatgtgccagtctctctgccctgctccccgtgagcggctctttatttgtggcccttgaggccccattgttgtggccaccaaaacctgaattggaagctgtgtgacaatgctggtccccctccctgcactgcttcctgctgggggcagaacaaagagagcgggcattgtctctggcataaatgaacctctatcaaaacaaacacccagagagaggggcagcctggttacagctgcctgtgtgagcctcgacagtgggcctcattcctcacaaagggagctttgaggcccggaagaggcctttccttgatgatcgagctgtgcacagggagcaaaccccaagccgactgcttgtctgtgccaccctcaaacaatgatttccccaaattggacagcctgggtttgtatccttgagcacagttttgggaagagcattctgcatgaggcattgtagctatgtatatggagtataattctgttttcaggttgctctgccacagaggttaagaactccctcttccaaggtagacattgagaacagagacgaccacactgggttttcactgcagcttttaaacaggatgactcccagcccccatccccgtggctagcagcaagcagggactctgaaacactgcaagccaatggactgagcatcttacttttgctgtccgtgttttggtgttttgtaaacccatctggtaatgaccctgatgccccatgtcccagcaagggcataggtacctgccattgtgcaccaaagtccctttcctcatggccctggctgttctcctgcatggggtcatgtgtgtcccgttaccaagttgtggccccttttcaaccttgagtgccacatctgggctgttgtaggcatgggtagtacaagctgggtttgttactctaaaaatgaaagggaggatcagttgttaataccttcctgtaggtgcgagagggaatgagttgaggattcgatcactgtttatagccagtctcggatcctgattgtgaagtcattctttctggataataactactatatccagcatcttgagagtataaaataaaggcacatgttgtacgtcatctctgagatgtagcgatggcttggactttggaggctgatgagagaaaactcatggtggtgagctggagcagggtgtggctggcggattctgaaggtgctagccctagttttacagctgaccagggaaggtcattgaaccctacagtcttggccctgagagaaccttggaggacttaaggatggagaaaggtgacaaaagagatgcaagccaacagcaattttgtggaacaaagtgtgtacaggatttgaacttaactctgcgaaagacaggggttgcttgtatgcacgaattcacatctgaagaatgcatctgattgtggctgcaatttctgtggacgtgcaaacatctacctgtgcattttatttgtctagcatcattgaaagagttttttgcttgagttgatttcccaggtaattgaagcttacttctcaaagcacaagatattttttctcatatattagcggtcttaagtgagtgagacccctaagaattcttaattcctttatcttacttttcctacaggaaacttattatgttttcctagataggaattgtgctaccaaaaatgaaaagtaaacgtaatatgtaatgttctactggtaattgtttccattttaggttgacaccgaactaatgatatttaaattgtagctgacttgaaacacagtgaaaaaatggtttcctgctgtttttttaaagctggattcagtaacatgaaggtaattaaaaatgtacagatctcagtaatagacagtcatatgttgcttaatgacagggatatgttctgagaaatgcattgttaggtaattggattttatcattatgccagcatcatacagcgtactttcacaaacttagttgatacagcctactacacacctagggtccatggtatagcctgttgctcgtaggctgcaaacccgtggagcatgttgctgttctgaacgctgtaggcaatggtaacacagtggtaagtatttctgaatctaagcatagataaggtgcagtaaaaaatatagtgtaaaagataaaaaaatggtacacctgtatagggcacttactaggagtcaggcttgcaggaccagaagttgctctgggtgagtcagtgagtcagtggtgagtaattgtgaaggcctggataaatactgtacacttaggctacacttagtgaatattacattttatttatttatttatttatttatttatttatttatttatttatgagatagggtcttgctctgtcccccaggctggagtgcagtggtgcaatcacagctcactgcagcctcgaccgccaaggctcaagcgatcctcttacctcagcctcctgagtagccgggactagacgcacacaccaccatgcctgactaatttttgtgtttgtagtagggatgaggtttcaccatgttgcccaggctgatctcaaactcctgaccttaagtgatccacccgcctcggcctcccaaagcactgggattacaggcatgagccacggcgcctggccacagttaacttttttaataagtagaaggtgtacactcttaaataactataaaaagtatagtaaatacataaaccaataacatagtcacttattatcattatcacatattatgtactgtgcactgttgtacgtgctgtacttttatacagctggcagcacgggtttgtttgcaccagcatccccacaaacatatgaggaacatgtacatcttaccacggttgcaatgtcactaggcaataggaattttctagctatattctatccttacaggaccactatcgtatatgcacttcatctttgaaacgctgttagctgcctcatgactgtatttctattcctcagtcatgggctcaccatgcagtacacatgtgtggtcactggagggaatggaagaacactgaggaaatgcatagcctgtttcatatatttattacactattatttatttagaggaatgttaagaaatcttgcttttatgtagttttagaatgccatgaaatatctagttggggcattatctgccattttgcaaggtaatcttccacttctgaataacgttacaagtaacccgcgtttggaggactgatttgggactaaggcaaggaatttaggaggcacaagtagaggggaagaaataaacacatgacttttgtttttgtttttgtttttgttttttgaaagaaggacagtggtttgcttgttgattctgctttgagaggatggggatgcactccagagaaagtgaaacggggctatgggaggaagagagcagcgcacacacagcacctgcatttgattgtgaatgcgattgtgactccttaggcaggaaggagagtgctaagaccgtcatcatggacactcagaaaatacctgctaatccgtttactggaagatacagggagctgcagataattattgttttttaagatggagtttcgctggagtgcaattgtgcaatctcggctcactgcaacctccacatccccagttcaagcaattctgcctcagcctcccgagtagctggaactgcaggcgtgcaccaccacgcctggctaattttttgaatttttagtagagacagggtttcaccatgttggccaggctggtcttgaactcctgacctcaggtgatcctcctgccttggcctcccaaagtgctgggattacaggcatgagccgccactcccggccgctgcagagaatttttaaaataaatgatagattctcacagataagaagaacaggataattatttgccaaagtttgaaactgccattatattcaaaggcattctcttttgggagtggttttatatttaaggtttgaatttagatgacctcaatcttgaggtgttatcggagcattacaggggagtcttatatacatgcaggtgcgatttaatttgaagatacttccatttaaactttatgctgccagagttggccagctaagcaaaaagaattctgataggtcttattctcctccccatcccacacgctgattttttttttctttgtgtttggccgaaacattttacatttctcatttttcacagagctactgtttctctaggattgttttccctgaagtgtgtaccctgtgtttgggcagagcagcaagaccagacttccaaatggcatgctgcgttttaatgtgctttcataattgtctgttccaaaagggtgcctgtgtgtgtatggtgtgtgtgtgtgtgtgtgattcagagcacctgagagcacactgcccgttgtcccctccagcccttctgaaatgcaggccaccctttctgtttcagttgccccttgggtggcagtctgtgataactcaaggtcaggaggaagtatttgttttggttgtcttgtttaactaattaaatctttaatcttggtccttaaaagaaactaaaataaaatcgtaaagtagttctgataagtccttgccataaattattgcttttgtaaacgcacataaaggactctgaactgttgctactcataacatttctgacgccaaatgtgtggggttttgccataccaacaaccagttctctaactctccagacaccaactgggggccttacaattcagtgcagttctgacactcaccacctggagttagcacagactccacagggatgagggttcagtcccacgagtctgcccttgctgcagatgcgagtagcaggtatggggtgcccacacttctgtctgacttgcctgaaaggttgagagtttgttgccaggccccttgctttcaggtctgataacttgctaggttattaaacctgaaacttgataacttctgtagatgttgaaattagaacggcctcactcacctgggctcacaaaattccagaaagtagttgacgtcctattactggtttaccgtgaaggctctatgtccagagtggacaggacaagtggaagagtggcacagggcgaggtgtggggggtggcgtggagctccttttcaggagtctctaagaaggtgggactccagcggcaatgccttgtccatgtgctaagccagccgagggcgcacgaagtgctgtgtggtgtccaagctgacttgggagggaccagtttggggccagccccccagcctcacttgtcatgtcccacctctgctggcatctgtgggcttaaagtgccttcactcccatccttttcaactatttcttgattaaaaaaaaaaaacaaaaaactgttgaatagtaggagactctctctctcattggtatttgtgggaataaatattaaataaacactttctaataggtgttaccaggacgcctaaggaaattatctcacagagttttcaacactgtgaaaagagaagctgactgccagggagagatccctttttcctagtccttgtgaacatgtgctggacagccaggagtggcactgtggcaagaaacacccgttctctggcattagtaagagggatatagccaagggtatctgtataccagtgttaggcccatacatccataaaacattgatgtgagagctttagggcacagctgaccctaagcctaacgtgatcattaatgtcatgaaaattggagaattggtcaggcgcggtggctcacacctgtaatcccagcacgttgggaggccgaggtggatagatcacttgaggtcaggagttcaagaccaacctgggcaacatggtgaaaccccgtctcaaaagaaaaaaaagaaaagaaaattggagaatttataacgtctgatgtgacctgttctttaggtgttgaaattagaacggcctcactcacctgggacattcttcagctcatgccctgtacctggcttacagttgctcagtgaaatgctttcttgattgtagcatggtgggatttttataaatccaaatgacttagaggtaggtgtcacatttttagcagctaaaatcatactaatcgtaaagctcagattcctgtaagtagggcgctgagcacaggctgcatcctggatatatgaatagatgaaccagatcgtgtacatgtgggacacgttctttgtcctttgggactttcttttgcttggatgttggtagtaaccatgtaagttcgggcagctttctagaaactttccttgttgtgcaacattatgcaataaatgcactgctttgtgatatctgagacgttttggttttcttcagcttgtttgagttaaatttagactcctggcatagttttaggtttgaatgcattctctgagataggataaggaccaaaacatccactcagcagccagatgggattttatccttgtgctgccatttttgagactcatgcctctgtttcactctctgtaagatggcattaatagtgagggattgttgtgctgtgaggtttaaatgagctaatccctgtgaggagtttacagcagggcctgggccatagtgaaacactgtgtatgtggaagccacttcacttttgtcatagctttgttgtcattagtgtataccctgtctccttgccgtttatgggtccttctttcaagcagtcggattttctgtctgacatagtataagtttagaggaaacaatagcagctgtaagataatagtaattttccttctgaaatcattttggtgaatttagtcagaatatctgatccataaactctcattataaaacattgccttatgattggagttttttctgagaacagttccaatgaacatgattttttggtggtgaggtactatttctgtgcagtaatgaagttgtgaggacacacagataccacatccatgttgtttgggaattgtttgggaaaggtacgtgggatagcctggcatggggaagaatgatgttagggtattctccttgaggagctcagaataaccaaaggtaaagcatttggtggtataagatatattcatcttaaaaataagttgaaaataataagatattgggagatgttagccaccgaagtaaataactacagtgaaatagctctttattaattttgaaacctaaagttgaaagagttccgtattatttgtcagtatctttatcctcttcaaaaatgtttccagctttgggataaattgtgaataattgtttcactttgttttttaatattggctatgtagtgattttgcattgaactgtgatataagaatgatcatcagccccttgagattactgtgtgtacctgtgtcaccagtggcatataggggcttaaaagcaagcaagtttaatatatacattcattgagaacacactgtagactgttaggattttcggtgctggagccatagtgatgaatatgacaaggccctcacccttgaggtgcctatagtcgtgtggaacctaggtcctcgcagggactctagggcaggtatgttcttgaaagatttttttttttttttttctttttgaagagacagggtcttgccttattgcctacactggagtgcagtggtgcggtcatagcccactgcaagctcaaagtcctgggctcaagaaatcgtcctgtctcagcctcccgagtagctaggactacaggtgtgcaccaccatgtctggctaatttttatttgtattttatttttatagagacagagtcttactctattgcccaggctgatcttgaactcctatctcaagtgatcctcctgcctcagcctcccaaagtgctgggattacaggcatgagccactgtgccctatgtaaaagattcttatcaacagttaaaataagaagctgctcaagacatttacctatcctgaatgtttcaggccctcaaggtgccaggtagctgcaatatagttctagtgtagaaaagaaaaccctgatgaggtctatatattccaggactctgtctgaggccctttgacactccgggggcaccctgccgtgaccctgactctttcctgcatgtactgaggatggaggtagcctatgggtggcacagagatttgctgtctggctagcagtacttcagggtactgggtggcttgaggacctcctgttagaagcttggattcacttttcccaaggcaaccaggattggattctattagttctgggtcttgagagcctgcaagggcttccttctgcgaaggtgagtctgggagagacgccatggagtcagtgtgagttctgcagcctcccaagttccgctggcgtgagaggcttgcctggtgccagggctctgggcattgggaacattgcctggtctaccgggcaagaaacgtgaaccaccgcagtgaactggcagcgcgttggcatttttccctccatgtttttataaaaccgctgagtagacaccagattataaatcctgtgtaaatagtcttgaagagtttctgggttcagccccagagaagactggtttgggttttgaggaatacttcaagaaaatgtttgttggttctgttttccaacgtaaagtgctgcacaaggactgtgctgtgagatccaggagtgtcttttcagccctcagtgagtgcctgcaggggacacagctgctttggaggaatgtggttccggagggtttcccactctccatcctagttgctaaagtcacgttccacgtattgtgttctgatgatagaatgaaagcccactccccgcaccctggggtctaggtggggaaaggagaggtgtatatgggatagccacggggtttggcatgagctcagtagagacagcaaactgacccagacagactcccgctttagggaagctgggatgaactaagtgaaggtgggtcatgggagcaatgctgaaccactttggtggttacagtgaaggctgctacacacccagctttgggaggtggggcccagggtgtccagctttgtagaaaggcatggtgtgggggtggctggcggagggggtggtgggtggttttcctcttgaatctctgagaaccttgactggtgtactgctctctgctttcctaaggggtccgtagctgtgctggtggtttgcttggtatctgtattacatccactctgtgcttcagcctgtttgtccagttactgtgtctagtgaagctagcattcacatattttagattaaattccacactccacccccaaattaaaaccctgctatttaaggtaaaaataattttaaaatgttttattttggtctctttggataaattaatcttgaggaaagcaatacttactgaatgttgatgtgtgtatatgtctttctctttgtaccatacttaacaggcaagtaactctcttgtaaaatcagattctaaatgattttcttttcttttcttttttttttttttttgagacggagtctctgtagcccaggctggagtgcggtggcgcgatctctgctcactgcaggctccgcctcccggcttcacgccattcttctgcctcaacctcccaagtagctgggactacaggcgcccgccaccacgcccggcttatttttcgtatttttagtagagacggggtttcaccgtgttagccaggatggtcttgatctcctgacctcgtgatccgcccgcctcggcctcccaaagggctgggattacaggcgtgagccaccacgcccagcctctaaatgattttcttaagtgtaattcaggagttggcaaactacagcccatgctgccacatctggcctgccacacctgttgttgcacataaagtttcattgagtcacagtcatactcatttgctttcatattgtctgtagacaacctagaatgttagaaaattctttctctggctggacgcggtggctcacgcctgtaatcccagcactttgagaggctgaggcggccggatcacctgaggtcaggagttcgaaaccagcctgaccaacatggagaaaccccatctctactaaaaatacaaaaattaaccagatgtggtggcacatgcctataataccagctactcgagaggctgaggcaggagaatcacttgaacccaggagttggaggttgcggtgagccatggctcatgcatgtaatccttgcactttgggaggctgagacgggcagatcacaaggtcaggagatcgagaccatcctggctaacacggtgaaaccccgtctccactaaaaatacaaaaaaaaaaaaaaaattagccaggcgtggttgcgggcgcctgtagtcccagctgctcgggaggctgaggcaggagaatggcttgaacccaggaggcagagcttgcagtgagccgagatcacgccactgcactccagcctgggtgacagagcgaaactccatctcaaaaaaaaaaaaaaagttatttctctatgtaaacaaagaaaactctccttccttataacttgtatgtgttgggtctatttgtattctgtgaaccataagaaataagtcaactatcagctgggcgtggtggctgacgcctgtaatcccagcactttgggaggccgaggcgggcggatcacgaggtcaggagatccagaccatcctggctaacacggtgaaaccccgtgtccactaaaaatacagaaaattctctgggcgtgttggcgggcgcctgtagtcccagctactccggaggctgaggcaggagaatggcatgagcccgggaggcggagcttgcagtgagagatcgcgccactgcagtccagcctgggtgacagagccagactctgtctcaaaaaaaataagtcaactatctcaaggtaattacccttttgaatacttgaggacatcttttctgtgccctctgaatatttccttccccagataaaatatttctagttcttttacttgttctttgtttcagagttttaagtctccatttgataaagtatagtttaatagccttcgaaaccacatcgttgagatttaaaaagccctccttgagagacatgaccagtagaaatcataccaggaccgtttagcaccctaactctgggagccatggctcttgggatgcggctgaagattgtgttatcgtcctgaagctctcttggacagctgagtcaatgactggaggtaggaaagttccttgaactctttcttgtgcccttccagctgtgagctgtgtcaccattgtattatttttacattgttgttgttcttgaaaaagcttttttttttttttcaaggcagagtcttactctgtcgcccaggctagagtacaatggtgcgatctcagttcactgcaatctccgcctcctggtttcaagcatttgtcctgtctcagcctccccagtagctgggattacagacgcctgccaccatgcccggctaatttttttaatttttagtagagatggggttttgccatattggccaggctggtctcaaactgctgacctcaggtgatcctcccacctcagcctcccaaagtgctgggattacaggcgtgaaccaccgtgcccggccaaaaaagcttttgaaaacttcgtcgtataatattatggccatccttccaaacgtgacctttttatgttgtattttatctaactaatttgcccttgcccccaacttttatcttggaatttcttacgtattaatatactgtcagggtccctgcttggggcattgtccttgggcttgtcattagataactccaagttggcttgactccagaggagctgccttcacacgtgctgtgaaatgtactgttgttgaccagagaccatcgttatcattaagtccacaaacctgcttcctgtctcttaggctgttccagtcttctatcgaaaaacagtggtttaagtggcttctccgatagtgctggtgaattggaagcttctcgtcatcccccttggctggggcgaggcttacttcctggggccttggcagttttgatctaactgacttatgttacctttctgtattaatcaagcctttttattttccatacttctgatgctttgacatcttggggccttgctgaccctgaagagaccagcccccctagggttagccagttcctaggtagtgaatgagtacaatgctcatatgcaaaataaccaatccaaaggccacgcccctcactcatatgcaaaataaccaatccaaaggccaggccccttaccacctttattgggatttcatactccaggccaatattgccctaccttaatcaccctagggccagataccaggcaagagacagcccctacaccccagagcctgtcagaattactccagccagctagtcctaaacctgcttaccttgtgtgatttattccttcccaaggaaaccacaataaaggctctcctccatgttttcctaccattccctctgcctcaggaccaaccttggttcttctccgtgtggccccttggcatggtgcactacctcttcttggggactgtgagtaacagactttttcagtggcaattgtcttttaactgttggcctcaccgtacctgaatagcagtaaaccctacatcttaaaatactttgagattgtcacatacagtacccagaataggtgaggatgaaggcaatttactggatgcagagcggccccagtccattccttatgtccgaatgctaagacttgagaaaggtggagaggagcctgactatcaagagttgccttcttggatgaagtgggctgaagacacacgaaccccttccattaatacatctacatattttccaccattgtaattgtattaataattggagaaaataacaatgactgtcaacaacaatagcttaatccagtagagatgaggtccggaataggttctggcctacctcagttcatgttttttactttcaatgctgaagcacaagcaaatgcaaaagcttctcttgaatgttttgtaaattgtgggataattgaggtatgtgacatggttaataacccagtgtctgctcattgagcactgggttattaaccatacatagcaaatggagcacatcatcgtgggttgcttgcgtcactagatcctgttgcaaaaccaagattcaactttaaaatacattttaatttaagttactctttctggcatgaatgatacatcactttggagcaacacttaccaggcagtgaaagctttttttaatgccctgtgtagcactgctttcggtgcccttatatgatttggatggatggatggatggatggatatagccacagggtcttgctctgttgcccaggctggagtgcagtggcaccatcatagctcactgcaacctcaaactcctgggcttaagcgatcctcaacctcctgagtagctgggactactacaggtatgtgccactatgcccagctaatttttaaattttttgtagagatgggggtctcaccgtgttgccggggttagtctcagacttctggcctcaagtgatcctcccaccttggccttccaaagtgctgggattacacgtgtgagccactgtgcccagcctgtttatatggttttaaaaacaaaaatgtatatgctctcaagatggctttcagagagcttattagtgtcttggccatttggaattccatttcacttaaattagaagagtgaaagagaaatgaatggaagaccaaaaatggggagaagaaattgtatctgatataagcgtggctctacctgggagaatggccattccgaattactggaaacaggaagaagacttgctatgatgcttccttatatctgtgggggaaaatcaaacttacattctgaaaggaaacttaatacttcatgtttttaaacacaaaaggatattttttcagagtagcagttataaagttgttagtttaatcttttagttcagctttttttcttaccagaaaaataattagtagtacaaaaatttatgcgtttgttttagctctattctgatactgttaagaagatacatgacataaaaacaggaatattttcagtcagtgattacaatttaaaatcatattcgaaatttaataaaaagtttaaaagaaatcaccagcataagatgttgtcatttggctcttggggcaaaccagctctcttctggtgaaagaactttctggatgaggtcgaaaggcaacagaaaacctggggaacaatggctgtctttttaatgggagttgctcctattcctggtggtaacaacctcttcctgttgctcctttccgaatggaattgcctcagtgaagttgttgaagaagtgaggagggcgaaatatgcccatccttctacagtggggagaggcctggcgcatgaaagcaggcctttgtgtatgccgggctgggcccatgcaaacagggcacaatcaggctattgtttgtttgggaaaagctatggcatcctattgcaattatttatggaagaaaatatttgatgtttttggaagaggttaggtgtggggggtgatgagggagggaggaaagagactgggcttacctcttgtcccattcactccaaatctctcagtgcgtaggatagggtccatctggtccaaaggagagttttgtgtgactctgtgtgttggagtgttttcgaaatgcagagaaattcagagcttctctagctttggctagagaaggaacaatggaagtgagtcttattctacctaagtttgatgtggggcagcctgttctgtagttgccttccaagcccttcttctttctgatgctttcttggtaccattgcccacatgctgcctccaccctggatgaggtctagacctgttacattgattctcaactaattaaaagtcaatatggtaaaatatttgcagcattccttctccttccctgtgttcatttctgaagctcaacagtcttccatactcaagctgtggggaggtccctttctcctttgacaccagccattttgtgatctgccctttcaggccaccccagccaccctactttcccagtcttgcctctgcctacttcacctcttctctcgaacctcagaagcttctggagtcttcacagtggccctaatcatgggtctcatccttgttttcctgtctctttgaggttccagcagccagctttgcctcatcaggcctttctctgaaattcccatcaataactacaagatctgcccagtaccttgtgcatatcaggtctcaggaaattgtgagtttcttgtttcattaagcatttttctttccaggaatcatcattcatcgcattgccatatgtgtccagatcccccttttcagggagccagtaattcgaaagcacttgcctgtgttgaatatggtggaaaaaacaaatgtcaaccctagccggccatcactccccatcggcccaccccattctcttgtgccagtaggacttgcctgtgttttctttgggcagttcaaagttgggctcttgagaagttgcctgtaaattcaattgaagtgaccagatctcatccttacccactctgtagctgcagataataaacactggggacttcccttgtgcctgtgttttaatgtaaccttaagacttgatgctccctggagtgtaagaatatgaatagctactcgctgtggatattgcagttaattactccttcctgtcccatgtggtccccagaggaatatgagattgccacaaacatggcagctttctttggggaggtgggagagggagatgaatcttggggcaaggcacattctcataaccatgtggctccagaaagctgcctgactcagagaatggctataaatgcccggttgtatggatctgagatcctcaaagccaggttcattcacttatttattaatttaacaaacattaggcagctgtggtgctctgtctgctccagcagtgatcaagacagaaaagatttcttcaatgctgcgtgtggtggctcacacctgtaatcccagcactttgggaggccaagacaggcggatcacctgaggtcaggagttcaagaacagcctggccaacatggtgaaaccccgtctctactaaaaatacaaaattagctgggtgtggtggcccatgcttgtaatcccagctactcgggagtctgaagcaggagaatggcttgaacccgggaggcagaggttgcagtgagtggagatcatgccactgcactccagactgggcagcagagcgagaatctgtctcaaaaataataataataataataataataataataataatagtaagaatactggggtggggatggtaggatgcacagtaaagagaataataagctagtgatgagcatctaagaagaaaacacaaaacagtactgtcatcacaatgcaggagtgctgggttgggggccaggtgtggttgaggggtgctgtattacgctgggtagtcattgaggcctctgtgaaaaggtggcatttagactaagggagattggaaggtccagccatgggaagttcaggagaaaggataagaagaaaaagctgtcacatgggcacagactgatgaccagcaaggctggaacttggaagatgagggaaactgagagtgattgtcagctcaggctgctttgacaaattactgtagcctgggtggcttaaacaatagacattgcagcattccctctccctctctgtgttcatttctgaagttgaatagtcttccatactcaagctctggggagatccctttctcctttcacaccagacatttcgtgatttgccctttctgaccaccccagccctactttcccagtcttgcctctgcctacttcacctcttctctccagcgtcatggttggagaagcatattctcatggttctggatgctgaaagtccaaggtcaggtgtcaacaaggtctggttctagtgagggctctcttcctggtttgcaaacagctaccttctcactgtatcctcatatagtggtgggagagagcaagctgtggtgtctcttcactgattaaggacattaatccaattgtatcagggtctcacccttatgacctcatttgatcttaattgtctccttaacagccctaccttcaacagagtcacatgaggggttagggttcctacatatgaattggcagggtggaggtgggaggtggccggggatgagacacaattgatttcatagcgtcgagttataagatgggtcacagtattagatgggaccagagcagagagggtctgtaggccatggcaagagtgagaatttactcaatacacagtggaagttggggatgagtgagaagcacaagagtggcacactgatttctacaacagtcagtctagctgctgggtggagaaggggagaaggaggaatagtggaaaaagcagggagaccgcttaggaagctgctgggaccgtgcatatgagagatgttggtggcttgaaccagtgctgggtttctcagcattggcagtattgacgttttgggtgaaataattagttggggagtggcagggcggggggtaggggtgcagtcctgaaccagtgccaggtttctcagcattggcactgttggcattttgggtgagataattagttgtggggggctgtcctgtgtattgcaaaatgttcagcagcttcactagtctctacctgctagatgccagaagcccacccaccccgccccctagtcatgacaatcaaaaatgtatctagacattgacagatgttaacctgggattagggggtggggagaccaaaattgtaccctgttgagaaccactggaccagagtcatagcaatttgcagtggatagatttaggaatatttgaagacttgtaaaatatagcctgaagggaatggagactgggagagtgaaagatacctctgagacattttggcttggacagaacagggggtggaggcttccattcctgagctgcaaaggagtggggagggaggagcagtgtagtttgggaagtgtgtggtggagaaggcagatggggcaggagctctgtcttgcatctctcaggtcagaaatgcctcagacatccagggggggcaagctaagatggagttgaacacagcagtgtagggctcaggggacaggccaggaatggagagaaacatttggcactcatctacttgtagcttccctgtcgagaaaaatgaaatcatccaggggttttcaaattcagtggtctctggaccccttcacactgttaaaaatggaaaaccctgccactgtctacatgtttatgttgccccagtaatctatgcattgaaacctaatcaccatgtgatgatattaggagctggggcctttaggaagggattaaatcgtgagggtgggggacctttatgaatgagattgtgcctttataaaagagagctgctttgcctcttctgctagaaggtgccctccgtgaaccagaaagtggagccctcacaagacactgaatctgccagtgccttgatcttggacttcccagactctagaactgtaaggaataagtttctgttgtttaaaagctacctagtttaaggtgttttgttataggtgcccagacaggctaggacaaacgccaataagctttcgtttatgtgggttgtatccattgatacttgctgtatgaagaattaaaattaataactttaaaaagatttattgattcagaaacagtaacaaaacttaatatgcgttaacgtacttttatgttggataaaaactatatcccaccccagtatatgaatagagtggcattgttttatgtgtttaatctctggcttaacagaaggcaattggatgatcatacctgcttctatgtttattctgctgccaatatcacacagcttctggaaacttccacggcacacattcatgagacaataagagttaaaaaggtaaacagtgtcttagtagtgtatgaaaatagtttaatctcatagaccccctgaaaaagctgcagaatccttacgcgttcacaaaccacactttgagaactaaagatcaaggagtacagttttctcatttttatgctgttcagagtgtggttgaagttcagccatcactagtccttcacggatagttcataccccaagttgatggccttgtggaattgctgatgctattttcatatatatatatatataattctagcctttttctctggtcttataagagtcacatacgtaggtaatttcatatcctacaaatatgttctaaacagcagaatattccaggaaaccttaagtgataactgagttgaaagagtcatattttttaagcaatacaatttaaataatttttaaaggaaacatttctaaaggacgttttacattgcttgcattaaaaagaatataatgaacataatccaactttttctcaatactcagggtcatcactgtgaaagtaacttcattctatgataagataatgatgctcccaggtgggcaaggcagtttttcatctaaggtaattgagacaccttttaaaagcaaaagataaattcacagaccctcagtgtcattataaattacttggtataaagatacttaaatacctacagccttataaggcctaggtgtcaattttttacgcttgcagatcttttacaactgtaagttaaatgattttacacattaagtgcatataaaacaaaaagattcaaacccaaatattaatttaatgacatgggtaatattttgctaaaagtaaaccactgctcagaatgtgaataaactgacctcgaaggcctgagtacgtttgaattacggaacacctctctttgacatcacaattgaattttttctttaagtatcgcaaggccccagttcacggaagtaccacaacataaattggtcttcacttggtatgtgaacacatatttatatgttaaatgtgtcttttctttttggtgtacaacagctagagtaatgcagtttgcttgcaatgtgttttttatgtaaatgctgatgccgaatccacttggcagcactgagttacaagaaggttaagtagatgaactagaagatggataaacgaagatagataaaatgaagaaaaacaaaaatcaaggagaactcaggcgtccaagagtgtgtaaacaacttctggtgtgagacgcgctacattgcgctaaatggcctgtgcgcttctggtttttcccttcctctgttgattttttatagttgtcttttattttaaacacgcctcccccccccctttttaaactgattttaccatcactctctctagccctgcctccctagaattagctgcttcttacctcccttggatctggaacttaaatattaacgtgtatataagttaatagtaagtagaccgtgaatttagaagagtaaaacagaatcatgagtacgtagtcactgtggccccttttctgctggatttcaagttcgtaagcatttttggaagagagtcgaaggggaaggggtggcttgccagtcagttgagtgatgcgtgagggaggcgttaaatgtgcatgatgcactaaaatgcatgtttcgagatccagtatgactgctcttccatagatgatgaaaccaaggcagagaaataagatgtaactctcttaccttgattagtgatgagaatgggacagctttattcatgaaacccggaaaccactagcccattcttgggatgattgatatctgcaaggatcttcaggaatagagtacctggggctcaggagccaagactagaagtgttgaaaggtgagcaggaattagctgctggcctcagacgtggagagacacacgggtgtatgtgtgcacacacacacacaggcacatgtatattcatgatggcttcttaattcccactccaggccaactcatttccctttcccttccacaggtacttataccataaaaggtatatgaagtgctaaaatacttgtaggtatgttgtcaatatgagctactctgtaaatgataaataataattgactggtgagtctaggcaaggcaagtcaatgagattacaagaaaagagatgttaggccttcagaaagatggaaatttctctttgtccctgcagggactgttgcagagcattagagccaccctcaaacagttacccagtgagtctcctcaaagcaagtggcactgagatacaaccttcctacaggttttcaagtcatctcgtgtggtgcacagtcctcgccctacctcgaaggcccgggcgaagttttcctgagtgtgtatactcatctctttgtgttgtctctggcagggagcaagtgagtacaggattggagtaataggcatttttaggcttgagatggctttgtgtgtttggttaatgtcactacatttcctaggggataataaaagtctagcatgataaaagatctcgtcttacaaggtcccgatgtaaagtttggagcctaacttagaatttaaaataaaatacattttgacccattgtattgagagctggtataatttaatatagtgagcccctcggcttctggttggttgggttataaagcttcttattcattcgctcatccattaatgcatttctcctatgaggaagctttttcctttgagctgaacacacaaaattaatcgtgctcgaactctccaaattttgtgagttccctggtaactgactgtatggaagacagaaataaaaatcagaataaacttttattttctgaatcagaaagcagttgctccagcttttggtggtcacattgctaagatgtaaaaaacagaagttaggtgaaataaattaagaataattattttggagaaagagagggtagtgtttgactaaattagaaacattctctgagtcttagaagcgtgaatgatttaaatgaggttccagcatagtattgcatgtggtttctattttagagttttcccacttgaaaacaaactttgaggatttttattgaagtccatcagttttaacttactcaaagcttagcagccaccttttgcttttcttcccgttccccccacctcatgctgtgaagaaagtcatacaccattgtggtgttgattgaaacctttatttctccaggtctcctctcataaactgggctaagaaacacaaaggacatttgacacttcatgactacataagatgtgctgttcctctctctttctgtttgaaagtgacttggcagggtgaagttgagaaccccttggaaaggaggaagccgaaatgcaaacaaagttgaatcatgaagtgatgtcactctgaaccaattggagcagtggtgtcatgtgcctggcagctacttcaaatgcccacaaaacaggagtaatggtttaagctgtttccctcttcccctcccaccaccaatcagcagcagactgctagaggacagatgcaaaacagttattagaccaggcttagttagacatggaggatgcatcttaacaagttagtacctttttgcaaagcatgaagactaattcaaagtctattttctggttttgctctaccagtacggccaaaaccatttctttttaagtgagaagtggggatatggtcaggtttgattccagttgaagttgtgagctgcacagggctggtctgagcccagtggcatctttccaggtgtcagagccatgattttaagctcctgttaaattcacagtgcttagtaaccataacttcttggtttcatgatcataggggtttttgcatagctgccacccccattttctgtttgtgatccagtagttaaaactcccagaaaatatttctcaccctggtttaaataaacaaaacagccaccacaaaaacaaacaaaaacttggctaaccactattttcaggcatattctgagagagaaagagggggaaaaaaagactagacatcctaaaattaagcaacattatttttggaattgtgttgtttcttatactcagtcatttgtgaatgatgtggttcaaacaaaactgaaacaaaaatagtttttctcattaaaaatatgtttgtcgcatagccagcactcggaactagggagggtaacatggaagtattgtcattctcggggctgactggttgacagcagcctatacaggagtggagaatattgacagggctgcccgttctccccaggtcgaagagagcaaatgcacatccctgtgtgcacggccacctggttcctctcctcacttgctggtgagtattgaacggctcacataattaggcagaactcaggaactttcctccctatctctttcactcttctgaaatgccctttatgttttcctctgctctttcagtcccagtgccttttctctggtgcagcctcatggttcggtctcaccttcagcttttccttccctccaatacatcctgtaaattattgtcagacttcttcttatctaaataactcgtttaggtaaggtactcatatgttcaaaataccatggtggctccctgttctctgtgatgtgaagtcctaaccattagactcagctttcccccaggacaccttggcttatcttcttgctgctttccagaggcatgggccattaggctggttttctgaaggttctgccaaaaggctgggcccttgtctcccaccccactgctgttactcatgtgttctcccacttgctcggcattctttcccatgctttttccttgatcatcacttactagctaacatctattttttcctaaacactctgttgcagttgtagtctgcagtcactctcctaagacttgatcatctattacgctgtttcgttctttattttttaacttttcttcttcttttttttttttgaaacggattctcgctctgtcacccatgctggagtgtactggcacaatctcggctcactgcaacctctgccttccgggttcaagcgattctcctgcctcagcctccctagtagctgggattacaggcacgcgccatcacacctggctaatttttgtatttttagtagaatcggagtttcaccatgttggccaggaggtcaggtcgaactcctgacctcaagtgatccacctgccttgacctcccaaagtgctgggattacaggcatgagccaccatgcccggttgttttgttctttaattttacaaacttggcatagcttagaagaccatatacagtggcaccatatacagtggcaccatattagtggcaccatatacagttttccctgagaaaactggtacctcccaacagataccaaaatctgggaccaccccaacagataccaaaatccacagatgctcaagtcccttttataaaatggtgtgatatttgtgtatagcccatgctcatctttccgtatactttaaaccagggatccccaacccctgggccacagaccagtcccggtccatggcctgttaggaaccaggctgcacagcaggaggtgagtggcaggccaactagcattaactgcatgagctccgcctcctgtcagatcagcagaggtcctagattctcataggagtgagaaccctattgtgaactgaacatgcagggaatctcagtaatgcctgatgatctgaggtggaacagtttcatcccaaaaccatccctctcccccacccatctgtggaaaaattgtcttctacggaaccgatccctggtgccaaaaaggttggggaccactacgttagaccatctgtagattacttataacacctaatacaatgtaaatagttgttatcatgtattattagggaataatgacaaggagaaaagtccatacatgtttaatacacaagcatcctattttttttcctgaatatttttgatctgcagttggttgaatccatgggtgtggagccctcagatatggagggcatgctatactgatcacccctatgggtgtgaatgttgggcagatcctccagtgtcaccagccatgtggccttggtgacctttccatacttttcaatcagaatgatgatctccacctctcaggaaagttgtggggatgaaatggtatagtctgtgtgtgtagagttgttaggctggggcctgccatgttaaatgcccatgaagcaggtaattatggtagtagtggttgatatcttgaaatcagggggattcccaaatttctaccccaaatctggatgactgcatattgcgggagttcagtaaatatttgttgcactaatacttatgtgcatacgctgaaataatctaaatatttaaaaaccaaactaacggtaggactttcctcagggatttaacgtttgctgtagaagactgaatgatagaatatataagctgtatttttcttgtgattctacacattgtccatgttgcaacttaaatatttttggaatgcaatgtaaaagtgatttactgtcctataattgttttcctgaaagcaaaatgatatttaagtgaactgcaatgaaaaatgcaacgactgtaatttatcgttgaagggcattttcaaagtgtatagaatgactaaagcttaagtgtattaaatattctagaggaagacatatttaggctataaatctagacttcctttggaatttgtttcctttttctcagccaggtgtatgaagattttaagttcttaggcctcagtgggaagaagatttaaggttccaagagtacatttgtatctcttttaaattttctattgtttatcagtgacatatgtaaatgttttagggagctgtttactgtaacattacctactttagctctgtgcagttgtctggcaaccaatgtgataaagacagagggaagtgctgtattttgttgctgacaagtatatcttaaaagtgcaggtgcacctgaataggcaataaagtattaagagctgctcctggagcagtttgctctctgtgacgtgtgaaaagtctacggggtttataattggtctggccatacggctgcctaggattagactcttttcatatcccactaaacactctccttagaagcaagcacaaggagatagtttattttaaaatgtaattgctatgttactaagatttgaatttgagtaccgagaataaaccatatttctgtttagaggctggttggcttaaaattgtgtctaatccttcccctgccccccaactccgaatcagagaatgaataacaaataaacatgacaatgaagtctcatgctgttgttttcatatttgtatttaggagtttcagagcaaatgacttggaaaacaggcaaatccactgacataggcatttttagccaccttggaatccgaggagggattctgcactatgccctgtaacctcgttcacatgccgtttgaatgtataccatgaagaccccttagctcagggagctttgctctatttaagtaatgtttatattcttaatgaaccaaagaggaagtggtcatgggaaaagagccaggactagatttcattctaatgcttataaggagagttctaggaaaccctcagacttggtaaaccaaggcatttggagatactatgaattggtttaaaaggccatttaccacttcttttgtaattggccttttaaaccaactctcacttagctgattaaatgtggtcatttaaactgctagttaacaatcggaagtgcagtggcgcaatctcagctcactgcaacctctgccttccgggttcaagcgattctcctgcctcagcctcctgagtagctgggattacatgcgcacgccaccacacccggctaatttttgtatttttagtagagatggggtttcaccatgttggttaggctggtctcaaactcctgacgtcatgatccacctgcctcggcctcccaaagtgctgggattacaggcatgagccaccgcgcccggcctaagatttcttattgtggtattctgcagtggagaatgggagttggaaagaaatgttttctcccacacctgtcccgctcctgtctactgaaagctgattaatcagtcagatagtgagttcctattggtagtacgcctccaaaatttggaagaggggaggtggcgtgatgtgaaaaagcaaggctttagggagagattcccgctgggggcattcaccctctggtccagcgtgcctgttacagtgatcactccatagtggttttgcatgaacaagactgcccagtttgcttaggaagaaaacaaaggacataaggtagttctcatgtcttcccagcaccctaaatactcgggctaaacttccacagtcagaccgtcagcttcaggaagggctgctgttgggaactttttttttagtttgcagttagttcagctccagccaaaaacctacaaaaagccactgcaagccctctgcctgctcgtataagacaccttggttgggcccctgtgactgtccatccataggatggttggccattgactgcacagagaggtagggcaagataaaacgactcatttgtggatctgactccttgtacttctgtttggattcaaacagaggaagatagagtagtggccttgggaaaccgtggagagagaaaaggcatagtcagaatgttttcagaggagcgcagacttttcaaaacccctctcatcacgttcccactgaccttcagttccagtgctgtggccacagggtgtctgcaccccaacttctttgccaagaaattaatgatctgtgaagacacacagacatgaggcggacttactatttaaaggaatcctgaaacgaatatttttctgatacatatttatcctaatatatttgctgagcatggtttttttttttttttttttcctattttggagtttttgggttttttaagcctagggaatgcctaatatgtactgtggagtgcatttgttcatttatatcccagtgcattgtaaaatcgagcaattcagtgccttagaatcctttctgtgaacttgatgctacgtgaactacttgagaacaactactttcaagccctccgaagcactcagttacaactgtcggtctaattgcacattattctaattcattaaaaaagtccccaagggcttcttaggatactgctctatgttattagaagtccttccaaatagaaaaactttattaatttaaaaataaccgccaattcagacttcgattcaaacaaggcattttaccaagtccggctgaaagagcttcttaccacatctggcatgtagaatggcagaagactatttttgctagattccttgttgctgcagccgtttctgatgtccttttccccttcacacctttcgtgttacacatgtctgagatgacatgatgctaagtaaccaaagtactgctgcgatggaattgctctgatgtttttttccagagtgaaagctgctattactttaaaaaaaaaaaaacttgaggtttggtttctttccccctctatccgggtgttatacaaatatgtaattaagatgtttgggggttcagatgacaaacaaggagtctacttctaagaatgcatttgcaagccaaaagagtggtgaaccacttcagagtgcgggtctgtgggggatgatgtctgctttgcttcgttttgtggaataatttttaacatttctatttagcattcatgatactctaaatagaagcaggagaacactgtggctctcggatccaggagaggcaggccacgagggctcctgctgtttggggacagtctgtaactctaaatctttttatatgcagcaattatgaccttaaaaatgggtgactctaatactggcattcattgcctaaaaataattttaatgtgcaaatgccagagaccaggtcatctcagaaatggactagaattgaccactgctatgttttggtgaaacctgataaccttgcttttctccgtgtaccttgtttttcattgtaaaactatttaattatgaaaatgagagtgtgaaaggcaaagtatgattgaatttagggggcagttccatatagttgtaacaaactgattatcaaatgtccaccattagtatgttaaaatacggttttctaatactgagacaacagggatggagcagcctatccactgaagtcttgttgtttgtccctgctgtgtcccaacctggaatctctttcttcttccttcagcagacccttcgagatcagcttaagcttcactgccttagagaaactttcctgtctacctggactgtcttctagatttctagagcagtgttcctgcccttttcctttctaaatggggtgggagttctcagagaactcatctcctttatggctttatccatcacagccacacagataggttctgtctggaccatccttttccctgagctttcttctcctttgccatgtgttttcatttctgccagacactggcactggggaagcctcccatcgtctcagactcagggtgtgtgaaaaacaaacctgctttctggactctacagtttgtgcactagcctaagccgaaaatcttgaaatctgtcatcagtgactattgtagtccataggaatacccaagactgggtaatttataaagaaaagagggttagcttttttttttccggctcatggttcttcaggctgttcaagcatggttccaacatctgatcatcatctttttttttttttttttagatggagtctcattctgtcacccaggctggagtacagtggcgccatcttggctcactgcaacctcccacttctgggttcaagcaattctcctgcgtcagcctcccaagtagctaggattacaggtgtgcgccaccacacccagctaatttttgtatttttagtaaagatggggttttgccatgttggccaggctgatcttgaactcctgacctcaggtgatccccccaccctggcttcccaaagtgctgggattacaggtgtgaaccaccacgcccggccaggatctgatcattttctaggaggcctcagggagcttttattcatggcagaaggtgaagggggagcagttgtatcatggcaagaagagaaagagagacgccagatctcctggtagataactaacagagtgagaactcactctttactgtggggagggcaccaagcccttcataagggatccaccccatgacccaaacacctcccaccaggccccacctccaacaatgggaatcacatttcaacatgagatttggagggaacaaacattcaaactatatctacgaccaaattttcctaattcctttctacttaaatgctttcttttccatttatttcacccacatctgaccctaggatttcaacgtgttctaaaatgaatttcttgcacccattttcactttctctccaccagaatccatctcaccacccacctgccagtggcatactccttgcatagaccctgctctagcatgaatatagcccactgttatctgttgtagaacctcacgcccagcttcccaccctgtgtgacatcttcaccctcttgccctggcttgtgccatccacattccgatcttgatgactctggttctcttctctttgacggtggagggttgatcccttccttccccatgatcataaaaggtcatgccaacactcctaaaacaaaagatagattaataagagaaaaacctaacaaatttattatatgtgtgcatgggagtcatacaaaatatgaaaactcaagaaaatggccagatggttgatccttaaatgctttatttattggtgagaaggtattgggggtgtaggagtaaatgattttcagggaaaatgaatatttccctgagacagcaatttacttgtaaatgatgctctttagaatttgaacacgctccagaggcagaaattgtcttgtgaaaaagtctgtctgggtatggttgcattcctcagtcttgagctggtggatggcagggtgcaattgcaggccgtagtgttcctctttggggatctggtttctaggtgggtaagggaacttcagagaacagccttgtcctgtgctttgcgagagacaaaggatgaggaaggggggtcagggaccttgaggctgcttcagcatgtcaagagtgccatgtttgggacgcctcaacactggaaatagccttcattcctctgcttcttgggtctggatccttttctttagactccaagaaattcttccttttgccccaaactcacattgtttttgtcttctgtccctctacttctatgtaattctattattatgcacagattctgtgtgcccaaggagactgtaaactccaggagggcaggaattatgtcttaaaacactagcggttaaacagttaagaggtgtcttaaaacattcctgtagccccagctacactcttgggtgcaggaatcacaagtgccttattccccacagggtccccagcatattccaggagctcattatgtttttaaatgaatgacctactgaaggcaagagaccaggaaggaaagtttgtaaaagtttacattattagattacccctgagatgtgtaaccttctcacgagttagatttcttgaaccactgcccgggtattgtattcctactctaggagcttgaaggattaatgataatccttttacagatatattcacaagtttctgtgaatgtgaattaagtatgtagatcttgattgcctttcttgagtgcatggtttttttctagaaaaacaaatttaagttaggtgggacacctaataaagctctaggctcctttcttttcctcttttaagacacagttaattaccttatgctaagttggaatataggaattatcttccaaaactgtgtttgcttgctgtgtctacataaaaattgatacaaggtatgccatggtttatacaatttctggcacatttacctggtctctgttacaggtttgtgaaaccaatttttttattgtaaatagtacgttaccagcttaattgctttagaacctagacagtctatgtctgtgatagtaattacattctttcatgactttgtttggtaacctgaatgttgaactagctctacagatttaggtcatgtctgatgctagccattcctaggaaaaagtggtgaggactacattatgggcctttccccctagacttaaaactgtgaagaagtcattttgggttgaggtatcccctggtaccctctcctgaacttcaatagaataacatgatgtggtgaatgaaccatattagaaaaaccagccaatcagccaagattcttgtattgactcttctgatctccctctacctctcctttccccatctgccaaacaaagggtttggaacagttaaattctaaagtggtgtcattgatggctctcagtattctgtggactttcctggttgattcagtacttgtgattgacctggaccccctggtttggtccagccttagagcgggtttgcaggtagacaccttcctaatgtttgttccacgtaagcccccggagcacagtatttccatcagctattttgtggaagtgagcgattctcttttggttgtaaaccttcactatttcatgtgggtgacttgacaatggctccatttttgaatggcccattgatagttgtagtctaaaaatttccagagattacacaagggtttatttaaagggaatgggaatagggagaaggtataacctttccaaaacaatctttaaggcaattataagctgttaggaaatgtcatgtaataataacacagatacccaagcttatatcacataaatcattcattttgcatgtttttgacagggagatttattttccaggttaaaaacaaaaaagaaaaatcttaaaagcttaagcttttattgtttgctttttttattaaaaagtaatttggagccagtaacttaacctgtttttcataaacatgctatctagaggcagccaaaaaaatattcatgcttgcatagtcagggtcctcaaatgaacttatgtgttggatcatgataactctggtaattactcgaattacccttgttgagtaatagtatggaccctgaatacaagggtttgatttatgtggccagctctgtgctgctgggtttatgaggacttgccagatgtcatctcctaattaaaatccttctttacccttaatatcctctcctctgtccccaagaaattaatccattctattgctggagcatgtaacagctgatgttgaagttacaagtttacagcttgaactttgcctagactgtaccttttttgggaaagagtttgcaaagcttttaagcctgactcttgtctttagatcaccagcatcaccatggtgcctggcatcagtggagcctcagcaagtgtttatggtggaaacctcagaagctgtcactttctctggctgtaacagttgtcatctttgtttacagggaaaatgctcttgagaaaatggaggtcattaaacactccagcttcagcaatatcatcagagctttccgtcacgtgagttatctcacaaaagggtcagattctggtaaaaactcttgccttcacacttacttctgttttattttgccttatttgacatttcaccagaattgatccataggttcaataaggctccattctgttgggacaaatcaagctagaaagacactgaactctgggggttaccagaaatatctgaaagcaaagcagtgactgtgaggtgggaatctctctgagaatcctttgcagaaccatgtaacagctctgcatcactagacgagccaagcgaagtggtcctggatggttcagtaggctcaagcattgagggtccagagcatcctttgcccctggacatggaagggttttcattgggagatggcatttagggcatccttataaacgagcaggagtaaacctagcaataaaaaccaaacctctgccttcagaggtatatgctattacttctgcttaaaccgttgtcagagctaacagttttggttagggatttttgtgggtccagggcacgcccagacacccagatgcttctctatgtttgtaagatggcgagtgttgagatgtcttataggcttatattgagtgaaaaggaataggatcctttgtcagtagtaacttaggctttttaggtggccagggcaagagaacaccccccctacacacacacacacacacacacacacacacccctacacccacacacacccacccctacacccacacacacccacccctacacccacacaccttcccacacaaacctacacccacacaccttcccacacagacctacacccacacaccaggatttgaaggctctgctaagaggctacaacaactgtagcatacaactagcacacttgttgctattatgtgtaggggactagatggaaagagtgcagataggactacctaccattcacccctaccagcgaagtggaagcactcatcttctttcccttcttaccctttcaaagcaagttgttgagggatgaagaggagagtgactttaatcgtggctttaagtagagattttctttaggagtaattgtttctctcgacagagtggataggcttccatagttgtcttaataccttttgtccaccccaaggattgacccaggcaaggaggatgaaccctcctcaatttgggaaagttaaattttaggcacagcaggtcaaagagtagggaagagctgcagttgttggaaccaagtgacattgatttagtctggaaaggagtcacagaggaatcaaaagccagaccctcctggcagctttagatgtggttggggtctgggaataatgctggtcccaaaatcacctctggaactaactcctgtaaaatgaagcctctgcatccttcagtaacttacttaaaattttgttagggctgcattttcttcaaagccaagttctgaataagaagtatttgttttgggctctagccagattactgaagtattgttgagggagatttgctgtggaaggtgttgggggtacagggattgtgaagataatgtaaaatatttaacattttaaaaattttcagtaagttctctttccccaatgtcagcatgacttcttcattcatgttcttccatcactctccattcagttagaatctcaattgtgtaatatcagtggtagcgacaattatgaaattcgtccagtgaggaaaatccgcagagctagagcccaaaccagcaactttgtagtgaggatgaccccactggccggggagaaactgaactgatttttttttttctctctctctcagctttttattttgaaataattttagacttacaaaaaagttgaaaaagcatccaggcatggtggcttatacctataatcccagtgctctgggaaaccaagacaaatctcttaaagccaggagtttgagaccaagctgtgagactatctctacaaaaaaaaagaaattaagtagccagcagtggtggcacgtggctgtagtctcagctacttgggaggctgaggtgggaggatcgcatgagccaggagttccaggctgcagtgaactatgatcatgccactgcacaacagtcttggagacagattaagaccctgtctctttaaaaaaaaaaaaaaaaaaagtttgtaaaatatcacccagttttccctaacgttagcattttacataatctatacaccaattctcacagccaagaaattaacaatgacacaatactgttaaccatggactatttgaatttcaccagttttcccactaatatcctttttcagtcccaacatccttcattgtgtttacttactatatctagtcttctccagtctgtaaaaatgtgtctatctttgcttgtttttcatgaccttgatatttttgaatagtatggacaggttgttgcatagaatgctccaaattggttctaatgtttctcatcattaaactcatttttatacattttggggaagactactacaagattgacattgcatctcagtgcgtcacatctgtgtgatgtcagcatcttaccactgatgatctcttagccttgaacacttgattgaggtggtgcctgccaggtttctccagtgtaaattttctgcttttcgcattgttactgatatcttagggctgatactcacagtatgcagatgtctcgtttctcttttttcatatttcttttcttttttctttttttgagacagtcttgctctgttgcccaggcaggggagtgcagcctcagacttctgggtttgagcaatcctcccatctcagtttcccaagtagctagtgtgcaccatcactaattagtgccccaccagttttgtttgtttgtttttttgtttgggcagaatctcgctcagtcgccagactggagtgcagtggcgcaatctcggctcactgcaacctccaactccctggttcaagcagttctcctgcctcagcctcctcccaagtagctgggattacaggcaggcaccaccacacccagctaatttttgtatttttagtagagacggggtttcacatgttggccaggttggtcttgatctcctgaccgcccacctcggcctcccagagtgctgggattacaggcatgagctaccatgcctggccttcaccaatttttaaattttttgtagaaactcactatgttgcccagtctggtctcgaactcctggcctcccacctcagcctcccaaccacaactggccaaggtcctgtttctcatcacattgtcactcactgatcttgtcatgctttggtggagcttatctacaataattattactgccatgctttaatggcaattttctatcttattgtcatttattcattggaatttttacataggaaagacctgctccttctcaaactctaaacagtttcattcaccatacttttctccaggtaactttctgggtggctgaaagtgactttcaaagaatggagatatcttttcaatgttgagagagtggcagtctgctggttcccaagatgccttcttcacctagcattgagactctgcagaatgccttgaccacagttgtgatttggatctgttggcttgcaaagcccatttgagaatttacaaaatcattttcacggcctgagagtcttttaggtactgatttttttcatcccttctttactaacagactttatttagtagagtattattggacaggtttggggttcacctttatgagaaaaaacttagattttctaatttcagcttttttattttcttccatcagtgggacaaagttgacatcattgcctaaaagtaatttctgtgattatctgtgtatttcagttaaccatgttctttggactcactgtggtcttcagcagggatggtggccaaactatgtttagaaagataaaaattaaaatgacatctgcatccttcatgtaaacccataaaaaatagcacgtgaccctgaagatcctctgcctctcattccaggcattacaattgaaaatgctatctgggatgttaaaaactaaaactattctaggacttagtggaatattgatagttagggaatgctgtttgctttcttgaattttgaacctgttattgagaaggtagatgcgcctgtttaccccaggaaggctcctctttgaagacagtgcccctggagcacatgaccttttcatgcccttgcctgtcaagacttttccagtactctaaggtcaaagggcgttgggccaggctgatctaatcagggtattaaccttgccccactcatcttgatttattcctagatcccagttcccagagcatccctttagagcctcagaaatggaacaaaagacagctgaaataagcccgtggccaaaaggcactctgagcatgagggaagtaagcaggcttccctgtcactgctgaggctctgtcatccagccccagctgtcctcttgtgatcactcagcagacccgggaaaaattcaagaatttgttttttagtgtcagtgggagacgtggggatcctgcttttgctgggagagcttcagttgtctgagtccccactcaaccccaggctcctgccaaggccaccaagggcaggagcactggaaggctgactatggagtgaagaggccactgggtttcacaaacagcactgtcagccaaagctgtagcttgttagccatccaaaagaatcttgcacctgctgccagtgagcttacacctagatgacagctggagctgacactcattcagcccttactctatgccaggtactattctaaacacttgccatatactcagttgtcccacagatacaactatttatccccactttagagacaaaaaattgaggcacagaaaggttaagtaatttggccaaggaagtgcagctagtaaatggcagacctggggtttgaaccgaaatcagtgtgactctagagtacctactcttagaccctactctctactgcctctcattagaagtctcccccacctccctaccaccaccatcaccacccaccctcccagccacatatatgctcacactgggtggttcagatggctagaagtggcagctcaaccttgtgtgcctcggacacgaaaatattaggttcagacaccactcagacttcacattttcattagttttgggtagaggaatgagaataaatattcagcgagacagccttttctaactgcaagattgcattcctcttctttctagatgcagtggcaagaacagtaccctggatggtggagctggtagtggtagatgagatagagcagtcccttgattctgctttgtccccattaatgacagatctgagggcatccagaaggaatctccacaagcccagcctccacagtggctgcttcctctacatggtagagtggtgctcacctccactcctccatagatgccaagtcatctgtggtatagatgtggatgtctttgttcaaatggtccttgagtctttgctcagatgatccttggttcttcatttcacctgggaaagaaaataatttgcctgttgtcattttatccataatattaagaaaacttaatggcacaatctaagctttttaccatgttatttatcatgggattacttttttcaggtgtcttctgaacacgcagttgtcccaccaaactttgacactgcccttgtgattaatttttgcctacattaatcactctcccttgttttaattgcacattacattcttttctgtccttcccggacatctttgctagcacagtgagtgcagggaggactgtcacggactctctcccctcttgaatgggggcattccagcagagtgtgttacatgagctcagagcacatgatgtgagagcctcgtgatgaaagatactgcaaaaacagtgcgcactgttatcaaacctgactgccttcacatcttgctttctgtggtgcaaaataaggtttttatagtgtcctgtttcttctgttatcatctaaaccaatggggaacggtgagtaagtagtaatcttcagaaaagaagaaaagacagggaggagaaagtgtactggaggcctgctttaccattaagttgttaagatggagtctcactctgtcaccccggctggagcgcagtagtgcagtcgtggctcactgcaacctccaactcctgggttcatgcagtcctcctgcctcagcctcccaagtggctggggactacaggtgtatgccaccacaactggctaattatttatagagatggggtctcattttgttgtccaggcggggtttttgttttttgttttgttttttttttttttttgaggtggagtcttgctctgtcaccgaggttggagtgcagtggtgcaatctcagctcactgcagcctctccctcccaggttccagcaattctcctgcctcaacctcccgagtagactagctgggattacagctgcgtgccaccacgcctggctaacttttgtatttttagtagagacggggtttcaccatgttggccaggctggtctcaaactcctgacctcaggtgatccgcccgcctcggcctcccaaagtgctgggattacaggcgtgagacactgcgcctggccgtccaggctggtcttgacttcctttcgcttgtagcctcccgaagtgctggaattacaggcgtgagccaccgcatctggtctctaagttttttttgaaagtgtgtgtgtatgtgttgaaaaacaatcttactgccatcatattgaagttacctagtgcatttcttcttcagggtacgaagaaaaaagaaaagtatgtcctgtggttgatagaaatcagtaaaatggagccctgtacgaggaagtgctgatgagactccaactaactccatggagatgagctacaaaaaaaaatactgattgggttcaaatccttggcctgccatttactggctgtgcttccttggtcaaattacttaacctctctatgcctcaatgttctcatctctaaagtatggaaaataattgcatctgtgtgaaaactgagttactatacgtaaagtttttagaatagtacctgacatacagtaagtgctgaataagtatcagctagagagagagagagttagtttccagcagcctgtttctgtttggggtcacatgtggtctctgtccacctggctttttaggcctctcttacctgttccctgtttatccttgcctgccccagggaggagtttgagttggtacatcctgactgggtactctgcctgtggttagcaaatactctgcatgttgagtgctttcaaaatacagaaacaaacaacttgtggaggcattggaaaagtgtgtttgagaaacaagcagcctcaccatgaatgggagtttgtttccctttctcgtctttctggtcatctgctgcacgggcaggaggagctgtgggttgcttttcttccttggaacatggagcaccactctcccctgtgctgatacacttacaaagaagttcacctactccttggaaagttctggaaaaggggcttctacactgttggcctctcgaggagaacggtttttgtttctgtcttcctggaaaagaggtgactgctggcatcatctttctagataaactccttgctatgatgccattagaagcagtgttcttttgtgttttgcttttgtttttccctgtagacaggaataacattttgactagaaacttccctgatgtaataacgaagatggcctccttagaaagttccagaacagaccccttcacctctgtccccagaagcagaagtaggtgatgcactttcttggcaagccacataactaccatttctctacaatcgaagctcaaaaatctgtgcttgtatacgttcattttttgtttttacttctttacttcctttgataagacagaaacttctgtattaaaactgatttaactctgaggggctaagtgaacaacaatctgttgtcctatagaggtcaaggcagtgctcacaacaggatcattgtgctgctgtagttcagtttaggggacggggaatgtttataaaaacaaagttttgaaatgaggacagggaaaggctttgtttacctggggctctagacttaaggtactcattttgcctgcagaataatgaaatgcagagttgtaattagaaaaggttgatgtaattgatgtgttaacaatttttgaggtttttctctttccactttaggacagtcatgcaattatttttctgaaccaaaatcagaaccatcagtcgaaggctaaaacaggcctggggaaacactgtcttttggcaaagaaagacaaagatccttgttctctaggccagtgtgcatatgtgtgtaatgctttaaagaacaattttgacaagaactcttaggatgcaacttgtagagtgatttttaaggagatgcagtaggatttgtgcaagtattctgctatgagcctaagattttcaacatggaaatctagccatgcagtgactcgttcactttggcagtgtctatcttagtctgggggtgagcgtttgtagaaaatatttagagactcaagtacactcatttgaatttttgctgttagcaaataaatggcaatatgtgtaacgtggtgaatgggatgtaaagctgtctttatattaccacggttagaatttaattttgaaagttgcaagtcaaactgcttcctcttgcgtcattaagttgtgcctcttgtttgctcaccggcatgtgtgtccttgtgtcattttggttgctgtgaaattgctcttaccattctttcatccttcaacctgctgtgctacaatcctaacatgctgtttttgttgaaaatgcattcactctttttggcatcttttttccccagaaagttagaatattgggaattcattggtattagtgaaattcccacctaatgcagcagtttttttctcttacctgcataatagacgcagaacaaattaactctaaacggattagagctgtcaactgacagatactgtgcgagatactgaggaagcctcagagatgataccaataaacaggacagggccttctggtcgtgtttctacttctcttattggtttgtcttagcaattttgaattgcactgaaaacgaaatttcataggtacacgatacagtagttagttttaaaagtttttaaaatattaaaaaattgaaagtatttaaaatatttttaaaatattttaaaatctgctgtgtgagatagataggagacctagcttttcttccttcttaccttgatccatagagaaagcaaccctgaaagaagaaaaactcacccatttgagctttcttttgtttccactgagcaatacggaagaaattcaccgctggttataggtcttcagtgctttcttcagagtgggattgttttttgtttcaccataagtagtagtctattaaattaacagttgctagagaagaagctgcatctatatatgcagttctcttcttgtcaagcagtatattttcacgatagcaatgaaaaaattccatcctcaccagccgctgaaacatagtaatactgcagaaattcctgtgaactatgcgtttgctgcttccttttgtttgtttgttttcagagcagatgggcttgtttgctttttgcttaaacattaatcaaaaatcaatttatggctatgtaagtggcattagataattctcattctgactacagtaaataatatctatttgttcatgttagataagtctgggcggcagtggaatgtaaaatagaattacatgagatatgacatatggctatgtgttttataaattaatgcttttatgcatgtgggaggagaagtaatttagcttactgacaaaaagaaaagcaaaggaaattccagagaaagaacaggataccaagtctaaataaatttggaagacaaagagaatatcatagtttagttcaatcttttaaacaaattgtcacaatttatacgttgggataagagaaccatgagaaaaggtatattctaagtcctgaacatctttctataccctgaagatgtttttatagctcttctgctgactccctgccaaaaaaactatttacggtttggggtagggggcgtgtcatgccatacagctaaatacacttttttcctaatctaggaggcatgtctacttacaaataaattgcttaaactagttaggcttgtgtaaatgtaactgacatttccttgagatcagaaaaagttttgctgattaactatatttgtgtgtgtgtgtgtgtgtgtgtatttagagagaaggagggattttataattattacaatttgatttgaaatgtctagagaaagtgagagattatggaaattaccataaatgctccctttttcatagatttagatctgttaattgcaagaaatctttttttaagtgaatcaatgggaactttttatttcttccctaagattcatttagccttgaaaaggccaaaagttgaatgaagcttctaaatgccaatctttccctccttctgttaaagagtatgcttcaactataattacatttgcattgtttaaaatattagtaattctacagccagacctctgagatagctgagaaaccaaaaagtgaagttcaaagacatcatcaggcaccctctccacacacaacataccaggcccaccaaggagtttacatgagtgtttttgccttgttagccgtggaacgacctgggcagtacccaaaacttagcaaactcttcttgtaccttgtattcagtagacggtcagtagcaccgagagtagggagaagagtaaatatgtttctaatactttattcaatgtatgttgttaacagtgtagacactctgactttccttgtgaattgcgcctcagtatttagttttcatttaccctggatcagatagggcatgataacctttgaggggctttgtgcatatgtaatttggaatctgagtcagtcgggctgtgtctctcccaacttcccttctcatattcttctctctcctcctcctcccctccctcctcctcgcctccctcctcctccccctccctcttcctcccctccctcctcctcctcccctccttccttctcctgccccctcctcctccctcctcctccttccttctcctcctccctcctcctccttcctcctccccctccttcctcctcctccccctcctctctcctcttctctcgtttctcttctctctcttctttctctcttctctctctaccattgctgtcagttgagatgggcctgtgcggcactttgtttgcagttgattggcaatcttctgttctactactgcatctgaatcatcacttgcttccaccagttctctgaatgtcttacctagtgatcctggtggggaaattacagtgattagtgttccaattcttgtttgcccataagtgtttcaaagtagtatttttaaaaactcttctaagacattctctcttctcatagtagatgcagtgaatcttaaaggtgccctaactaaaatttttgtgctataaaattggcagctttacaaaataaaaggttcgagatatgagcctgatcaaggctctgcatttgcaacaatatccttggtttgcctggccctgttatattttgctgttgtgatatgactcctgccagtgctatttccatttaacctttgtttttctaaaagacagtaataatttttcatttctagggagtctctgacatcagctaaaggaaagacacttttctttgactgtatatacatttctccccatttcattaatatcaaagttgctctttcaaatggcttataaaattttaaaattacaccagttgcataagcctgcataaaaagcagactcctacataagctgacaatgcatttgtaccgtggtgttgagcagttttaacatcctccgtgcctctgtgcttctgctagctactgctctgataaagttatcaaggtatcattggatgcattgaccaggatgaagacacaacagtatggccttattaaatttggaaataatgaacagacgagtagagaatttaggagcaatataggcaagcttaataggtctttactttggggcctgtaactccaactacatatggaagaatttaagtacaggaaaagttaagctcttttcccagtagttctgctgacaagttgggtgacttcgggatggttacctcttcatgataccacacggtgatggtaacagaggcactgtccagtctctggttcatgcacactggtcttctcaggggtccctgtataggtgacacagtggagaacagggcagtactgccagactcagggacccagttcatcgagaggggcagtgtttctcttatgctgccttaaaggcattggatgccttttggaaagccagtggacaactcctgcatccacccaagattaatgttaacagcttaaagaatcattgcaatcaagggaaattttgcaacactttgttgggatatttttaaataaatgtgtgaacaccttgttttaggcttgctgaaaatgacccaggaattccttgacccgggaatatagtgtatggctgccaattattatattccttcatcagacaaaggcggaacagttcactctttttcttttttttggacacaaattctcactccctcacccaggtcagagtgcagtagcatgatctcggctcactgcaacctctacctcctgggttcaagtgattctcatccctcagtttcccaagtagctgggatttcaggcacgtaccaccatgcctggctattatttgcatttttagtaaagacagggttttaccatgttggctaggctggtctcgaactcctgacctcaagtgatccttctgccttggactcccaaagtgctgggattaaggtatgagccaccttgcccggctaccggacagtccactctttacaggggggcgtcttggtataagtatggaaagctccgtagatgccgtgtcagtccataccctcaccaccttcttgaccctgtgccgataaactaagagatgtgggcagtgtaccatctggaaaggaaaaggctttggagccaggtagtcctgcctgcatttgaatctgctttctaccacttacttacatcaggttttccttgtctataaaatggaagtccttgtacccaccacctagaatggaagtgaggattaatccagaccaacgatgaagagtccagcatgcaggaaatgctcgtttataaccatggaagtttcgaggacttttgaaattcgatgacattaacctttgaggtgcattttagttggcttgtgtgatgaggcctttctacttctagttccagaatcgtctggatctacattatgtgggaatgtttattcccccctttactttcccaaaatttgctaaacattttcattgctatttgagttttttaggagacatactgagatgaagttagggatgtgaaaggtttactgaggataacaccaatgaaaggaagagaggaggaagatgatgggtgtggggagcggtttgaccaggactctgataggacagacactctgccagccctccgggagctcatttgcagagccccctgttagatggatataaccgggccctgggaccattgctgggctcagttactggccaggagctgcctaggaagagtgtgacctaggccaaaagttgaagtggaccctagaagagctagcagctggagggcatctgctagtgacactctggagctggacagcaagtcctttctgaaagaggatctgagctgagtatccctgtggtccagtatttcaagttggaacctctaggtttgaaaaatacatgttttgggtgagagtttgattattcttaaagggacatatctttcaaacatatggctgtggaagaggaaacttgtttttgacttgtaaaataccagcagagccttgcagtgatcacaacttatgtgaaatacagaccatcacccacagtttacgtgttcacactaaagtgccagtctctctatgggttttagagctgatttagatacatgcattgctaatacagtcagcccagccaagatagtgccatcctccgcaagcatccactaaggcatggagtcagcttccgtcattgttagatcagtacttgtttctttcccttgcttatttttcctaacctctctgaacctgctgtgttggaagcttaaggaacatcatcctctgttgggcagaattcttccatggccaccccagcattatgccccacaccatttgacttactcatttgtgaatgccaactcagaatgtattgctttgattcttgattaggatctcaacctctatttattgttaagactatcaccctttgattcccccccatcccattgtgtccttctaaaggcacagaatagaacatcttctgccagaaataacatacaaatttatcatcatacaactgtacaatatgcaaataacttgctagatgatattactgaagattctacatccaattaaaataaaaagagaaaacaccttaagataaccatactattaaaagatacagaagacaactggaataaatggaaagacataccacatttattagacaggaataatcatcattagcaagatggcaagatgtcagttctccgtaagtttttcaatttaatataaatccaaatacaacagatttttttcttttagttagattctgaggttatcattaaaacaaaaacaaacaaacaaaaaactgaacaagagcaaggagtccttaccaggtattaaaaacttccatagtgcctaaataattaaaatagtgagataccaatagatgaagagacagaccaatggaacagaatagaaagtccaaatgtagatgcaagtacctgtggaaatttagttattcgataaaggtagcttcacaaatcattgggactaagataaactcttgatttactggattggggcatgtaaattatggcccaatcatgccatgtttcttttctctggaaaagaaagtaaattaggttcatacattataccatgtaccaggctagactccaagtgaatccaaggtaaaagtgtaaacaaaactatgaaagtcctggaagaacacatagcgagttcctttttataaccttggagcagagaaagcctttctagtttcaactcaaaatccagaagccagaaaagaaaacattcataaaaattgaatttaaattacaaaaaaactttctgcatggccaaaaaccataagcaaagacagatgccaaactgagaaaaatatctgaaacttctatcacaaagagctaatctcccttgtttaaaaaaacaaagtaaaacagagctcctagaaattgttaaggaagaggctaacagttcaataggatttgggatgaagtattgaacagatagctcacagaagaagaaacacaaatagctaagcatagaaaaaaagtttgatttcactcatacgagaaatgcaaattaaaactacaccaagataccattttttcacttctcatattggaaaaaatccaaaatatttgataacacactctttggaaaacaaccccacatggctgggaggacggcagaatagcacatctatagaggagaatttggcaatatctctcaggttataaacacgtattctttgacccaccaatcttagagggggcatttaccccatagacttgcacacatgtgaaatgacagttgtgcagttgttcattgtagtgtttcaaatggcaaaagatgaaaatgtcccccaaattccatcactgagggaataagtaagttagggtgatagctcccaagcttattttctcttcagaatcacctcatgaagaaaatgaaggtctgtgtgatagtagctggcaggtgggcatggtggtgagggtggtgtttgagcggagacctgaatgaaggttgagaaggagccagccactcacagacacagaggaggccttcaggctgagagagcagagaaggaccctgtggcagagacaagctggaaacagcactgcttccatggtctggagactggaatatgtgggttctgcagacacctggggggggcaccacctggtaaatctgcctttcagctcttggttcttccagcaaaccatgccagctgtggctctgtagccatgtcctcggaagatggcagaggttgcaacgaggcctctctgaggtgctctgggagcacagaggagtcaggtggaacttgtggcatgttgccaagggaagaagtgatttttagacagaataggaatttgccaagaagagaagtcagaaaagcataactggcagaggaagcagcatacgttacaagtaactgcatgtgtacagggaatcactgagtgatggacaagggcttggcacttggtgggggggggtaccatgttaacatgttagcaagaaactaggtaggggtacttgacttgggggcagcagaagcaggtgtgagtgttggacaagacgagaactgagtgctgcaaatgtttggcaagacttgattgagtgcatattgtggacctgtgtctccactggagacacaaattagaatataacaccttgccctggtatgctcagggtctactgaggtggagaaacctgcaagtagagtcggagtacagtgttgaaaacaccatctgcaaccttaacacagtgctaccaaaaccgatttcggagcactcctgcaggaagtgggctggccagggcaagggaagccgtggagaacagtggcctctcccgggcaggcagggtaaggcctagaaagaataagctgagtgaaggtttgtgtgtggcccatccagggacctgcgacaggaacacagcggctgaggaacggatgcttggagaggagggggtgctttacatgccaggcgggcagggccggggtggggccagatgctggaggagagggctggccaaggggtggcagagaggccccccaggtggcaagtttgcaccctgttgcttcctgcaaggagcttttgtttacgttttcagcttggacagtctggctgtctggccaagagtgacaacgtgacttaccatcagagcgaagcaccaaagagcacataaatgaagtggagatccctcctgtgtccagcctccccctccccgtggccttctcctaccttcccagtcctccatcagtaccccggggccttgccagaatctcagaaagaatctctggactctggctcaggacctctgaggtgattatgcatctagaggcatccccaggtgctgcccaatttggggaagcagcacttcccgctggaagctgggaagtttcccctggctgggggtcctgtgaggatggagaggccagaatgaggaatgggttgtgagtcaagaccaaccagaaggggacttagcaatgtcagatgatagcctgggtgaactacatcctgtgtggaaaaggcaaggtgtaactgcttatttcttgtcaagtgagcctaatatcatcatgtttctttttatgcctgctcccaaactcagcccctcccagtgagatcacagctccaggaacttgcaaggaaagggactaacggggcatctgattcacccgtgtgcccttaatggcgtattgtgtgaataaagcaacaatttttagtacagggatttaaaacaacttctgcaaagacagaactaaaaattaatcttaaaaggtggagggttggggtggagggcaggaaagaggaggaactaaattgccattctctttggagactttctaaaacctaagacgaagaagaggagccgaattatggaaacaaaacctttgcggttttccacagaacaaaaatgatgtgaagctgcaagtcagcagttctggcgcaggggctccgggggacgcccgctccgccggctgtggtgtgcgcccttcctgctctcccctccgaggggctgaggctccttttgtctggcgcgcgcgccccaccccgccccgggcgagggaagagggagcgggcaccccgcgcccgcgccgccgccgtggaccaaggttgtttactactttccactccgaataacacgccaatcaccagggcccaccctccccgccggccaatcgctgcgttgggaaattccacctttccgcggggcccgggcagcgactggctggagtgtctgtcagtcaagtgggcatcccgcaaggatgcagcaggagtattagggaggcgatcaccagagcagaggaggagtaaccttccccataaacaagatgtgttccccccactaagaaagcgggtggagggtggaggagccaaaacacatcccagccccggggccccaccggagcgaagcgggccgagcgcagagtgcagagtcggggaatccctccctccgcctcccgccgtcgctgcagttgtaaacacgtttccctccatgtctgttttcccttctctctcaccgtggccattacgggctgctgtttacaaaaatcctgcaggcctttgacaccccgtcctcccttcccccggcatccctgcccttattctggctttcttctcttccatctcctggtgagcacagcatactgttctcaggcttgttttccttttattgctctccatgtgggacaggtcatgctttatcaacatgtaccattttctacaaatgccgcccttcctctttaaattgcttggatgggcagatcgattttgattagcaacactgcagcagaaacaaggtgcatctctggaaggactgggtggttttctcgttattgttgctggtttgggtcacatcggatgctattttaaattctgtgttttattccacgatgggtcttgaatcctttccctattcctaggtttgaaatatgtttcctccctttaaaaaaaagaaggggggcagtattgtgttgaaccaaatgtttttctaccttctcctgtgatctgaatcaggtttcccatttccagcagtacaatgtggttgtattcagtgtgataggggcgtagtggacatgaattatttgcgacagggctgcctggaagatgcggagcggagtttgcgtggcccggagcagctccagtgtctgaggcttctctgtgtcacaggctccaagcaggaagcgcaggcaaaatggcaaaatacagcatgtggcattcagttcaaaaatgcccttttttagaagtcggtattctaaatgacatccagtcttgcttagttttttaagagaaaggaaaaataatctatgaagatggtttggaatattttgtgaaaagccttttcagcataaaaaagatgatcttgagggtctggtttgcggagtggaggataagcctccctcctgcgattctgaattgctttttggtttgtaggaatttcaggaacatgttgcaaagccgtggccgcttgaaagggtcggtgccctgcgccccgtctcagcccctgcggcccctgaactttttcagtgatggggcacttggggagaagtgcggggagtggaggaggaggggaaggtgcattgcaaatagaaatgtaaggcgtggcctgggtggccaggatgtgccagagcagcctccagacctacttaaatcccaggaaaagtcctgcctcaagttaggcacaacatctgacttggatttctctctgtttttttctcttccagttgtctgtctgtgcgccctctcccacaaggaatagttttccacactgatggaattaatgcatatcgtggtattattggtggaatatgtttaacctttgtttcgtgatttgagaggaatggttcttgtgtatcgtgtggtgacagcaggttaaggagagtgtcagagctggtgcagagttttgccccggggccatgaggttctgggcatcatgactctcttatgaagttacaaaactgggcaagtgattgaaggcagaaagacactgtaataaagtgtgctccagtgatgtgtgctccggcttctctcccttactcatctgggccaggtgctttcgccacagtgagcctgggtgtcccctgcctgagatgagcacagtgatgtctatgcgaggttgtaggactcagtgaagtgccttagggattttgcctggcactctcctgggctcatgaggtgcctagggctgagacttccccttctctgtctggtaaatcatctctcccattctttcttctgcggcccttcatatgagctttgtaatttactcagggtggcagggtgaattcatcttttgctgggtttctgcatcacctgctcctttctggccaggtcagcctgttcattttttccatgccaacagcctctaagtgccagtaagtcacgtctgaacaaccaaagcatgtttccctgcgggagaatgccagggcaggcgggtctgggagccaagaggatttctcctgttcagataagtcgggggaatagaagagccctgtgacttgagacaagctttgagtgacacccagtgaatctcccatcactactttaatccctgccccagtgttctggttccccctttcctgcatgaggcagtacgagtaccctggcctggctttgggttctacacggtctgactttagcctgccttggtctttgttcccctctcactccctccacccctgccccccccaacacatgtggagtaccttaccctgccttcctagttctggaatggctgcccctgtgccaggccaccccattttctagaaccaccttcatacagcccctgcgcatcccactgtactatttccttgtttgtttttcctgtcaatcttgccttccgcgctaatgggacactgatgctgtatggtgatgtgttctcccacagtcatcttttcctcctgtggttggggtggggagctttctctgtgtccccccatgagagtgaggacagtctcatttaatggcaccatggtctgtggagccaggcaggcctgtgtgtctgactccacttcagcgctctcagccagcgtgggcacctcggacccagacagacgccccgagcctgtctttctggagaaggaagtagtaataccttttccttgagggagttatgaggattaactgtgcctggccctgaattcgtgccttgcaggtacttaggaagtgagttattacaagcagtgctttttatcatccatagatggagatgttatctatgctataggactgcagaaagaattacagagaattatgtagaatcactagggacttgattaatatttgtttacctttcccccacatggattgatgtcctttattatacttttgtacccccgcttggcaagcccttgacaaatattgatccaacaaaaaattagctctttaatgtatacgtttagaacctgttgctttgtcagtagtggtttttatgaaaatgaatgcttataggtcagacttctggaaaccctaatctgagggaattgggccaaataggaaagtgagccccttaaaggcagttgtctgaccagtacttggagcacaacaggttcttgctaaagcactgtgtttttaaaacagtggagttattaggttgaaattctgaatagcaagaaaaagaataatggaagtgctgccagccccgtgatgctggtgcagctggtcagtttgcagaaggaggccagttactagagcagagtggccgtagaggctgcaacacggtggccaaagcatgaagctgctgtatagtggcaaggtcacagtgatttccccgcagcctcggtttagagggagacggggtgtgctgagctgtgcctgcttctgtagaaggggccttctccaagtctgagtagccttaagccattaggactgctgagtctttctccacaaaaatatgtgggaggcctgcagggcaggtgctcaactaagctctggggctgcaaagatccagagccatgcccctccttggaggcaggtccttgtagacgaggacaatcgtagccttcctgattaaagcaggaattgtccaatcaggctatatgacgggcatcgtccatagtcttcaccaggggagcttttctgactatacatctctagccctgtggcttgagccagtcacttaatttcccctgagctttggtttcctcctcctggtagcagagagactatcagagtgaggggcagatgcaatagcatatgtaaaacacttagcgttgggcctggtgtttaactgcaataaatgttagctcatattttactgtgacatagatgctgtatgccttttgctgagtattaaagatactgagctgtagcatgcatacttgcatgaatcagtctgctaagttattttaagtttgcatttgaaaataaagggtggattgctatccaaatataaagaattggaaccaggctctaaaaggatgtttgctgttctttagcaaaataccattcttcttaagtttcattcaatcattccacaaaaatttaagcatctgttttgtcccaggcaggcactgtgcttgtaatggatgtgcaatagcaaacagaacacttgctttcagctcacacagagctgactcctgggcagagaatttcgacagtaaagaaatacaagtgtgatgaaggagaaaccctttggtactacctgctacatgttttaatatttaaatgttgacttagggaggtctttccatctaaaaataatgatttgccctttctcctgtaaatgacccctttctcttaagttttgggtgagagattttttttttttaaggaagaaagatattctacaatcgaatgtacaactgagataatgcttaggagagaatgtatactgggtttgtgccttggaagttgcttaggggaaacagttgtgtgcagttggaaagctgatgctttaaagaagcttctataaagtgaccccacaattaaactgttttgtgtacatctttatttatttatttatttattttttaattgagacagagtctcaccctttcgcccaagctggagtgcagtggtgcgatctcggctcattgcaacctccacctcccaggttcgagcaattcttctgcctcagcttcctgagtatctgagattacaggcatgtgccaccacacccggctaatttttgtattttcagtagagacggggttttgccatgttggccgggctggtcttgaactcctgacctcaagtgatccacccacctcggctttccaaagtgctgggattacaggcgtgagccaccacgcccagcctacgtctttaaaaataaatgtaaatacccaaggctcacagttccgttcttccatctagtctagcaccgtccagtggaagtttccaccatgatggactgttctgtggatgccctgtccagtacaggagccgctagccacatgtggctatggagcacttgaaatgtggctagtgctacggaggaactggattttggatttttttaaagttttaatttaaatttgaatagctacatgtggctaatggctactggacatcacagatctaacacaggattaactgacaaaattctttcctcttaaaaatatgtgtttattttgataaggataactgagacctgtacattccatttttcctgtcatatttagggctcataaagggggtggtatgcacgttttaaaaaatgcaacacaaccagttaaaccagctgtctaattgtacacatttcctggagctgttggtgttgattattagcaaatactaagtacttgtaatgacctaagaactataagacaagcaagtcgtcttctgtaactgagtatcagcggattcaagcgttaaggaaaatgattaagagaaaacaaccaaaaaagtcttaatggttctgtcaatcaagtggctatcaattcatggctattcaaaagcttttgtggctatgaaaataaactagattgaaaaaattctaaaacaaaattgaaacactcatttgagtttaaaattttagttgagttgatttttatttcttgttttggttcatttgtagtttccccccgcttcgttgtttcctcagatatggagaataaagcctggctggtcagtttcagtttttatttaaattcattttgtcttcattccttttaatctagcacagtcctgtgatgtattgggatcacagtgctctggggaaacattgaaatataaaaacattttcctgaaaacatttccagttatatttaattttcctccttgaatagaaaaatatttccaacttaatcctccctctcccctcttgaaatgaattgcatgctttggaaataacatcaatccacccaagtacacaaggacaatctcagccatttaatcgagatataaaggcttagagaactctgggcttcggaggcacagactccacctttcaggatgctaataaacgtggacgaggtctcgcctgggcttcctcctccattgttcagcgcagcaaaccagcacagcactccgtggccagggtttgcggggagaaatctctcactctgttttagtagcatcatcatccttatcagcaccctgcttttatttttgaacagccaaacttcctctttccaaacttcgtgtgacatctgggaccagctatgtttgaaggagtctgaacatgccacatagtggctcacgcttttaagggaggaaggccagtaagcctcctcaatggcagaattctactttcagtctaccctttggttctgttgtggttgttccttagaactttattctgctcattaggaagcccagcctccggggagggtttagcttctcatctaagcaagaagtaaaatgtcataatggaggaaaaaaaaaaaaaagtccaaactttttttggacttttagaaacacatccagtttgagctccactgagctatcattgcagttacaaagcccatgtatattgagatcggtgtaaaaattcagcatgtccacctgcataattatgaccagtgtattgaaagcacatttcatttagttttgcaacagccgatgaggtagattctaccaacattgttttacggaagaacaaatggaagcctggaaaaataaattgtctacctcacacacttcgcaggtggtaaacacaggatttgaactaagacatacttgattttaaagtgtttgcttttcctttgcactactgcatctgcgatgtttgcactcagacactctagaatatttggtgttgcatgtttttgccccaagaaagaacccattaaaatgaaactttccagttcgtaagctttgccctcaagaagggaaagaacttcttgcaaggtttctgaaacaaaaagaaaatgaaaagtaactttactgtatctgggttttctgattaaattacggtttttgcaagcttgtgcatttctcagtgtccagatagccaggatttttccttttaataaatatcactttaaaaaacaaacacacacattcttaaatgcatgattaactgtatagattgatttagttataagatgtcctagcctaaatataagaaggtgtatgtgttagaattaatttcttcaataaagagaaagaaattcaggaattgtggttctgttggtcttctgtactgtatatttttgtgcagccaaagcagcatgccttgcttcttggtttcatgaccacatgggtagtttcttgaagttttttcttttgagatggagtcttgctctgtcacccaggctggagtgcagtgacgcgatctcggctcactgcaaccttcacctcccgggttcaagcaattctcctgcctcagcctcccgagtagctggaattacaggcatgtgccaccatacctggctaatttttgtatttttagtagagacggggtttcgccatgttggccaggctggagtttcttgaagtattgactgatccttgactctgaactgtatgatcaaagacttttgaaatggcacaccgtttcttaacatttaggccaatttcagttgctcatatccaaaaataagtcatgattttcggagtcagtgcgcagcacttagtacaacaatccaaacccttgtacagaccatcctagtagaaatgtggatcttgagtatctcagcttcttagtagattttgaactccgtgaaagcaggagccaggcctctcacagcaagtctctccaatatgctcagtaaatatttgtcagatcgagcaatgaccagatgatgaaatacattaaagccttagggagaactgagactactgcaccagtttttgtgcactatcatgctggaaatctttccaacatgtattctgtacttctttgcttcttactccagtgaatataatttagtcatttctggccaacttgaggacatcagcgagcataaattgttgtattatgcataatacagtgataccctcaaggctgagtgggaggcagtttgccctctgctgaaggtttcttgtgcttattgtgttcttatggtttggttttaccatttttatgtctccatttctgtttaatagacttatttcagtaagaagagaaagccgtctccatcagcccctctgtaggtgattatttgccacttcctttttgctgtgagtgctttgaaaacagatttctaagcttgttagagttatgtgttaagagtaaataggcagtaagtgaaaccaagcttcttcctggtgcttgactaccccagaaatgtttatttgctgaatagttgagttctggaaaggtgaggtataaatgtgtgataaatttattcctttgcatgatttttttttctttttcttccctccctccctccctccatctatgtctctgtctttctctgaacatctctccgtctcagtctgtctctctcatgatagttgctggaataatttaaatgaatgtaactcatttacccacatcgaagcccaactcagtagtgaaaaaacaaatcttccaaatgaatgcactttccccttgatgtgctatatacaagaccttggcacacctagttcaatgacatagtattttagaagggcctccttacaccttcctctcagataaatatacatgcagggacattctgaagaagtttgttatcggtcttctcccctcctactattagctccgccctcctagtccttctctttcaccatgctgacccgcgtagggaggacccttacaccctctgcatgcagcgctggtgctccttagtgttcataaccccaacctccatggcctctctcgcagttctcaggttaggccctgcttctaggggacattagctttccaccctctactacatacttcctagttgttgcagcctttgcaagcaaaacttgttttcatttgggagacagcatggtctgacagagcctagatcctggggtgaagacattctgggtttgtatcccgtctttaccacctctgagcctctgatgctggacaagtcagcaagtctttgcaccttagtctcctttctgtaaaaaggagcttatggggatgtaatcagagaagccttagcatggctcttggtacaaggcacggaccaaatccatggtacgctcactcctttcctttcagtaatactgcctaaatagggcacatgtacctaaaaggattttgtacattccttgacagcagaattctcatcttctgttgcatatcccataatgctgggaacacaaaataaaaatggtagcttttcacattcacttttggcctcaattttttgttattccccaatgaggatcatttcatttggggctggtctccggaaaaaagtagatcaagcttttcagatgagatttgggtgaaaccctgacaaactcttttttattgccttccctaccacatagtggtggatcaggaaactgtagggcttatgatgctgggaaatttctgctaatgcaataaagatttttgctgttgaaagaatttgatctgttttatgtataacatgcagagagcagaagcatatattatctgtagcagatgatagagcagggtatatgggcaagttagaaaaacacagttctcactacatttgaagaaaaaggacaaggagttgtcacaaggatccaggagagtcgcacataattttctgtcgtgcattttgttgactgttcctctttgcatccttcaaccatcttaacttcccacttgcacctcgctggaagacaaatctaagctaaattaaatgctaggcaatatgtcagaatggaaagggccctcaacttgggatgcccggttctctaccagcctgaataaactccagcaacagtatttctctaggaatcatctgtaaaaagtagaggtttgtcatatctctaaactagggattcaccttatttattaagctatcagtgactttatcttgaggtgcacggcttttagtaactctggttcaagtgcaaggaatgcaaagttaagtgtatcattggaggtgggatttttgagtttgtcagtcatttattgatttgcatgtatccttatagttcaaaggtctttttctcaacttagttgatgatcatgctgtaagttgttttcttttgctttatcaacttttaaaaacgtttattaacttttaaatttgaaataatttcagacttgcataaaggttacaaagagtaccaggagttctggaacaccctccacccagcttccacagatgttaacatcttacataaccgtaatacggttatcaaaacagtgttcactccatactccagtgctgttaatctccagactgaattcggatttcactattttcccactgatgtccctttttttggttccagatccaagagacgatcctacctggcatttattgtgttcagtttttctaattctgggacgttttcctgggttttctttagtcattcacgaagttcgcacttttggagaacatggggccagttattttgtagaatatctttctgttagagtttgtggatgtttcctcctgattaaatttggggggtacatttttaacttggagatcacagaggtgctgctgtttgtgtctttgcgcatcctgtcaggagatgcgtgatgtttcctttcctggtgctgttagctttgatcccttagttaaggtggtctctgtggcttcctccattatcattactatttttctctttgtaattaggaagaatcttttggaggtagatacttgagactatctaaacaagcattctgttcctcattattctttcacccactaattttaacatccattactgtgatgtttgccaaatggtgattttctatttctgttttctacacttagtaattggattctactctcaggattttatgtattttttaacagtgagggacataaactttttaactagcagtggcaagtccacttttatttgggaggacaattactagtcacatgaagaagaaaaaatatgcagaagcttaagaaatcccacatatgaatgttatttgaaatgttcttgccctttctccctacaaaggaggtgaagaagatgacaggagatgttaattgccaaaatagtctcatagttttggtcctggctgcaaatctctcgtttttgatactcaagagaatgctattggggaactgactctgaagcacagcccagatgcttgagatgggttgggaaggtttacatcaacaccatgaatttaatttatcatgtgacattttatttctgagtttttaaagctgtaattaaaagaagtgttcaaagtgttgctttcctcttttagaataaacgtggctgggtgtggtgcctcatgcctgttatcccagcactttgggaggccataggcaagaggattgcttgagccaggagtttgggaccagcttgggcaacatagggaaaccacatcactacaaaaaaaaaaattagcctgtcatggtagcatgcacctgtggtcccacttacttgggaggctgaggtgggaggatcacctgagttcaggaggtcaaagctgcagtgaggtgtgatcatgcccctgctctccagcctggacaacagagcaagacactgtctcaaataaataggcaaacattaccaacatggcaaacaagttggaggaggccccctatttaattaaatttcagcagtcccaaatctaattggtatgaagaaatcattattcagaattttccatcactgaaatactaaaatcacttgttgtttgagacatcttggcctgtcacccaggctggagtgcagtgttgctctcatagctcactggagcaggagcctcaacctcccaggtttaagttaatgctcccacctcagcctcctgagtaactgccactacaggcgtgtgccaccatgcccagctaattttttaatttttcgtagagatggggtctgtgttgcccaggtccctcttgaactcctggcctcaagctatcttctccagtcggcctcccaaagggctgtgattacaggcgggagccacagcgctcagcctaaaaataactctttagccaaaagaaagttttaaaaaattgtctgttgtattctttgattttactctatgtggtcttttctattatttttaaaataaaaaagatttatactcctcaagtgtaacattttatcaaatctcatgcttctgtttgatgaaaccgaatggctaaattttttaaatatcatgcaatccatcccagtttgtaattttattatggccctcacacaagagcgtgcaagctatactaagcttcctgtggccctcgtttttcctcactgatatttgtaactcattccaaattaaattttaggagtctgaaatgtagctgttatatttgggagatgtgaagaaaagaatcgtaggcatctcagtaggctaggtatcagatcacacatgcttgctggaccaaagaggactccttacagtaggatacatgattctgagttagtttgtgtactaagtatatactatatagcttttgaaggggagacgggcacagaattcacaatatcatgcactaagggttattttgtgtttgcagtttccagatgaatgttttaaagttggctgcagaatacagcgagataggtaaaatctatttgagtattacttacagaccccaaaggatatcccaaaggatatgttggactaattcctaaaatatcctgtaagtcattgcaggtacaggcgtggatctgggtttggaaacgccgcctggatcgctggctgggctcctgcagccgccaaggaggggctggctggaggtggggctcggcgtgcatagcggccacgtgactgcgccccggccacgcccaccgtccctcacgtggtcccaggccacgctgggcttcggcatgtgctaaagtggatagaaaagggagtggggcccgggcgtggctttgtggtttgggaagatatgaactccttggggtttttttctcttttaattctttaattttgatatttggaaatgcgtaaaaggtttttcatttgtccttgaccacgtggtccaaacctcaatttccctagcagaacgcggtttcgatcactggtggatccgtctcacagcaccagtcatgctgcctcgctgggaagtggagggctcaggattcccgtggttcacgatccattttatgttggaaggaaatcattttgaactatctcagtacacaccctagtgtatctttaaacctaattgagtgttgatggaaaatctgcggtccgagaaccgtaagaaaagggggctcccacctcccgctctggggtcgccacttgcctcgcaggcaggaggaggctcccagagtagatacaacttgcccgtcacccggatgggttggtagtgcacatatgcacggggcgcagtttaaaatgaaagtaaaagatgcaaatgtgtttgcaaaagaaaaattaacataggatacgtgcgggcgttctcagttgaactcggtcttactgttccacgcgagcaccccatgactcagagcccaaatctcagcggaacagcccaggacgctcctgccgtccacaggaagacgcctctgtctctgtcccccgccgccaccacacagatgcacgtactctcttcacttccgtgtacccagtaaatgcagatcctgatttaaatctgcagcatgctgctttcttcccattgcatgtgggaagcttcaggttctcttcggtttattttctcatcacctttattaaaatgcagtaaagcaaggagtatattaatgcgggcctctgcaaatagagggaatttattgaaaagcagaatggcttgaaagattgaacttcatcttaaaaatcagaaacagactcttgttattaatagctttagaaacgaaaatctaacttctgataaattatttcagaggagtggttcaaacgtgtagtagatagctctgcctggtcatcaattatagtgacgtccttgcatcagctccagaaactcagaatattcatgagctttccagtctgactcagaccttcaggagccatgaaattttcctgttgggatgagaggaagcgctggcggtcgtttcggcagcttaatgaaaccagaaatagataagcacgagtgaggggtgatgtccgcttgtttgctcccatcatgttgtttttaatgtgtgaaagtgaaagttttaaaagtcatactaaatgtgtgatcctttttagaattcactgggtacgggtacgtggaggaagtgtttttgtttttgtgaatttgtttaaacaaatgactgaggctttgttttccactctgtctggccaagcaccattgctacacttttttaaattcatgacatcctgagcagtgaagctgttcttcagcccgcctctccatttgtgactggaagacaaggaggcagacaccaatggcgcctctcacaatggaggtttatttttttttaatctaacggagggattgtagatggtgtaaaacttccttgtgccaggagagaaagggggagagagagagagagagagagagagagagaaataacccattctaaacaactttaggaatagatgatccgtaggcatcaactttgcgcagcaacaaaagccactttctgaacctcgttctgtgaagttttaaaacaaattgggtttgtttaattaaaatatttcttaaaggcaaaaagcactgagctaatttttaagaattttaagttatatattaatatgagtagtgatttataattttctgttgaaatacataaattcgagaagccccacccctaccacttgccagtcttgagtccccacggctcctttgcctaggtctaaagtcactgcttgcacactcctgccttgcatatgccttgccatcgtgtgggcctcttggctggaagtgttcttgtcctcccgttaggtatcttttatgacgtgaatccttacctctaattattatctgtgtgtacatctcatcacctgcatctgactgtgtgccttgtgtatgtctcttagccctcacaattgcctgacatgccttacaaacgggtagaccaagtgttaaatgaacaaatatttaataagaacttaaaagctttttgactttatatatttttaaagccattgtgattaaacactatgtttgatgtggtgctaattctgtgctttatcaactgtgtgaattgtagtatttttaaagtaggaataattgagaaatattttgaagttaggttaagcatagcagtaaagtttccactttttaaaatagccaaatccaggccaggcgcagtggctcgtgtctccaatgtcagcactttgggaggccagggcgggcagatcgcttgaggtcgggagttcgagactagcctggccaacgtgacgaaaccccgtctctgctaaaaatacaaaaattagatggttgtggtggtgcatgcctgtaatcccagctactcagagaagtgtttgaacccgggagttgggggttgcagtgagttgagatttcaccactgcactccagctggggcaaaagaatgagtgaaactctgtctccaaaaaaaaatcagagcgtggtggtgcacacctgtagtcccagatacttgggaggctgagatggaggtcaaggcttcagtgagccatgatggcaccactgcactccagcctggacaacagagtaagaccttgtctccaaaaaaaaaaaaaaaaaaaaaaaagccaaatctgttgggtttttttttttgggggggggggtcctttagaatggccctgacagatctttaaggcatggaaatgagccttatgcaagctcctggcaatcagtatgtgagttctgtctccttggcaagatacagcctcttagaccctcagtctggggaaataatgctgatttctcctacgagttacgagaattacgctagaaaactctgtggcgcatacaggtgccctgtagcctgttggttagaagcactgaccctgaagtcaggtcgcccaggttggaattccagctctgccttcttcaagctgtgtgactctgggaagtcacacacactctctctttgtgcctcaggctctggttctgaagatgggaacggcaggccctccctctttggcttgttgcacagatgaaatctgacagcgtatgccaagcgcttagcacgggtagcagtgagtgccccgtaaatgttaggtaccttcctactactactaaacattcattcttcccttccctgctagtacctgcagctctgactcatctcacacccttgagagaggattatcttcattaaaaagtttttggtctgcccagaagcaagtgttacctgtgagagagctgggcttgtgcataggttagattatttctttgggttattcctggggaaacctgcaaagaaatgcagccagaggcctctggttcattttactgctcatctcctaaaagtggtttctcagatttttatcctttttttctctttttcgaggaaggggcaaggaaatattttttcatattattcttgtcatcgtctatttatttaataacagttgactgttgaaacataggaaagtacttatccgccaggaaactcccttctattattggacttacttgctttccatttatatgttgtctaattccaaagagatttcgagacagctttcaattaaaaaaaacaaacaacaacaacaacaaaaaaaaacaccacataccgcatgggtattacacaggacctgtatggtcaaattggcaacgaccacaccacatgagaaggaagattattcttcctggaacctggctcccttgagattcttttttttttttttttttagacggcgtttcgcccttgttgcccaggctggagtgcaatggcacgatctccggctcaccgcaacctccacctctcgggttcaagcgattctcctgcctcagcctcccgagtagctgggattacaggcatgtgccaccacactcggctaattttgtgtttttagtagagatggggtttctccatgttggtcagggtggtctcgaactcccatcctcaggtgatccacgcgcctcaccctcccaaagtgctgggattacaggcatgaaccaccgcactcccttgagattcttgtaagccaaggcagaagaagagacatcttaaagtctgtatgtgcacacctgcctccccccattttatatacaattcaagggctttgcttttggaaagtttgcctatgtagtcgtccagggctaaattaacacctgtctctatctgtgtgtaaggctctctgggaggagctgtgaggcaaataaaaataaggaatggtgtcccgcaaggagcttacaatgtgtgcattacaagtatatactgagcatggccctgggaacacagtgaaaaaacaggattcctgccctagtacagtgtacactagtggaagagagagaggcagtaaacctaaaagtaagtcttttaaaaactgtggtaaaatgcacataacataaaatttaccatccaaccgtttttatgtgtacagttcagtgacagtaagaacattcacattgttttgcagccgtgaccatcatttatattcagaactcttttcatctcgcacaactgaagttgtacctattaaacagtaactcctcattctctcttccacctaggccctggccaaaaacaaaaataagtctttgattgtaaacacgatcagtgctttgaaggagatgggaaggatgttatcataaaatgatggggctgcaggaatggcacctactcagagagggcggtcaggagagacctcttgggaatgatgacatccagcaggcaggtcattaaggcatctctaggcaggtccagagtgcaaggaggcataagccaggcaggtggaacagcgtgtgtgaaggcccagagtcaggaaatggtctgcttccttccaaggaaaagaaaacagccagtgtggttggagcaggggctaggagagaaaagatgtgcatgtgtgtgtgtgtttgtgtatccccatcatgatttagtactgtcagcgcttctgtgttctgaacctggagtacaggcagacacagccgcatcccagaagctcaagagtgcccataccaggaaattacagaaatctttgccaaatggatgaatgaatgcaacttccttgatacagggtcagagaggggaaatctgagaaaagcaggtgggcaatgtactcctgacatactcccttccgttgcaatggccttgagtgatggagcaagagtgaaggaatgttcccatggcactggcaccaggatgactttttgtgaagcagagcagttggtcttagatagtggaggtgcgggaggcatgagaactgggcagtctgacggctgcaccagccagttggctgtcctttccacctccatgcccaggagctggcccagggcgcgcatgcacaaagccagtgctcttttcaatcagaaaacagcctgcgtatgttcttgcttgcaactcagatatccagcccactgatccaggaagagattcctttgacctgggaagtcataatggcagatatttagacccagctctcaagcaagcctccaagttgttccggtgaacccgtaactttgagtaacctctgattgaaccagagagtaggaactaggtgcagaaccttgttgaatagaattgtttagcatcgtccatttgttagagcatttcaggatgcctgtcctaaaatttggtatcataatggtatttacctctcactcacctccatctcagcccagtaattaataacaagggacttgcttcttcacctgtttctttattggttgtaggaagtcttttccttaccacagaggaaggagcttctggatccctttgctacgtccagagagttttcatctaatctgggtgtattagtccattttcacactgctgataaagacatactcaagactgggcaatttacaaaagaaagaagtttattggactcacagtttcatgtgactggagaggcctcaaaatcatggcggaaagtgaaaggtacatctcacatggcagcagccaagagaagaagagcttgtgcagggaaacttccattttaaaaaccatcagatcttgtgagacatattaactaataacagcaagggaaaaacccaccccatgattcagttagctcccggcgggtccctcccacaacatgtgggaattataggagctacaagatgagatttgggtggggacacagagccaaaccatatcactgtgtaaaagttgaataaagttatttaggagcacattgtattgggagtttgtttgtttgttgaagagccaagtaaagtcattggaagcatgggaaacttttttccctgtctaaaaggaactccttcctagtggaagttgaaagctttcttggcagcctcagcccccaccctacctccaccaccccagtgggtacctgcatcctgaagacccttcacaatagcatctgaactatactgggccttcaaatgatgtcttgggtaaacccatgtccaacctgcactaaatgaagattattttcgagcgaatggattgaagaacagtgctgaaaaactagaatttgtaatattttcatttgagcagaggtgaaatttgaaatattttagaatcttgtcttatgattttttttctttctttgccacatagccctcccctggaaattaaatctgtggattactagtatatgaactgatcagagacatggcttggggtctccccatttacccacttcccagcacgttataatccactggacacctccaaggatgagagaccagcgggtcataatgcgagactggacatctctcctaccccatgtacacttcagctgagcaggcagaattagcagagtcaggactagaagttcagtctagggatcaaataataatagtagctaatgtttaaagagtacctaagatccgccaggagacatactcagtatagttccgtggtttgccacatttcatcttataccagtagcacaggtgaaatttgtcttatgtgtatactgaggaaaacaagtccctctgatacacagcagccaataaatgacaaagctgggatagaaacttacttcattctaacccgagagtccctgttcttgcatgggcacagcctgccatccccatgctctgcctcctaagcagaggatgaacttaagcatcttaaaattttaaacattgactttccctaaaaccaattaaaaaaaaaaacaaaacagacagacagacatgacttgtgcccttaaaaatgcagccaggctggcatataaatgggcgtaggctgtttctaaattttttgctttaaattttgccagcatagcttctggactggtagttttgtttgctttttaatatatttttgacactgtgtacagaggaatgctacctcgcgtcatcatgtcctcctccctgaaggcaagccaaggatgtcaaggggccacttcaggggatgtgcaccctgaaggtaaagctgctccagtgggaggggttggggtaaatgacaatgttagcagctggtaaatttttttacatgggatatctcacaagacttattgatgcatgttatacgtaataacctgaggcacatcaacattttccactttttcctattctttctgtattttcactgatactttttttcaaaaaaatctccaataagtttaggatcagcttcaagatttctctttaggtaaatagatttgtatttttgatggccatcctagtccagtgtaaagatatggacaagaaaccccacataaaggaagcaagatcgctggctgctttctctaggtagcttgagttgtatactaatttgtagattatttctcttcatcgaaaaaacaaaacattctgcagagggcagtcatgtgtccgctgtgcctctgctcctgtgtgcaccataaaacttgaaagtgagccagaatttgaaaatatcggattgggatgtgatttctttaagcctctggctaatttaatataaagtgtttacacttcatttttctggcagtggattttctatgtaggtggtggaagatttcctgtaagttttgcaagttccagggcaaagagagttgcaatatgcaatatctttctgtggtcacaccaacagaaagggcgatttcttaacctgctgcagttaccatgtgtgtaggtggatgctggctattacagatggtatcctttcaaccctcaaaattgttgcaagttcacaggtatgttaatgaaaatgaataagtggcatttttaggaattccaaatactgagtcttggaagtagataatcttttccctaaatgtatgctccggtcagaactgctgcctaccacacctcgtgggtgaaacagatatttcgagcatgactgagcttattaagagccctgcggcgcttcctctgccgggggtttagaaatttcaaaggatgggggttgagggagggaggagttatgggcatgtgatgtggacagggcgggcaggaggatggaagtaacaggtccaaaatgtatctttggtggcccggcagagctcttgcatggggtgagaatggtaatttaggaagagcaagtcttcccatctgtgaagcagaagaaaaaagtggacttaaggagaagttcgggtgctgtttatttagataggagtaaggagagtgcagttggggaaaagcacttcagaggctttacttagactagcagaagtctgtttggcagggtgggaagcaagtgcagttgggagaaaaacgttttcaataggcagtttcagaattggaaattggaggagggcagtccatttcaacatttccaacagtattaaagaaaatttgcgggttgtttgtcaaaaggggtcatatgctttaaagattgagagatcttttcggtgaagtaggggagctggggacatcgtgatgtgacaagagccgtgggctcagaggctggggacctgggtgtttaacccaactcttgtgagtggtgtggctttcatagctttggttctctggtcttcactttatctgccaagtgaagacatttgactggatgtcgtgatcttgagttgctttcagctccagaattcgaagaccccttccattgggcattcatctaatttcaaagatgctccctggctccagctctgcagtgaagcagaacaaactgatacagcctagcttgggggtggggagtcggccctccttttcccctcccttcccaggtcctctgggtgattgggggaaactgagaagccgttctcttctccagagcactccatttaacaagcattgcagagcctggctcgtgctgcagtgaacaaatgctgacttcagcctttaccctgggtttcaggtcacactgattgtttgcaaaacatgttctttttttgtcacttgccagtacttgttctctgtgagtaaaacacaaacacatcctcagggatgttgcacaccagtttgcagcctgcagcttctgccctctggcctgcccaggtcctcggctccgggacgaggatgctccgggatttcgggagacagcagttgttttgacatgaatctcaaagttcctacaaagcttatttctttgaagaaggccaaaaaaaaaatgaaacattttcagatctttgttttcagattattcaagtccagaatgttggataagatttttgaagaagagatttatgcttgagattccttttagtttctttctttcttttcttttcttttcttttttttttttttttaggtgacttggccagtttgggtttttacggtgttcagggaaagggttaagaagttaatttgggaagtacagtcatgtgttgtacaagttgctgtctactgatcccttcattgagcaagtaaacttcacacattctcgtgtctgcaaagcatgtggatgcatgggcagttatgtgtatgaactttttttttttttgagaatggctttagtgttcagaccaaggatggaatgaaagatcacgtgtgctttccactgtagagctgccctgcttgttttgattttatagttattctaagtgttaagttccttcatctttcaaagcaaattcctttgatccctgaaaatcagctaatgtttgggaggcaattaaaagatgaggctgtggggttggggtgaaggcttccccagcaggaagagaggagaagcccactggatctgggagcacggtgctaggactctctaagcgtgacctccttcagtttggcccagagtggtcagatagtttgccggggcataggatggatgacaggcctcatacgcatcacgtctgaagggaaagcccttgaattttccacgctactttttagtaacagtaggctttgtcataattggcttcatgttccagctttcctaaaactgtaagtgatgttgggtgggccagcagcaaaataattcactttacaatttgcatgatagtctggaatgaaccgaatacctaaaaccaggaaataatagtagatatttaatggtttggggatcaaataagaatttactcccagatgtttcctaattaattggaaaaagcagaaggttgctggaaggccatctccattgggcatttacaggtgaaattcactcttcaactaggattttactcatgggatgcctgtgttcttcatttgaacccaattttacctatcatctacaaaaaaagaaaactattaagagttaaaaaaaaaaaaagagagagagagtcttgaactttgaaatccttcatccacgttttataaagtgtggggtcagattttttccctagttgaaattgaggaaatgagagttgccaatatgattggatttgtactgccaagatggggttttagcacttctaatgcattctggcaaggctggtatacttgtatcaagtgcacagccccactaccaccacctctaccacccacaaaaataaaaactagcaaaataaaatatgagccaacagaattctgtgggaatggcaagtgttttgtttttgtttttagtagtaatctttgcgagaacattccaaagatgatagttttacatttgtatgtttttttccgaggcacttttgaatcatcagatagattaaatataagttccatgtatttttgaaggtgggagtgttctttggtacagttcccccaaaaaactggttctcatgaggcttatgtggtaattctgttaacgagaatgtatgattatctgggatactctgttctgctctccatcctggataagagtttactttgaaagtctagttgatcttttgtgatttctgcacaatgtaaaaggtactttaacttcaggagatagggccagcaatcagatttgatgatggaaaagagtagtgtagcatttaagcataatgtatactctataataaatgtttacaagtccaaaagtgtgccatcagaaagtaaccagatcaaaggagaggtgaccagagaagctggaaagataagaaataaacaagtttcaaggttactgatctgtagctgttgctgtccatgcttcttggcagctttaattatgacagggagagggacccagagggagagagagagactgacttacacataaaggcattttatcacaaagccatctaaaacaaaagtgttaaaggcacaatgctgtgtttaaaaagcatgtacttctttaagagctcaaatttaaatatataatacaaacttaagatccaaggaagaaaatggacccaggacacgaagagaagttaacgccacaggtaatgcagatggccaagagatgtgtgaaaaagataatccagcctcaccaacagccacagaattgaaatgagatacctgtttctgcttctggcattgggaaagaaagaaaaatggcactagcagccttttttttttttttttttttttttccccaaaaaatttgctactcttgaggttctgtcaaagaatgtgctgtggcctctagaagcatttttaaaaagagactttcacaagtgattgtgcaaaattgtgaggtcactgaataggtgtgtatcctcctaaggaggtagcgttggaggagctgttcttgttcaatttactcagcacctgtgaagaggcttcactgtgatttgcctgtacaggtgtgcaggtaaaaatctaagttccacaggtagtgcaaaaaaatctacctccctaggtacctcgtacatttatcacagtttcctggtaaacagttctgctgttgttgacaaaattttatcagaaacattgcatactcttctctaaatagtagtttccctacaagtggctgtcttcagtttagtcgtttaagttatgttgacataaatgattatgtgtgtggcaggggcttttgcgtaggttgttgaaacattgcaccttttggactaacagtttttaccaaaataggcagaagtgacatttgcagccacagctgtgtggcattgagcgtctaaggtatgtgtaataggcagtgtatcggtagcattgataccttggtcaacaccagtaagccatgtaattgcccagaagtgggctctaacactagttttaggagatgcagccaaaacgacaaagctggaggcctctccctctgagcttggcctccacttggtcaaaacagtccccagtttgtccctacgggacacaggcctgccttgttaggaaatcagcaacatttaggagcccacaatacctcacataactctgtgtacagtaacagagaatggaaatagggctgtaagcatgaacaaccagtcaagttacaaatatagaatactctctcaattccactttagttagtcatggagggacagtgtgagttttataaacttataaggaatatacaaacagttccaaatttaaaataacttgaagtaacttttaagtgtgtgaaaagaatatttttttccaccctgtccatttaagcatctgtgacaggcagtattaagtgatgggtgtctttacgtacacatgcctgttgctcacagtactggggaagagttgcaaaatagtcacccattctgcagtgatttctctcttcttatttgtgaaagactcaaaaaaaaaaaaaaaaaaaaaaaaaaaaccaacaacaaaaaaaaggccaggcacggtggctcagacctataatcccagcaccttgggaggccaagtcaggtggatcacaaggtcaggagagcgagaccatcctggctaacacggtgaaaccaaccccgtctctactaaaaatacaaaaaattagctgggcgtggtggtgggcgcctataatcccagctactcgggaagctgaggcaggagaattgcttgaacccgggaggtggaggttgcagtgagccgaaattgtgccattgcactctagcctgggcgccagagcaagactctgactcaaagaaaaaaaaaataggggggatgtgggttgtgagagcgacactgtgtgtccatgcgtgaagaaacccggctcatgatgacctcgccccagaacgccgaagcagggccggtccagcctggatttcacagtgttcttcattgcctttgtccttgattttttgtcgttaccattataacttatctctctttcccaaatgtataagtaggctttgaatatgagtttaaaagaaagaattcggggatgatttcagagtacactagaatattttttaaaagaatattttataaaaatacagtgatagtaaaagaagtagaaggccaaattccgcccccagccccttcttaatattggactttattcctttgcttttttcccttgctgccatctaaggaggctttctgtgctatagcatccagttcctctgccaggcatttctgtaaagatgaggcaccttccactgttttattctccatcattagagcacgtgtcctgctgactcggagcagaggggaggcacacgggggtgaacattccctgacagattggatgtctcttaactcttttttcctggtatcaaagaatggcacaatttagttgatttgatagcgttaccaaatcgtttttcctttagaatgaatctagaatgcagatagattctgaggtccagatgggcctctctccaccaacctgtgaccagtgtacctgtgattttatcactgcacattcatagaaaggttacagggctaatcttcccgtgatatgaatcatgaaagtcaaaatttatgaatgaaaataaaaaggaatgaagtactgatatatgccacaccagagataaatattgaaaacattacctatgctaagtaaaagaagccagtcacaaaagacactacctattgtctgattccattcatgtaaaatatccagaataggcaaatctatagcgacgaaaagtgtaatagtgattgcctgggaaaggggcgtgggaagcatggctaacgggtattgggtttttctttggggtgatgaaaatattgttaagattaattgtggtggtgtttgtacaactctctaaatatactaaaagctaccaaattgtacactctaaatgggtgagttatagggtatgtgaattagatctcaataaagctattgtaaaaaatgtgtgaaggaaggggaagcatcctataacctataccatcccaacagcccagctagaggacgattcctgagcctccttctcagcctttgtgttaattctttgcattgatgacttctctctctttacccttactaattagctctcaaaacctctatttaataatgatgctatttataactttcctccttctggtttcttgcttgccctttttgtggtgtttgcttgtttttcttttttctcaatactctgcccagcgttgcgtgttggttccggagacttaagtgatccagtgggcactgtcaggcaattatttcttttgctcattaattaagtgttcacagatacattcagcagccaaaccttgtggcatgccttctgtcccagacagtgagaatctacttggaacttggatatttctgtgagccttgattatatacaccaccaaggggatggcatagaactaagttttttcttcttctccacaacagactttgttctttaatttcacaagcttgacatagcctataagacatcatagtggtaccatagacagttttcccttgatgcccatgggggatttgttctgggacctcccacagataccaaaatccacaggtttatcagcaagggtcactgctcaattgcaacaactgaagcagaagctcctctcatcagaggcagttactgcagcatgttctgtagggcaaatataaccatatgtaagtgactgtgctatcaggagacagaacaacaagacccagaaagactcagtgacccacagagccagttccacccaaacaagtcttactaatgagattagataatgagagtgtattttcttcatcaattcatgtagctcagcaaggctggaaactgcttgcacacttctgcagagaaaaaaaaaagttccatttgctggaactcaataaataaagaaggccttagtgggtacgtgttatctccttagcatcacctggatgcctgacccttttccagagtgtcatgttgcctgggttttgtccttcagtctaagtgatacacctcttagtgtggcggagaaaagggtgctgtatttcttcctgatggatacatgcttaaatggaaaagtagcatgagatgaactcccatagccccttccttttattatttttaaaatattcattcatttatttatttatttttgagatggagtctcactctgtcacccaggctggagcgcagtggcgcgatctcagctcactgcaacctccgcctcccgggttcaagcaattctcctgcctcggcctcccgagtagctaggactacaggtgtgcccaccaccacacctagctaatttttgtatttttagtagagatcggctttcaccatgttgaccaggctggtcttgaactcttgacctcaggtgatccacccgtctcggccttccaaagtgctgggattacaggcgtgagccactgtgcctggccggcccttccttttagacaatagaaacatgctgcaaccacataccaccataaacacggtgggggaagaggctgcaatcaacagtcaggaggatctgggttccaagcccaggtttgcagtgtaacagctgtgtgctcttggtgtgaacatttggtcatgtacaaatgaggataatgatactgcccccttgtgatcattagggggattaaattaaatgcagaaatatatgtgagatgcttaatgtgttgtaaggcgcatggaatatatttagtgaatattaactgtatattaatacaaagtcctgtattcagaatctccagtataaattacatttatatagtagagatatgaatagtttttgtgaacaagaagacctggaacttcaggtgactagaagctcagagtgagccagctatgtttgatgatagttattcttaagatcacacagagaaacggcaagcaagctgctttgggcaaaaaagagcatttctacactgttcagactgcctctgtactgttagaataggtctagggcgtgttgcgtgagtggtgactgagtaagatgttcagagggaagccgtgaccgtcatcttggaatattgtttgaaagtctgacctgtacaaagcagcactcacttcccctgcgtgtcagacacctgcatgagggctggggagggtccagtacaggaaagcgcatttttaatatgtgtatggaggaagttcgtcaagatgggtgccatctggcagtggagtagcacttcctggaaagtaatgagctcccttggactttgtttgaagagtcacccaggtttttgtaaagaagtgtttcagatcagtatgcaatggatgactgtaaatttctcttcagatctaagaatctgtgattggatgaaagggagaaaggactgcataagtgcttgttgcttgtaaactgggccaggtggatgtcatggccctaggagcttcttgcctgcctttgcatgccataaagcagtcctgcaacccagtgtcacctcagagggatgggaatgtagaagaagagagtgaatagggacagtgatgaggggtgaaaatatgtaactccttgccccttctgtataccctagtacattaggaagttcacccttgtctaggcttcctgttaggaagacagcagactcaaaatggagtctcaacccctttcaaagactgcaagatctccttgtacacactggacttgggagaaaatgagagctttcaggcctgctatcttaacaggttcagaaaggtgtggtccagccccctgactaaccagccctgctgtgcacactgagaattctgctcaggtgtacctttctgtgtgctcctgggtgcacccccaaagtgctggttctcttgaaaacctttttatttaggttcagacagacaaactgtggtatcttccattctgaccataaagtgtttcttctgggtctaactactatagtgggatattttctctagaacaagaggttgtttctttttggcattgagaaatgttgccgatgtgattttcttttgtgaacgtttaagacacagcgcttgccacttgaactttcttttgccgtgcgtagctgattccacataatggctgcagctccaggcagaaacctgtttggaagttgttttaaactcttcctggaatctctaggcagtggctcagtggggtttttttccaaccattccttaggatgaccagaagcttgacagaatcctcttgtcttcattttgagaaaatatgtctttactgtgtgtatgtgcagcatttggttttacctcgtgggtctaagcattttcaactaagcttccttttccaacctagcagacttgtttaaagaacttcaaactaatagccaagctgtaatacggtggctctctcagcctgagaagcctgtgctcaccgtcactctcttcttccctggggtgatagggatggggagtagtgtgtgtgagaggacagaagcgaggattgattgaagattattttacgaggcgagagcatggtggcacacctgtcagctgagtggactcagcgcctgccccggctaggctgtcctcctcctgtgccagccgtgggttccctgagtccctctgcagtcattcatgggtgctgaaaataaagataccctttctgtcgaaagtgttcgccgggctgcctctgcctccctggaaaagcagcagggcacacaggcttcctaggcagcccctgagggaggggctctttttattgtcactctggttagtttgaagaccagacagaaggcagcaaaaaccaaccctttgttgaaaactctttgcctttaggcccttggtaccatgttcatgaggctccagataattccacaaatacattattattgttacctagacttggggacagagaagggtgaaacatgggtctgggaattcacagatgaatatactgtaatcccctcgagcacatttcttttaaaggaatgggggtattctaaaggagtgaacactccactggggggctgctaggcccctgtgaacggtggcagccttggccacggtgtgtgctgtgatctctcctgggtcccccgggcatcctcagacctcccccacacccaacccacagtcccttctccatccatctgctgaccacaccccaggatgtttccagctcagatcacgcctgattgcatccacacaaactgcacgccaggcatttccgtttggatgtgtacacaaaaacaacacgtcccagactgagctgatctttctgtacccctcaaaagaaaagttctgtacccggccaggcctggtggctcacacctgtaatcccagcactttgggaggccaaggcaggaggatcacgaggtcaggagattgagaccatcctgggtaacacggtgaaaccctgtctctgctaaaaatacaaaaaattagctgggcatggtggcgggcgcctgtagtcccagctacaggagaatggcaagaatccggaaggcaaagctggagcttgcagtgagctgagattgagccactgcactccagcctggtgacagagtgacactccgtctcaaaaaaaaaaaaaaaaaaaaagaaattctgtacccttccagatggtcctggacatatcttgaatctaccctgcttttcctcatctgcactgctgtcctcttgatctgggctactgaggctagaatgcacatctgatcatgtgcctcctgcttaaaatagtatttttcctcttaagagtagtccaaactcctattgctggattaaaaggctgttccaggctctccctacctcagggcacaccatctttcctcccagtctcccctcccctctgtctccagtgcttccatccttcagtcatgctgaggttgtctttgttacctttgcttctcttggcccgcactctctgttggctctgccagcatccctatgcacctgctagctcctactcacttgtccagctttggcctggaagtcccttcccctggcaggcagccctaagctaccctttgcttgctactggctcatattctcactgcttgtcctcaggctgtgagccctgggagggctgggctgagtccccgaacctgccacgtctatagggtgtaacctacctgaggcctgactgctaaaatcaaaagaagcctttctcatttgcttagctgagctaagtcctttctggagaagaatgcccacgtcctgggtggacttctgttcggcctggggcaggacgctgcatgtcagttcacctagagcccctcgcttgccctcacccctctccctttccttctcctccccgtgttgtctcatggtcagttcctctcctggcaaggcaagagaatcataaaatctctttggaccatgtgtctctctgatgcactttggaggttgaagctcactttcgtgaagttaggagcggttaatcctcctgcacgaggatgcatgcctgctagggaaagcctccctgcgtttatatggaacagtggtgtgtaccttagggcaacccagaaacagctgagatggccctaaactcttccgtattttgattcagaagctttaccttatttgaacatctgcagaataagttctttcctttagaaatgattggggataaaattgtttgcattatgaaatattgtatggccaggtggcccctctttcatgttttgttccttgtgaagaggttgagtctcctattttttttttttttttggagatagagttttgttcttgtccctcaggctggagtaaaatggtgcaatcttggctcactgcaacctccgcctcctgggttcaaacgattctcctgcctcagcctcccaagtagctgggatcacaggcacgtgccaccacacctggctaatttttgtatttttagtaagagatggggtttcgccatgttgggcaggctggtcttgaactcctgacctcagttgatctgcccgcctcggcctcccaaagtgctgggatcacaggcgtgagccaccacgcccagcctatggtatgcttttaaaaatggtttctctgcactaatgattatttaaaaaaaaaactctggcaagaacaaaaacaaatggttttttaaaaactctagaaataatttgatacattcgaggactctggagagggagagagttaaaggctgatgtgtgtgactctttttcctctccccccaaggaaaaaaaatgaagagaaggagcttttaagtgcagtgcctcgtttttatgtgattgcaaacctgaaccaatccttttagtggtggatgtgggacatgttagcttttccaacagtttagatgggcctttgtttttattgttggtcactgtaagaattccaaggaatagaaggatctcatgggcaaaatcagtttgcttttttctctgtatatttgttagtttatagcagcttctattttcctcctatttttaaaagctgaaatgcctttaatcgcactcagtgtgtttattcatggaagccagagaagagggtcccttcctttcccccatagcgccgtaattggaaatttggtagtactaggtgaaattctcagttttggcgctcgcatggaacagccatccatctgctggcgagacacactgcccggggcttttcaagaaatcccttaatggtcctgaacactaataatatttatatacattgagatgagacaaaatttacagcgggctctggggctggctccaggactctctaatcccacacttgctcacgttctcttgcttgcctcctagaatcctttcaggttgtgcttcagtgaggggagcatggtgtccgtctctgcagcaatgcttatttatgcagttcgtcctctaacaaacagagcaactttccttttgaccttcccctcttctccccatcacattccattgctgcccccgcatagagcatgtgcttatgcatagtttgcatcatttaacacgaaggaaccccttgatttgtgatccctttaagaagttgctctgtatataaagaaaatgatttttcctggttggttttactgaagttccttcagaaatagctcccaccaccgaaacacacctgacttccccagcctgtgtatcggttgtggcacggactgactgactggatggtataatttcactcactcctttgggaagtttcgggggactactgctcagatgtgtgggaaatgcggaatatatctacaggtactttgtcagtttttttttttcttttctttctcatcctggaaaatcccggcattgatatttaggtataactatttgcaagcaagtgcagagggacatttttctgttcttttcaacgttcttattactactgcattaatagctacttgatcttaatgtctattacacatcattttatataatgttttctttaaattgtcagggaaagggattctgcaagtagatgttggtccccccagttagtgtctgatgatgatggtaagattctcagagtttccttcctctaatgacaaagcatggtgatggtgatgtctgaagagcagcctcggtgctccaagatgggtgtatgcttaatactgctggcacacgcctgacgagcgggaatgtgagcgttgtttctgtaaccagttttactgaacctcacagatccattatacgacgtgaattttgtgggaataacataggctgggagtctgctctcttccagcctggtccctctcttctttcagccctaccctctctgatcatcatgtcccttgcactgcggccaggtaacctttctgatacgaaggtctgggcatgttgttcccttgcctaaaactttccatggtttcgtattatccacagttgggctaaaccctctgggacaggccttcagtgcctccccgggcagtggtccctggccttcttcagtaacacccaagcccttgcacccacagtgacctcgttgcttttacaagcatttacatgtgatgttctttattcctcccttgctcatctttccactttcaactccacaaaaccgtcctcggcacccagaagcccaggaaacaccaggcagctccactcactcccgtacttgctgtgtcgtccgttccctggggacaggattgtcgctgatcctgcgtgcatctgtctggcacacaggtgcagcacacattaaatagctgctaaatgaataaatgaagaatagatggaattatattctgttgtgaccagtttaaaaacatgaaattggaatacccaattgcagtgtttctttagatcttggaccttgaggtgacctctgtaatggatatatttgaaattattaactgtcttcaagtgggggtttgatgagagagagagagagagagtgtgtgtgtgtgtgtgtgtgtgtgtgtgtgtgtttacagaaaatatgctaggtttgtacattcaaatttgtgttatcctcttcaagaaagtcaccttggtagacagcatatatatcccaacattttaggaactcataaaatgcatacttttttggtgtgatcagagatgggtaactccttattacttgtgggttagattagtttttggaaatagcctggagtcattgagagccaatccttatcaacaaaatggcataaatggacaggaatgggtttcttcttcactttagagatagctctgaagacatgtctcagttgggattagttcagttgcatatatgaatagcagtcattgaaacaagataaaagtgtatgtctctcacatctaaagaagtctggagtaagcagtccagggttagcctagcggccccactctcataagggactaagttccttttatctcgcttcaccattcttgatgtttcgccttgtggtccaaggttggtacttgagctccaagcattactactgcattccagccagcaaggaggaggatggccatgccctctttgttctcaggagtcttccaggaagttccagtcacaacgtttgtttatatctcactggccagaacttaagtcatatggccacctctagctacaaggaaggctgggagatgtagtctgtaactggatggccatattatcaactaaaaattactgaaaatgacaagaagaataaataatggaaggcaacctgttgtttctgtcaaaggatgacttcaaaagagaaagttgcaaaagtatttcaagcttgacagtatcatgacagttttcttcagaggtgacgctattcatttgcatgtccaagttctgatatctgttttcaagttcacctatttgcagcgaaataggaactcttggaggcaactagtgggtgtgtaaaccggtacaaactttctagaggacagtttaacccaacaagatgaattctggaaattgatcctaatgaaatgttaagggtgctcatgaagattgctttgccgattgcaataataaaaagtaaagaaaatatcttataattggggacaggtgtaacttatgatacattccacaatggagtgtaatactgctgttaaatgtttgtggaattcacaatcttttatgccaaaagaaagctttcagaatggcttgtcttttttgtagatacttgtatttatatgtccatgcacatacataagaaaggaccagggaaggtctgcttgaagatattaataaaggggtcacttgtgggtaggtggacttacttgttctctatattctctttacttgtttgtgatctctggtttttttaatcatgtatttttattacaagaaaaaacaaattctagaatctccactcaatattgcatgtcagagtcaaaaagatacacatttaaataattttgtattgttttccaatttgaggataaagtaggaaatgtataatgcaaaccagatttcatattttgttgatttagacttaatttacaagtaaggctgacagcccacagagtgtgatcacgacagcattgttatggaaataaatgccagctcatgcatttgggatgtacaccatggatctgtggttattagatactgatttcactttagcacacgaagaggcttagcggaggtggcttctaatatcctatggttctgtgggctcggagatgctactcacccacttgtcagaggcattgaaaccagagcaactgcatcttgaataggagctaggtaaaatgaggccgaattcccagacagttaagacattctgagtcacaggatgaggttaaaggtcagcacaaaatacaggtcataaagaccttgctgatctagcagatgcagttaaagaagccggcgcaaacccaccaaaaccaagatggtaacgagagtgacctgtgatcgtcctcactgctgcactcccaccagcgccatgagtgtttacatgtcatagcaacatcaggaagttaccctatatggtctaaaatggagaggtatgaataatccaccccttgtttagcgtgtcataaaaatgggcaaccagcagccttccaggctgctctgtgtatggagtagccattcttctgttcctttactttcctaatcagcttgctttcagtttacagactcaccctgaattattcttgcgtaagatctaagaaccctctcttggggtctggatcaggactcctttcctgtaacacacctatgttcttggacttaagaatgaccctcagacatggtgacttctttgtcatctaacagctttggcttatttgaggtaaaacctttgatatctaaggcagcagaaatttccctgaagtcattttgaatggtatcatctttactatagtgtagtttaatcattttcaaagtaagcatttctgcacactaaggctttaaaagagttttcagtaaggaacatatttgaaatggaaagtgagcagagcacaatgccttttaaattactgataaaccatagagttcctgtagggcttccactggctgacccacgcctgaggcaaccctcaaatgtgggtattatccccctcattttacagatgggaagagagaggatcaagatcacagaagctaatggtttgtcccagaccaaacaaggagttcctaggagagactgaactttaaagatatcgactctctgcaggtctaagtggatgaaaggacagtggtgggggtgaggatttcgtagtgtgtttttgcattgtctcctcaatgagtgatctggtgctggtggtagcagtgaatgacccagaaggatgctggccaggcccagagaaggcggtgcctcccctgcccggtctcatctccgtctctcctctctctccacagtgtgcccaagcacgtgtgggaagcgggcgtgcaccgagaacaatgagtgctgccaccccgagtgcctgggcagctgcagcgcgcctgacaacgacacggcctgtgtagcttgccgccactactactatgccggtgtctgtgtgcctgcctgcccgcccaacacctacaggtttgagggctggcgctgtgtggaccgtgacttctgcgccaacatcctcagcgccgagagcagcgactccgaggggtttgtgatccacgacggcgagtgcatgcaggagtgcccctcgggcttcatccgcaacggcagccagaggtcagtcgcggccacacgtgtggtcactacccgccccacctcacccgccaccctagcacacaaaggtagactctgtcggttgtttcatccgggtgcagccctcaggaagttcactgaggtgggtcattttgagagggctggcttaccttaaatgtttggtgagattctaggaacaattggcatggcttaccgcccccctcaccagtttgttttatattttaagtgcatactgcctggccatttgaaattaagtacttgcttgctggtttcgatacccagagttcatagtctctctgggtacttgccaagctgccatctaagagacagggaactgtagttttggattttcctagtctgggtgctgctagccaggtgaggctttggaagtgcaaaagaaaagacatgctaagcccccaccaccatccttgagaccagcaagcggacctaaacatcttagtgcaagagctagcagcagctcagagtaggcagtagcttaaaataagggacatttttccatcagcacttccttcctctcatccccctctaccttgaccctccctcagtgctcatcatgtccttcattttccttcctgaactttgagacttcacttgggaagcaaagaagttccttatggccaggcatgtggctcacacctgtaatcccaatactttgggaggctgaggtgcttggatcacttgaggtcagagtttgagaccagcctggccaacgtgatgaaaccctgtctctactaaaaatacaaaaattagcacctgtagtcctagctactccgaggcaggagaattgcttgaacctgggaggcagaggttgcagtgagccaagatcacactacttcattccatcctgggagacagagtctcactctgtctccaaaaaaaaaaaaaaaaaagagaagttcgttataacaaatgccatatgcccttttgtacatgtcaactggacttctataaatttgtcattggtttatgcttttgaaaataagatgttagcattgtttaaaaatgtgataactataactttgaaagcaaaagaagattggagatttggggttgctgttccctttcctggagcagagtaaagaacttttaggggctcacgcctgtaatcccaacactttgggaggccaaggtgggcagatcccttgaggccatgggttcaagaccagcctgggcaacatgcaaaccccatctgtacaaaagattaaaaaaaaattagtttggcgtggtggcacacacctgtagtctcagctccttgggagttgcaagtgggaggatcacctgagcccttgaggtcaaggccgaaataagccaaaatcgcctcactgcactccagcacaggcaacagagaccctgtctcaaaaaaaagaacttttaggaaagttctgttttagtggactaaatgcctccttcatgattagcaccagggggcctgtctttctgagtctgtcaaaatctattctacaaatataaaaatatcgttagaaaagtaggtgttaattttaaatataatttttgctgcagcttatgaagtacattgaggaagtgtttataaaggggattctttttctagtgtattatttggagacgcagcttctactgtaggcttaccttcaaatcaaagataatacattcttttatagtattagatgtagagcaactttctccctcttataatctgtataaccattagcatactaacaacaagaagaaaattactctgaatactttaaaatgataaataggccaaggacttcaatgagctgtagaggatacatattacatccaaaatcagtctaccacattgtactcacattttgttggcagccttcgagtgtaaaagggcttttactggtgcacacctcgggcccaggggcagtgcctggaaccaagttgaggctcagacactattcagacgtcaccttcctccttggggtggggttaggggagtggtagcttgtccatgaactcagtgtgctatcgtctttgttttgtgaatacattttcttaatgacatttggaggccttcagtcgttctgcagccaccagagttgtggcaaagtgggaatgctgtccatttgacagtgttgtttcttccgctctagtgcactcttcagagaattgagccattatttcccctattcattcttacagtccgttaaaaactatacatctacctttttgtttaaaaataaaacaccataaagaataataaattcccttctctcagcctttgaggcttatttaacaattactttgaaatatttaattttttcatcttgtttataccttctctataccatagtggatttgaggaagcttaatctataaacatgttatcaaaacacttccttagaaaaacattttttaagtgcttgatgactcctagactttttaccaaagatgattggttccattttttttttcttttcttttctctttgatagactctggctgtgtcacccaggctggagtgcagtggcacaatcatagctcactgcagcctcaaactcctgggctcaagtgatcctcctgcctcagcctcccaaagtgctgggattacagatgtgagccactgtacccagcttcagatttttctatttgagtgaaagatggagagaaactaaacatacacttatggtacaacccagcagttgtaaccctggatatttatcacagagaaatgaaatttatgtcaacacaaaaatatgtacaccatcgtccatagcagctttatttgtaataaccccaaattggaaattactcagatgtcctatgatagatagttagttaaactgtgggacatccacaccatggaatattattactcagcaataaaaaggaacaaaccattgaagtacactacttggatggatctcaaggacattatgctctgtgaaaaagccaacctcaaaagatcacatactgtataattccatttatgcaacatcctcaaaatgacagattatagccaggcacggcggctcacgcctgtgatcccagcaatttgggaggctgaggtgggtggatcacctgaggtcaagagtttgagaccagcctggccaacatggtgaaaccgtgtctctactaaaattacaaagtttggccagtcacagtggctcatacctatctcagcaccttgggaggctgaggcaggcagattgcttgaggtcaggaggccaacatggtgaaaccccatctctactaaaaatacaaaaattagccgggcctggtgatgggtgcctgtatttccagctactcaggaggctgaggcaggagaatcacttgaacccaggaggtggaggttgcagtgagctgagatcatgccgctgcactgtagcctgggcgacagagtgagaccctgtctcaaaaaaaaaaaaaaagacagattgtagacatggaaaacagattagtggttgccaggtgttagggacattggggactaggttgggcagggcagtgagtatgaacaggtggcattagggagagcttggtggtgacggaacagttctgtatcttgattgtagttgtgattacacaaatctacacaagtgatcagtgacacagcaccacacacacacacacacacacacacacacacacacacacacacacagagttaatttccaggtttgatacttatatcatgtaagatgtagtaaacattggaggaagttggatgaaggctatgtgggatctctctgtaactttctcgtaaatctttgcagctttttgtgactctataattattttaaaataaaatttttttttttaaatggaaagtttatagggtatgtagataaattagaaacaacagaaggccaagtaaaaaagtgctgaaggaagcctctacccaggctggaaatgagaatgttgaatgcaatggtagaggaaggactctccccatctgtgggtgggtccagttcctgtaggacccttggggaagccatgacccccattctcccaaacacacaataggaaaataccagagaagttttgtttacctgttagcttttaaacaaaacagaaccctgcatctttgtcttagatacaaaataaccttcatgggtagggggaagggacattaataaaaagagctataatttacattgtttttcttgaatgtttttacttcacgaaatttgagagatgatttaagaacaataatgtacatataatggctccccagcttaccatcctattacacacacatcgcataagttcgtattatttgtcttgtttggaaatcagtccaactttctgacccttgttctatatataactatagatcccaaaggttcagctgctgggctagcattttgtctgctatttcctaaataatggtaggtaagcaggaaaagtgccagtcttacttgtccctgactcttggtggttcgtggcatgttcaggatagtatttgaaacaagagctcattacaaagtaatggaaaccccttgcttttattgtgtatgcagcaaaagcaacatttggatcaatttacaagtttctgcaaaacaccgtcaagaaataatttcggttgtgctttagcaagaaaataatggatctgtgctataccacatgccttttggtatccctcactgggctttgccaaaacactgactgcaggagctagactactgttaggcagagacactgcactccctttgctgtccctgccttctctcctagcgactcctccaggtacacaggccagggtcacagtatcagaaagcagctctgttttcctccagaaccccccaagcttcctttctgcagcactgtctctcccacatggaaccagctggctcaccagtcaacagcctatgacacacaaatgccttgaggatgcagcatgtattttgtctggaagcaagcaacacgctcttcctttgtaggctgtttctccttttgcttgcaatgtgagtggcttatcttgggtgggcttgggggtgagataccatgtgaccacatgaacacttcaaaacagttgctttttctaatgcatgctgtaataacaatgaaaagcatatccttatggtttttttaatgcaagaagacagactcaattatgtgtgtttttgattttttttttcttcttcaacagcatgtactgcatcccttgtgaaggtccttgcccgaaggtctgtgaggaagaaaagaaaacaaagaccattgattctgttacttctgctcagatgctccaaggatgcaccatcttcaagggcaatttgctcattaacatccgacgggggagtaagtattccatccccctggaaaaacggctagatctcatggttttcttttgttgatgcttttcatgctcccgtccctgagtcaccactaaaatatgggcttagataaacaacatggtgtgtaagcctcacgcatgacgtctcttctttgagtttccctgaaagataaagaacagattgaaaggcaatctgtcttttagccattggcacgtcatttattcctgtaaagagggtcatcgctcatctttttgttagtcacatcttgcataggagaggcaagccctgacacatacaaaccccagaagagaccattggatcagacgtgtgactcagcagactccagctgtagccaaatccacacatctttcaagtctaaagagttttggttacttgaatttactgagaagactgagcaaagggaagtttagtgatatcacgttaaaattttatgaagtccaaaagaatgctagatttccaaatttacttgtgagagacaaaaggatacaagtgtgtgtcattgtgtacataaagtttcggtctcacccctgtacaatgacctttatttgcaatagatggcattcctggtaagttgcttctgagttggatttgtgcaaaggatttcccactgacttagcctatgatctcttcacttctttggttttttgtgtgtttgttttttggttttgttttgagacagggtctcactgtatcacccaggctggagtgcaatggcataatcatagctcactgtaacctggaactcctagtctcaaacaatccttctgctcagcctcccacgttgctgggaccacaggcacacactaccatgtctggataattttaaaaatcttttcacttctgatttttcattgccaagggcttctagtaatggtgccttaaattctctgccactgggaccacttggtcaaggtactgatagttttataagctagaataaatatcgtaaaatggctttgaagttgaaaggaattttggggggggaatccttttatgaagaatttttttttttttttacagtttgagaggaaaaataatgtattttgagaatgtgttttccttaatatttgttaaatgagtagactgtattcttaaggtttagaaaggacagaaacaagtttgtgcttagttcttctgaattcgttgatatcccttgttgctgttcacaatacacccactcccagccctccgtgatggagataactctgttccccacaactagggcttgcccactctcatggtacttctgatgtttaattcttttggctgtgtctgcatttcctcatttacttttaatttgcttatccctagaacataccttttgagtgcctaaacttttttatcttcctgtcctgaagacaaaaatttaatctgtgaattaaacccatggagaagtatcatttatgaagggattggtacatattgatgcatgatgatgaaatgtgtcttctggtttatgtccattgcaggaaatagattggatttaggatgatgggacatctcattagaggggaaatttcctgatcttgactaaggcatgcttcctgccccacgtttaaaattcaggatctcttccttaaaacatcaactgcacgcaacctctcatctttccaacttgaacttccctttaatttttcttggaaagctattaaattaaattagatgtagggctttatcctttagtacccttattattttatttgtatcaactcaaagcaaaatagagcattttattaaatatgtcttcataaattacgcacagtaaaatcccattaattggaccacacccagttcattatagtgtttattataattttagcattagttgaactgaaaattggtttttgtttactatgagaaaaaggtagactaaacaagatgaaacctgttgtttgcatattatgtttgtacatctttattagcaactatttttccaactattttcaactatttttccaactattttctagttataaaagcaatacataaatactatagaaaatttagcaatgcagaaatgaatttttaaaaatccctcatagatagccattgttaacattttggtgtattttcttcaagtcttagtaaaatggaacctttaaatatagatccctgtatcttaggaattagaaaggcagcaaaggcagttcctaatgagatggagaaaatgttgatttagtcatgcccttgtactgtgggggccatactgtctgttgacagagcatattaaaagacgttccctacattcgtcagccttagctaattggcagtctggtatttatgattttatattttgttaatcagcttgggagctgcagtaccccccagcctcctagaaacttggcttcccctgcctgggaggcctcgttccaggagtcgttgttgagagtcaagccagggaagtgtgtttttgtcagggagcagccagtcctgtgctgggagcatctcagggggcacctgccgttgaattgttctcacttgtgtttgtaagaatccaagtatgtcacccttacaccaagtgagcacacagtgacacaatcccctttcaatgtagataacattgcttcagagctggagaacttcatggggctcatcgaggtggtgacgggctacgtgaagatccgccattctcatgccttggtctccttgtccttcctaaaaaaccttcgcctcatcctaggagaggagcagctagaagggtaagtgccccaaatttcatgagctgacgttctattacaaaataagcagcgtgcttatgaaactgtgttgctgaggtaagagccctccctgccttgttaaagagaagaaaggaggaagccgcagtattgcctgtgctgctcgagtaggtcttgggtggagtcatggttctccattcttaggaggttgctgtttggaaaacagagatgttatcacccttactggattttgcctcatcagtcaagggttgcgtgtctgactgtgaccagtgagacggcagacgggggtgcgcttagggcttttctgccaagaatgacagcagttggtctggagtgctcacctccctgtgaaatcattgttcgcgcgaccctcatctgcctcaggatgctgtactctactacgcacaactgctccatcttttaagatattggaagtgagagcacgggaggagcatgggcggttcgttttgttagaaagaaacccggattcacgagatggtttttattgattagtttacaggatttgcactattgatagagtttttgccttggcacaggcctgctttgtgataggggttttaaaataaccgtgggcttttcactggaggataaaagccggtgcttattgcatgcacaattgctttccagccgtcagcctgtgtgtacctttgcatatgtacttttctctttaaactctcccttttaaatacgactcttgccaggctttaagtgaatgcttcaaaataaaaggagttatcaattaaagagtgaattccttccaaagagaatttgggaaaataatttaggaaaagaagaggcgagaaggtcatgggaaaggttgtctttgctgatttatctgccccaactggataaagttactgcataagggtttctttacagcctccctgtttttctcagactaactcttggtcagtcttaaattcttaaaattccatcatctgatagagctaacgagagcgggcagctcttcattccatccttgaaaagcacagtgtcctccccactggggaacaccaatccttaaaaaacttctttctcattgcaaatcgaaggaggctgccgctgcacccagccccagactcctcagtcacttacctggcaagctgaggccctaccagtttaaggtgatgattattgtttcttgtattaaattttaaaatgaatttttctccgctttttttttttctaagtaggtttgtgtttctggaatctcgggtgtctgtgagcatttcttcttcagcagagcagtagctgtcaaattttcttgttgcttaatgatatacttttttgtttctagactaagcaaatgatagacatagaggtgaatgctgagaggagagtttaattaatttccattaggaattattatgtggttaccttttcatggagtgttaactaagtattgtgcacttaaatgtagttagaaattaaagcctgatttttatttgcaagaatatttatgatgtctttctcattatctgaaacttgcataaaacctgaagcatcagcaaaatctttttaaggttgcgtgctcaggtgtttgggaggctttccaggtaagcccgggcccctggcctgctcttaccattttagatgcaggggagggcaagtgggccttgggttttccctgctgctgctgctccccagtagtcctgcagctccaaggatgctggctccagcctttcattcctgcgtgcagcttctaagaggctctttcttgagcttgggctcttaagaatcttttacctcccgatgggaagttttctctcaccctgtcttcctggcccatgaccacaaaggtatagcccatcctcacgatgatgagctccccaagagctctgtttgcttcaggtgttgagaccgctagcaacacctcagctgttcatttctccttagactcagggacagagttaggtctggccccttcactagctgccctcacttctgcaagaagggaagagtcagagcgagaaagagaaggacaggatacgatagtcagataaacatcagcagtgcaaagcagaactcgcacagtgatacaagggaaagaaagaaatgtgccctaggcatggagaagagccagatacctgagaagatcagacaggcttctgacaagaggtggcatttgagatgggccttgaaggctttcgggaaaaacttgaggaaagcagaggattgaagtgaagaaaggcaattcaaggtagggtggcaggagcaaaggcaacgagttggggcatcctggggcctgttgggcaactaacactggagaggtgggtggtactagagttatgtaagatgttttgcacgcaggtataaagggttataatttaggaagaccatggaacgtattcaaggcttttgaatagaggagtgttagcagagctgtctgaaatttttatttcggtgtgcttttggtttaagccaagatagctttcatcccagtgtttctcaaactttgctacacattatggaatcattgggggtgggggcaggggtggagttgagaaatcctgatgtccaagttgcacccccaccccaattcaataggagcgtttggggttaggatccaggaatcagtgcttgtctaaagatccctaggctcttcagcaggcagcaaagattggaaaccactgctttatcccttcatttcttcccatgtgcatatcacaaagcactttgacggttttttttcctaaatattttcccctcacactgctgcctaatgttttagaggttcacccatgttgttaacacgtgtcacactattttcttgaacttttttttttttttttttttgagatggaatcttgctgtgtcgcccaggctggagtgtagtggcgctgtctcggctcactgcaccctctgcctcctgggttcaagcgattctcctgcctcagcctcctgaatagctgggattactggcacgcaccaccacgcccggcttatttttgcttttagtagagacggactttcaccgtgttgttcaggctggtctcaaactcctgaccttgtgatccgcccgcctcagcctcccaatgtgctgggattacaggcttgagccaccacgcccggccttcttgaacttcttttatagccagtgataacataaatgtttccatttggttcaataggatgaaagttctgttctgtagccttttgtttttgatggagaacagaacaattcaaggtacagagatccttcaactctgacaaccttggctttccaaaatgtcactgagatccccctcaaaaagtctcctgagccatccagaacagaaaattcaagcattttacatagagtagagctcttattcctcactcagagcctgttgacttttatatcgcactcggcgtgagctgattttgtaacccagttacaaaagccatagccatggtttcctcaaggacaccatagggtgtatttctagagtaatgaccttagacattaagaaaatcaagaccgctctgctgtttacaaaggaaacaggttttgtaatccacatgtacacaatttttataaaatagctaatttttaagctcttgagtaagagaatattttcactatctggaaaatccccttgtttggacaaccttgtttcctgatggcatcagataaataaggagttaaagtttcacattatttggtgctaccaaggattgttgccttgaaaagaagaaggaaaaagtagatggagggtggtgagttaaaagaattgaaattcgcggataggcatttctatgcttttgttcctaccactcgactgtgcaacacgcagtgctttgtaataccttcttggagctcaaaggtcaggctgaaacatggccgctttttcacatttccctgggacttttggaaaatatacaccaaccctgtgacctagcaattccgggatccacccaagagaaatgaaaacatgcccacacaagacttgtgtatgaatgctggtagcagtattactcataatagcctcccgggattcccccgacccccagcccaaaagaaagacccactggaaaccattcagatgttcatcagcagatgagtggatagaaagataaatggataaatgaaatgtggcacaaaggacaactgactactcaacaataaaaagacgtgaagtatgacacgtgttacaacatgggtgaacctctaaaacattaggctaagtgaaaagaaaaaatccagacacaaaagactacatattatatgactcattcgtatgtaatttgcagaaaaggcaaaactatagagacagaaagcagaccagggatggctgcaaggaagaggtggagattgaccaccaatgggaatgagggaactcttggatgatggaagtgttctggaactgagtagtggtgatggttggacagttgtgtaaatttacggaagctcatggaatgatgggtgaattttttttttttttttttttgagatggagtctcactctgtcacccaggctgcagtgcagtggcgctgtctcggatcactgcaagctccgcctccgggttcacaccattcccctgcctcagcctcccgagtagccgggactacaggcgctcaccaccacgcccgactaatttttttgtatttttagtagagacggggtttcaccatgttagccagtatggtctcgatcatctgacctcgtgatctgcctgcctcggcctctgaaagtgctgggattacaggtgtgagccaccgtgcctggcctgatgggtgaatatttgataggcaggttatacttcagaagtaaagctatttttaagaaacacctaaacaaagaggaaacattgtctgaatatctgtatggtgcctggttccacctagatagacatatccacccttgctgaacccctaaggttgatgtaaatattggatttgggggagagtggacatgatataaaccagcctgtttgcagatggattggtgggagcatctgcagaaaggcaaaaaaggccaaatactcttatcagttgcagatggctctgttgctgatgacagcctgtgtcctgggttctgatgccccctagagacagccgtgaagaggcaattttctcctcgaaggaaggaactggaatgattggttgtataattgcagaattgttttcagtatgtcagcaagcactgaaaatggggaaactgtcccttcctacctctgtaggctggagacctcgggttcagctccatttatcagggcacaggaccttcctgttctgagactttgttccaggggactttcacacttcagagaatagcacatgtcatcctgcacttttgtggggtgattaaaagctcacggtatccttttatgtttagcccatccaattcttccaactggcctcagccagaaaagcagggaaggcacccccagtttgcagctgagagactccagcctgggagagctgaataaatcttttgcccagaggggttcctcagtaaatgctggagatgaggctcagacctgacctttggattcccagatggagtgctctgaaccgtgtacctggggctgtcttcaccactcaaatatcgatagagataacatagagatgtcctcaggaagataaccaactgttcccatcctgtgtggtctacagattgggagatagggcctacccaagtgtagaaataaacattttttacaacatagagaaggctgagaaccaggataccaatatcaataaaatctggatatcatagagcacatggaagctaaagaaaaataagtaactggtcaggtgtggtggctcacacctgtaatcccagcactttggaagaccatggcaaggcattgcttgagcccaggagtttgagaccagccagggcaacatagtgagataccagctgttaaaaaaaaaaaagaaaagaaaaattaaccaagcatggtggggcatacctatggtcccagctacttgggaggctgaggtaggagggtagcttgagcctgggaagttgaggctgcagtgctctgtcattgcaccactgcaccccaacctggattacagagtgagaccctgtctcaaggggaaaaaaaaaaaaaaacctaatttttaaaagcattctttgaatgtaaaggcagtaagctaagaaacaattaggaaatcacatttactgaataatttacttaagtaatctttttcttcaggaaacaatgataactttagcgtatgcatattttaaagatgtgcagacaggtctctgccttttaccttctcttaattctcacctaatcatggaaggaatttagcggggagccttgccccaagctgtggctcgaaaaacaagcatggtattgacaggcagctcatgaatggcttgattattattttgacaagggttttatttttatttttctttagcttccacaggctccataatgcctgggttttattgatattggtatcctggctcccagcctcttcaatgattgtaaaaaatgtttgtgtttactgtaaaaagataatcttgcttttcaaagtgattagtcaaatacacagaatttcagtgtgcctgccattcatttgtcaaattcctggtttataattcatgcttcctcccgtgggggagaagaatgttttgttcagaaggtatttttggtgtggttccgttccctgctagtgaaattagtttatgaaaagaggcctggttctgggtgtagatggaagtttggcctgattaattggtccttaccggcagcccagaggtttcttcatcaacaaggagattttgtcctgtaactaactcaggtacctggaagcagcccgacatttgggggtgcatcgctgcagtctcctttggagctggagaaacctatgagcaagaatgggcttatgacacatccatttccactccatccctccttccgttgtatgactgcatggagcccctctgacctccagcagtgtcacctgcagcctggtagtgagaaacagcaggtatggatggggtctacccccagcaacagtagcgccagctgggccatatcctggcactgctccccaggaaacacaccttgtgttgcattgaccagatctgggatcatttggacaatgtcttatgctgcttttccaggatagctgtgtgttcaggagggagcccttactgaaaggaaagaactgttgacttacaagtttttgctaccggtttggtggtcactaatgtgtccagaggcctgaagatgggcgtgtgaggagcctgacttagcttcagaggctctgtctttcgactcacttgtgtgctcactgcacccctgtgctggcaggactccaacctccacccccagcacttgtgtggacagagagcccagtgctcaggaaagggttgggcttcaggcttgtgatgcagattccgtggtggctctgtgactccttctggtcgttcttaaagtagacagggagcttagatgtcacctgtgcattccccttgttgtcctacgagtgagtaaacagggctacagatagcactaagggatctgcgcatggctgtgcagctcattcatggcatttctggtcctgggtcccagtctctgaactccttcctggtctgacgtccctttgtgaatgttcaggaaaatgtcacagggctgcttggcagcattgtaaccataatttgtgctttactgtaaatgagaatcaggctgaggattgaccagctggttagaggtcctggtttgggtgtaaatgaagaccctcaccagatgcagagagatccccaatggacatagcctccagggcagacgaagccttaggggttctgttttgtcctggctacgctggctctgcagggagggctggggttctttctcctttgtgtgtttatacattagatctgtgagtggatcttagaagtcactcaaagtactgcactgattcccaaacttagtaagaagcagagcaggaagaggagaagaaggattcacggtccatggggatcaggcccatcagcacagaggactcagaagtcaaccctggcattgtctgctgccttcctggggaagccagagagaaaggcccactgcggggatctttctctagacctaagccgtagctgtctgctttcttgcctctccagggatggacttgtcctgccacctgggtagccagatagaacggcttcctgtgctggttggatctgctactcgtgtgcacaccctctggggcagaagccacgtctggtttggtgggctttggtcctccaccacctcactggaactcagcctctcctagattgctggttctccacgtgtggtccagggaccacagcaggggtcagcaccacctgggatttgtgataaatgcagattctttgcccaccccagctgaatcagaagctctgggggtggggcccagccctttgcaaacaagctttgtgcacactgaacttggagaaccactgtgttggactccgagtcctcttgcctggatgagaggcccaagagcactgcatgttagtggctcttcctcctcccccacacctccagggactggagctggggctgctcagaatgaaagatgaatgggggagggagaaggcccagggttgaccccccacaagcttgtctccctgtctcatgctgtctcctatcccatcatgctgctgattgggcaggatttacttccatggataatgggagactttagagcaaagtgtacgctgttccgattgggtagcagagcatgtctgttctctcatggactgctttcaagcacgttgtacatacttggctgagaaaaataaccaaaggcatttcttgggaatgattctagtaacatcctctggtacaagaagcattatttgatggtaatagtggtcatagaattaattagcatcttaccgattttgatatgttatccttgaatcatgttgctgccattgttaacagcaactgtctgttctcctatagtgttaataactaaatctcttattggcaaaggaaatgtattgtggagcaggtggcaaagaggacctgtgttacgtggccagcaggctagaggggactgtggccaagggcaggtgcgctaacatcgatttctgtgcttctaggaattactccttctacgtcctcgacaaccagaacttgcagcaactgtgggactgggaccaccgcaacctgaccatcaaagcagggaaaatgtactttgctttcaatcccaaattatgtgtttccgaaatttaccgcatggaggaagtgacggggactaaagggcgccaaagcaaaggggacataaacaccaggaacaacggggagagagcctcctgtgagtgacagcatccaaaacaccgtgggcccaaccatcatgataacagcagaccctcctcccatgtgtgatggcagctttcctctgcggcccctcctggtttcacatgggggaccactagaccatcttaactagcactttgctcctacttatatgtcatcacaatcagtagtgggcagatacgtgatgtattcgtatttataaattctgtacatctctgtgagtgtgtgaaacacttataagtaggttctcaaactttaaagtgctgcttacagaatgcacagttaaatgtccttttatacacaggtgcacagttagatatttctctttcttttttcttttcttttttttctttttttttcttttttcttttttttttttttttttgagatggagtctcactctgtcacccaggctggggtgcagtggcatgatcttggctcactgtaacctccacctcggttcaagcggttctcatgcctcagcctcccgagcagctgagattacagacacctgccaccatgcccagctaatttttggatttttagtagagacgggatttcatcatgttggccaggctggcctcaaactcctgacctcaaatgatccacgtgcctcagcctcccaaagtgctgggattacaggcttgagccaccatgccctgtccgattatttttcagggaagagccagtgtgctccagccctatgagctctacccttctgctcccacagaagggaagcacaggcctgtggggtggagggggctctgccctaagcgcagcccctgtgggccacgggtttcctgtcccttacactcggctgccttgtttctcccaccccaacatgaaaaagatggagtgagcctgcagccctgagttgatattgctttttaaattgagaacaatataattacagccttgtactggttataaaactttaaggtctcatatcagagatacagcagtgcctttctcatctaaccctgtgtagaatacggctgttgagaatggcgtggctctctggctggatagggttataaaagtaaatcgtcttttcacctttggcttttaataagggaagggtattagaaaaaaagtaatttgtatgatgaagggtgatttgtgcgtgtgtgcagacagacacacatgcagggaggcaaatcagaaccgatgcgtgtttggctttggcttgtttcgctggtgtctggatttacctggcgacacttgttgctctgggggatcttagagggaagcacgctgactgacctagggctgaacagcaggctgacgaccagcgccgcctcccgccccctgctcactctatccctgcaaagcccctgccttgctccctgttcagatcatagtaaaatcggatgtatccgagtatttcagagtgcttgtctccttagagtcagccagtctgacctgtcagatcataatacgtagtagccgtttattttcttttgaaagcaaaatcatggtttcctctctaaataacacttcagcaggaactgtgacatttcccaatctcagttgcgcacattttgtcctaaagacttcttagctcttttactgtcttcagtccctctgcttcacctcttgagtgtgtagtgggattcaggcagataagagggcgaaaggacaattcgtcagagagctctgggtctccatgagggtgggcagtcatcagtctttccctggtccttatcgtagtttgaatttggtccaaggaataagagagacacttggcacagcttccctgccatacccgccagccaggctacttcccatagagcacgttaggcttggccaagtgagatcttcttgtcagtgcttaatccagcctcccgttgtttgtcagccctagctggaggcctcacaggagttcctgtgtccttccagtttgatacgaagtttagaccaagaaaagttcctttctgtggcacacctgtagtctcttacctgtctttggtggttgtacacgaacaggcagatatccacaactgcagaacaagtgtcatcgtctctcttaagaagtttcagggcagcctaaaggctcaccttcaccctaccaggccccctttcatagccaggatcttagggatggagaagaaagataagttcgcctcgttcactgaagtcgccccttgttttcaggttaggaaacccaggttcatgtccaagtccctgggcaagtagccagcgtaactgattgacctaaaacaaaggatggagcccttggggctctgcatagtgaaatgtatgatttcttagtggaaaacgagaaagccactgaggaagcccagaagggaacttagcatatacagccagctttggggaagggggaagcagtgccaagcaagacaggtgcttttcagagacacatgaatctctgtcactcacggatgtactctttgccccaggtgaaagtgacgtcctgcatttcacctccaccaccacgtcgaagaatcgcatcatcataacctggcaccggtaccggccccctgactacagggatctcatcagcttcaccgtttactacaaggaagcgtgagtttctgctttgggtgatgccattctgttgacagggctacgaatgggagaggccagtctttcgatccttgaatgggctggctgaatacagggggtcagcagagtccccagggagagccacgccaaacatccctacttcatcctcatgcaccctctcgggctgtccctgtgatgtcagtcacagccagtgacagccatgattgggaaagtgttagctcgaggcctgtcattctttagtgagtgattagagatgtttgaataaaataaacccaaaatggggaaagcttgctttttccagaattaggtcagtccagactcatgaacgatgatgggggacttcactgaaatatcgtttcagcctccttacctactaggcctactccaggaacaccctgcaggcacgtggctcttttgtatcatcttattcctgtctctctctctgtgtgcctctcccaagctgtggccctctgctctaggtcatgagccttccaaacaagcgaagaaaagtggagagagaacaaccttcatgtcttgagccttttgtgacttctcctagactctgttgggagcttttcctgtgtgatcacatgacattcacccatctaagcagccgaggcttattcctcccgactgcagccctctttgatctccctcttccttcctttgccttctatatccaggtggctaccccggtctacttagccatcccccttacccaggtcccatgttaatcccatagttctctctcccagatgtgtggcttccaaagagcagcaaccagaggcaccttatgacagcatcttgtactctttcctcctgccagagctggggtcctatgaatgagaaattgggtacttaggattactaggctttcagagtttgtacacaggggagcccctcatgatctcccatcccatgacagcagacggtgttttgttcatgtttgtttcagaagccagcggccagcagctgtccagcccttttagctgataaatataaaatacctacccaaccatgcatctgtgcgaagtactatattctctgatagtcacaccagtgctttggcaatgtcagctggtaatttcactgaggacttgatgctggtttctaaggcaatctggaaactaaatatttgaatattataagatgcttaagcatcagaattgtttatgagcaatctgaattttagaagctacttctgtttgtctgtaggaaagtcatttttctccaacagttaccttctttcaatatctgatatttgcattaactgactatgcttgtttttttcttgatgaaaaaatgctgcaatcagaagagagaaaaatagtttttgcatatgttcttaaggaatagtaactattgaatcccagtaactgttgaagtggctcttcctgaggcagaccattcaattctgtaatgcccgactggggaagcccagagtccagtcacttcatttcttcttctataaaagtctaattgattatttgtttatttagacctcccattatagaaagtgtgacatgctgggcctctggggaagatttttgagggttttgatgtcagagccccgaactttctctgaacttaattgtctttcagaccctttaagaatgtcacagagtatgatgggcaggatgcctgcggctccaacagctggaacatggtggacgtggacctcccgcccaacaaggacgtggagcccggcatcttactacatgggctgaagccctggactcagtacgccgtttacgtcaaggctgtgaccctcaccatggtggagaacgaccatatccgtggggccaagagtgagatcttgtacattcgcaccaatgcttcaggtatccatgcctagacaagcccccagcatccacacttcttcacaagctcactggccttgcttgtaccaggtgtcattgtagggttagcagtgagctatgcctgttgtctttcttgtcaataggtaatactgtgtcatattcatttccccactgctaacacattaggctcttctgtgccattttctggcctcggtactatcttccatcatctcctgctttgtgcctgtgagcccaggtcctccagggtgctgggctggtttcattggaaggcccagcctggaaacagccgtcttcagctgcccttgtttcttgtttgttttgatgttcaatcctccaggaactgaaaccatgctgatctgtgttccacttaattcatgtagctcactggttttccatcttcattctggagcttatagagttccaaagaggtcaacaaaagttgaaagcctgcagatgtagtatgttgtggatattcagagtattcactgatgatgaggttcctccttcctttatctttaggttctaaaccatctcatttctcaactccagatctggaaacagtaaaagcaaacgttaatagtttccagtatataaaaactagtttagaagtaggaaaatccacttcagttttaaagacactgattgttttagtgtattggagcttctatcacaaaaaaacagtgtagcctgggtggcttataagcaatagaaatgtatttctcacagttccagaagccacaaagtgcaagatcaaggcgctggcagatttggtgtctggtgagggcccactccctggctcatagatggctgtcttttcattgtgtccttgcatggtggcagggatgcgggagcactctccggggcctctcatagaagggcctggattccattcatgagggcttcactcccatgacccaatcacctcccaaaggccatgcctcctaattccatccccttaggggttaggattttgacatgtgagttttggtaggggacacagacattcactctatagcactgataaacattctttgataatagccattattttagtgggtaaggtgtttttaaatacccataagcgagcacaaaatcagtttaaatggcagagaggagggtgagaagaaaatgctggtggggaaaaccttttgctgtgcacgcctgctccttcctccactcctaccccatctccatgaccctgtaagtggccacagtcatgtcactgggtaaagtgcttattgaaacaaaattggcacaggcttctgatcctgcgtgtgggttggtgtagcagaggttcagtgcaacagaagaagtttttcatcttaaaatttggaagtaacccctggccagcaattcactgtagtgtttgggaaacataggaatatctgcttattgtgacagattctcaagaaacctgtttcctttccgcaaagatggaaaccaggcactgtaccaatgagtcagttcactacgttttgtcctctgtccttacacgcagcggagacagacgagaacttggtcctctgcctctgctgtttggtgacacctatcgtaagaatgtatctaggaatgagctgtttgtttttgaagtacttatttttggaaaccctaaagtggctgagcatcaagtggttgtgttttctctgaaaacgccagtattagtcataacctttttccaaagtatcatcccttaaagatgttcagaaccttgtgtgtatcgtataacctggagcaccctcaagctgtccgcccttttcaagttttaaaaatggcttaggcaaacatattgcttaagtgatatccagtgaaggtgtctcctgtgctttgaaaaaccatcaacattgatgcttttttgtgacccaataaggacaagatttcagtggttctgggatgcatttgatctttatgcacacttcagctctgggtttcagttcaggggtcagcataagtaaagcttgatcagataactatgctttgcctataatcggcattcattctgctggtgacagagtcctttgctcaaaatgaggcttccatgcgtttgcagttctaaactgcttttcagagtcatgcctcagtcattgtactgaaggatgcctgtggaaatggtggacttccgtgttctttgcattgcctctcccccatccctcttacacacagctgtgacatgggcatgcacactccttcacacacacagactctccagccccctttccacttcctctttccatttggcttcatgacatttttatcagagattcaaaatctcagatgaaatccaagtcagcctgttttaccagttgtcgaaattgccggagtgcagcactgtggagaatggcagttgtaataaatgagaaataccaggtgtttgaattagctgtagattttcacattgtctcttctaaccctgcttgtgcccccgcagcctttttccatttacaactcagtaatgtttgttttcacagagattaccggaggaaatagattataaagggaaatgttggcatttatagtagtactatttcaaaataaggttcacttttcactttgtatttcattgttcattgttattttcttatccaggtcaaactggcagtttcctgttggcttgccagagtatctgatagcctgactcttaagttcatttcattttctagaatgttctttgttcccctctccagttccttccattcccttggacgttctttcagcatcgaactcctcttctcagttaatcgtgaagtggaaccctccctctctgcccaacggcaacctgagttactacattgtgcgctggcagcggcagcctcaggacggctacctttaccggcacaattactgctccaaaggtaagggtgcagcagcggcctggacggagggtgtgaccgttcattcctgtggttgtaatgtgcctgagccctaatattacacgtatcagacaacagtgtagttctccattggaaaccagctatcttctggttttttttttttttttttgagacagagtctcactctgttgcccaggctggagtgcagtggcacgatcatggctcactgcaatttctgcctcccaggttcaagcatttctcattccccagcattccgagtagctgggattacaggcatgcactaccatgcccagctaatttttgtatttttagtagagacggggtttcaccatgttgcccaggctggtctgaaactcctaacctcaggtgatttgcccgcctcggcctcccaaagtgctgggattatagccttgagccaccacatctggccgagaccagctatcttcttgattaaaggtactgagagctattatttttccttacaagcatgtataacggctttcattcccactcttgttttggcttttcttttccgagaagacaaaatccccatcaggaagtatgccgacggcaccatcgacattgaggaggtcacagagaaccccaagactgaggtgtgtggtggggagaaagggccttgctgcgcctgccccaaaactgaagccgagaagcaggccgagaaggaggaggctgaataccgcaaagtctttgagaatttcctgcacaactccatcttcgtgcccaggtacccagctcatgtgaaatttcagttggcaaaacccactgctcaggccggttctgttgcctttctccccaccaggtagtgtgtaagtcagcagctggggggtacaatacagtagccactgagacggagccgaaaaagatgacaggttcggtgaagtgagtccctgcggaagccagtcagccctgaagggaacagggaccagggcttgggttgctggggccaccggtgtgacaggtactgctgtctcagccacaaccccccacagagagcaggtgggcaccctgtggtagaggcagggaggggaaactcaaagagtattgacagctgctgcctggtgagaggaaaggccaggatttgggtccatctctgcccttcctaattatctttactgcctctctcagcctcacagaggaggagtgaagcaagagggaaaaaagtcagagtctgtgctggaaagggcctgacttcaaaacatagccaggtgccacaggcatcctgtacaagtaagtttgggaagcagtgtagggcgacagcctgcattggctgtttattccgtggttactctgtctttcaaagcaacacagcccctgccccagggactctgctcctctgctgtggtcttggtttctggggagtggggacaaaagcagaggaaagtaaacgttcatagcaggactgttcatagtagccaaatctggaaacccagtgtacatcaacaggtgagtggctcaataaaatgggctcgaaccttacagtagaatattattcagccataaaaagggaggaaattttgatccatgtcacaacacagatgaaccttgaagacaccatgccaagtgaaacaaggccagacacaaaaggacagatagtgtatgattttatgttgtgtgaaatatatggaatgggcaaatgtatggtgacagaaagtagatttgaatttaccaggggatggggatagagtgtggaggggaatgggaattattccataatcgataggttttctatttggagtgatgaaaatttttggaaatagataatgatgatagctgtaccattctgtgaatgcaattaatgccactgaattgtacccttaaaatgattaaaatggcaactttttatcttacatatattttgttttgttttaaaattttattttaacacaataaaaaatgttaaacaatttttttttcctttcaaaaaaggattagcccagtagtgtgtgggaaaggagatggaagcacagtggtgctccctggccccctcttcctgtaagattatagtgcagattttggaaacgacctcatgcctgaaaactaggccaaggagttggatttaaatcagcatggcacccatgagctgcccatccgcagtccccacagcacccgctgccagcaccccacccagcacgttcccttcccctcactgcccccgaccctgagaggagcctgtagcggctatttattccacagtgactctgctcttacaggctttcttaggctgtaacaacaaatggtttttaaagtgattttttttttctgccaagtgacctttttgatatttgcaaaatggttgaaatagctatctcacttcgagaaatcagtaaagtgggaaataaagactggttagaactggaggcattatttccttttgagagtgcgcctcttcattgcttggtggcttttttctcctcccctcctctctcgaagttcaaaccaccagagcagccaggcgcggtggctcacgcctgtaatcccagcactttgggaggctgaggtgggtggatcacaagatcaggcgttcgagaccagccgggcatcatggtgaaaccctgtctctactaaagatacaaaaaattagccaagcgtggtggtgcacacctgtaatcccagctacttgggaagctgaggcaggataatcgcttgaacccgggaggtggaggttgcagtgagctgagatcgcaccgttgcactccagcctggacaacagaacgagactccatctcaagaaaaaaaaaacaccagagctgtgagaagggcctgcgaggccctcatggcctctcctagcctgccccgctgggggagtcttctgcctgctggtgtgtggcagggctttgaatgtgaaccttgaggttcagtgcccaaggccattttcttatccaggatatctttgtatcactggtggttcctagaaagcagaaagtttgaggactagaaagattgcaaagaggtttggaaactggaactcaatgaggtttggtgacttctctgacatcctaattaattaagaatccgtttgggacctggtcctcattcccacacaccgactcttttccccctcttctcctccattgcgttgcttctcgtggtcctttccacctagaccagcagaggcttagctcgtggcagctcctgctgcccgccacacggaaggatggatttagagtgtcccaaagcaggctgggcgggaagtttgtttttctctatcatgggcccttggttacgttgctgtcttgttccaccaaccagcaggaggttcgggttgtgagtcaaggttttggaaagattttgctgaaaggccccttgctttcagttgtagttacgaggcaagacctgtttttttctcatcagatgtggagcacaaggtgaagtgacgtgaaggcagagctgtgattgacatgttattaatgcacagcattggtggtgttgggttcaaaacaagtttcctgtgttctactggagaagtgtgtttatctgtcccccgagtccttcctttctctctcctaagacaagtccaacttgtgattctctgttttcatggatgtatatgaagacaatattttgtccgtggtgagaggccataatttttaagaagttaatatttgtttttttgcctcctactgagttctggcagagtccaggtgaaggagtgtccagcagagagaatgactgaatcacagaggctggctttctgttttacacgtggattgtccgaaaatggatttgatttctttcagttcattctgagaacaatgtatttgtgggataaaaccagttaagtaagatttagttccttataaattgtccagaatatcctgtatgttttgaagtacagtggaagctagagtttgtaaaacttactagtttctgaagtcaatattcgcagtaaatgcctttctttgactactgtctttattttgtaaatcacatagtttggtttaactagctaaaatgttgacagatgttggaaagtaaaaggttttccaatagggctaggttgtattatgggatggagtggggaaagttggcagtaatgtttgcttttgggcgtacgatttggaaatgtagttgtttaccaaaaaaaatgatgtatgggccattgtgcttcccctgttcctgccttccagataatgttctgtgtcacctccctccccttgtcactgccttgatgtcatcagcattgagagctgtgcagtccctaaaagtgtgatgttgataaacaagtaaactactgagtatacttcatgaagtaatcccagttaaatgggggtgggctgagccgggagaggggttttgacagaattattttgcggtacatcaaacctaagcaacttctgacagacacaagtgtatgttgtgttggttttgaaggtaggcaggaaatttgttgatgatgtgttgacaaagatttccctgacagtaaatgtggtttcttgtgtttttcccttccgggaagcttggttagctagttggttggtttgcagagtgtgaggattgtggatgatcagcctcatgtccttacccttcctcccccagtattgtgaaagcaaatgtacacgccctgaccttgtggttttctgcttgttggaacgagcatatctgtgttgggcagttcatgccttcggtaggacccccgtgtgccactacacaaagaaggaccgtgttttcctcaggggaatccatgggctgagaagactggggagcctcagaggccctttcccaaagccctctgctctccccttccaggttctgacctaaggaccagccagaagcctgccgagcgtcagccgaacctgcaagtggcttctgggctgttccgttccctgcgtgagctttccctctctgctgctgctgccgcgctctcccctccatggcactgatgagcttcccacattctggactttctcatttccctgggcagatagaattcatcccatttgccccctgccttttgcctattcctaagaccggtgaccccagccgaaggcctcagccctgttttctcaccattcgtccatggctgacctgagggttgccctttctccatctgggtgctcctctcgtattctgtttgtttttgttggttcctgtaaacattagaattctgttttaaggtttctagggggagccacaaagcccatttcttcatatttgaccaaagcagcaattagagggtcgcaccctcatgcctcatctgccctttttggtgagaatgtcctttttgtgatgactttatgcactcccttttgcttttcggttgttccaagccccattcaaatccatgacaaggactctgctctctgatgggcaggaccttgatgaggccacaggtgctcactgctgagtgggaggaagcctgggtgggctccagggacctgcagagtgtagcaagcacagacgcttggggttgggggtgggctcgcagcaggagcccccaagaagagagagccctggggtccgtggaactgcttgctgctagactccaggcatctttatttccacagtcagagcaaatccaaggagccaccaccacaggctttcatatccctctgccccaggtctctggggcctctgccacacacctcacctctcccctcctgccctaataaatcttaaccacagctgataggtttgccacctttaaggcttaaccataaggtctgtgaccagatggcctgagtgttctgatgacacagccaggactgcctggccaagagtggcagagacactatttgcctctaggtaaaatcgaagaaccactctgagagccggggggtgggggtgagagtttgtgtgcccattctgacacttgcagagtagagaaagcaagataatgaggaaggacatccctgtgttattcatgagttcttacctaagggggctcaatagctccttctattccatggttaagattcttctgttactcttactcaagtcatagaaaagacaaaagaggtaaaagtacttaaaagccacatttctctcctccttgcagacctgaaaggaagcggagagatgtcatgcaagtggccaacaccaccatgtccagccgaagcaggaacaccacggccgcagacacctacaacatcaccgacccggaagagctggagacagagtaccctttctttgagagcagagtggataacaaggagagaactgtcatttctaaccttcggcctttcacattgtaccgcatcgatatccacagctgcaaccacgaggctgagaagctgggctgcagcgcctccaacttcgtctttgcaaggactatgcccgcaggtatggtatgatccagctggccccattgccaccttcctcacaacctagtggagaagatgtgttttatggacacagggtctgacacccagggccatgacccttagacccaggcctgcctgctaaataacgtgcagtcattggcaggtggcgtgtagaccagctgcccagggaacagagcccacgctctcctagtgacaccactcccagcttggtctctccatagaacgtgctgggagcagggagctgtctgcagggtccaccctccacctgctacttggtgcacatcgtgcattcctgctgtcctttgccccctcttgcgcacaaatcgggttgccccctcctgagctctcacatgtccagagatgtctccagttagttgccttgatccagagtaaacattgcccctcaagatcaactcctggagtagcctctggtcttgcttatttagtctttggctttcccttgttgttagacactgcctgtcactcgggcattcatccatctttgaaggtgggtgccttcaaagacagaacaagagctgccctgtcctttagtaggcctcaggtggtagaaagagcacggaggtgaccagagtctggggtgtggggtcctcctgggtgcagttctggcactgaagtccattgtagcgtgccttgaggcagtcgtcaggctccctgcctcagtttccttagccctcctgggagagacatagccagctaacccctcaagtgccttttccggctgtaactttccatgacctttgcttatcacaactttgtttactgcttcaagaagcaaaagcaagaaaggaaccactgcaaggtcagccagccgctggaggagttggtgccggcagggagggcttgccctgctcttagcaccagcctcctagcagcttcctcacaggccgggctcggggccatccttcgtgcctgcataaaaattgcagttgccgcgtgtagacgcgggccacggagggtccctgtcacagccggcaggccccgtgtcctgcttctgcttactcagcatctttccagggctgcttgtgtttgatggcttcacaaagctttcttttttcaagtggtaggcacagggtagaagaaagttacttaggttgccaagattttcctgctgtgcttggcagcaggctttttttgttgagggactggggagaaaggaggatcttgtggcatcttgagacgtgcaagttttgtggttggtgtattctgaaccctccgctgtgtgagcagcccgctcaggggcagtgtacgtggctgatctccactgtcctgcccgcgtggatgggggggttattctcagtgtacgtggctgatctccactgtcctgcccgtgtggatgggggggttattctcaggtcagcccagtgttggcctccctccctgggaacccaaatccaactttgtcacctgtttaaattgtacagaaggagcagatgacattcctgggccagtgacctgggagccaaggcctgaaaactccatctttttaaagtggccggaacctgagaatcccaatggattgattctaatgtatgaaataaaatacggatcacaagttgaggtaggactggggcagtggcccgtgcctgcatgtacttccatccattgacagcatatgctacctgactgcacaggttacctcctggttagcataggacttaaaacaataaaatccatgccaagttggtgaggatttgggtctttctacccactctgtactctccaaggagtactgcatagtgtgcaaagagctaggctgctttttgccctcaagaaacgatttcattgtgtaagataaccttgtggcataggccaggtcagttctaataacttttaatccttctggagttcttggttacaaaaatgtttggttaaagcttttgggtgtgcttaaagctacttgaagacgaccttttaagatttgatttctttgtctttactgacactcaggatcattgttaggtgggaggtcagatcaggcagctggagtccccagtgtggtgagtttagttggcaggccccagatttctcctgcattcatgggaaattgacatgtatgttttatttccccaggatcagcgagaatgtgtgtccagacaggaatacaggaagtatggaggggccaagctaaaccggctaaacccggggaactacacagcccggattcaggccacatctctctctgggaatgggtcgtggacagatcctgtgttcttctatgtccaggccaaaagtaaggcttgtggagggagaagaaacgtggtaaaactgaaagcagggtggtccaggatcaggacagcccgagtgttcatggctgtcttattttctgttaaaatggagttggccagcttccagaagggtcatgctaaggtgccggcacataccggcactgtgtgtgaaaggttgggcagggcagatgccgagctttgggctcctacctcatgtggcaggaagggagaggatccgagcctctcctttgaggttgtgtaaccactggagagccagaggagacagttgctttcaacctggcttacattcaaagacttttttttttttttaaacaaaagacattttataaagcattgaattgaccattccacctcctacttggtcagtaaagctagatagggctcggattcagggcttgaaatcctaaggggtgtaaggaactccagaggtcatctggttcagcctgctacagggcaggaatctccacggtagcatcgcagaccctccactgtccttttaaagtccccacatgcattggaaatgtacggtgctcaccctttggtacagagactgaggaatgtgagtttatgctcaagtcattaacaagacagaattcttaggctgttctgtgtgatgacttcagattttaaaacaaattataagatgtataagcgcaacaagggccacatacttgttgtttgaccaacaaaacttagtattttggtgaaattagttctgtgttgagtttctgttatttcttatttcaaacccagtttttaagattatttcatgttcatggaatgggatcaaatttggcataacacataaaatagcaatgcagcctcacttagtggtaacacttttgggtctagtgggctgatctttcctggtgtccacatttctgctactcacatctggagttacgttaaaacatgcactccgccgggtgcagtggctcacgcctgtgatcccaacactttgggaggccaaggtgggtggatctcttgaggtcaggagtttgagactagcctggccaacatgggtgaaaccccgtctctactaaaaatacaaaaattagttgggggtggtggtacacgcctgtaatcccagctacttgggaggttgaggcaagagaatctcttgaacctgggaggcagaggttgcagtgagccaagatatgtcactgcactccagcctgggtgacagagcagaactccatctcaagaaaaaaggaaaaaaaacaaaaaacagcgcactcaataggtccagcaatctcacttctagtatatttccaaaggcaatgaaataggtatgtcaaacagctctctgcactcccatgttcactgcagcactattcacagtggccaagacatggaatccacctgatgtccatcactatgtatatgaatggataaagaaaacctggtacatatacattatagaatactattctaccataaattagaaaagaaaaatgtcgtttgtggcaacctggatgaacctggaggacatgatgttaagttaaataagccagacacagaaagagaaataccacatgatctttctgataatgcggaatctaagaagttaagctcatggagagtagaatggaggttaccaggggctgagggtgagggagcagatttggggagatgttagtcaaaggatacaaaatttcagttagataggaggaataagttcaatagatatattgtacatgatgacagtaataatgatgtattcttaaaaattgctgagacaatagattttaagtgttctcaccacacacaaaaaaatgtgatgtaatacatatgttaattaggctcattcagctgttctacaatgtatgcatatttcaaaacaatatgttgtacatgataaatatacaatttttatttgtatattaaaattaattaattttaaaaaagatctccagtagtcacctggtcagcaccagatattctaatctgtttgtgatatctgaaaatcctaatacagacagcaaaagcaggatggggtgaatagaactgcaaatcttgagccaacattttatgtgcctggcactgttcctgggttcaggtttttaggggtaaatggatgtttaggcagataattttgtcaattaaaatagtctgaattgttccatctagtccagttaacctagtctcaccagttagtctatgccacctttgcagcacccagaagcttcataatattcctgcagccttgtccagggtagtggcttgcttgctttctatctttccccagcctccttccctcctctttttcctcccctccatctcctagaaacagatcctagtttgggggtctgtgatctgtgaaacagcaaccttggcttctggggttgagtgaactcagcttgttttggtgacatgacatgttcctgtctgcctttgctgctccatttttaaccttgtaagtgccaggatgccagtgggaaatcgggagtccttctgatagaatttttccagcagatgttatcacgtactgcagggaaattggatctgcgtgctggccttactgttgagaaatttttccttatgtcagacaagactctgtcctgctacagtttagtctcatttcctcttatttaatcctcagaggagatggaaggtttggaagctttcaggcaactgccttccttttaggaactccttgtgtgcctgaatactattaaattactcctcagacttctcttttccagatgaaataatctcaggtcttttggccttttcttgtagcccaatatcatacaccagtttcctagccatttaatcatttttgttattctctggatgtgttccattttctccatgtccctgttgaaatgtgaaactcaaaaagaacacagtacagcctgaccagtagtataagtgatataaacagtgatataagggccttgggggaagaaagaaaaatctgccagctttccgttggtaatgatcacctctgagtgtttttaggaattgcaaaatgctggagcctgcatccattttgagagctacaatatcaataaaaatacttctttcttcgattaaaatacttctaattttaaaaattaaaatagctgtagtagtctttaaagagtaaccatgatcacagttttccatggcaaaataatcattgataggggacttacgattaatgtttacttgatccccagtgattccaggcccatttccacatagacatctgtatttggacgtcccagagaggtctcagattccttgtgccaaaaccaaaatcacagttgttgccctcgaaaggcctcttctctcctttgctccttagctcagtcagtggtcttgtaatccatttgttacccaagccaggaacctcacagcatccttcactcttctttctgttcagccacccctttttcattccaacccaagcctcatggattctgcctcttaaatgtctctggaatccagccctctgtcaccaccagcaccgccacagctcagactccaggtcactcgccttggggggatggtatgagctgtcatactgtatgagcctcatcctggggccatgacttaccaagccagatcatctctgtgagtctgcctggtgtaaagacaaggatcagtgacttctttgtaggtctgaactgggtaatgcagagcatgccctggagacatggcatgtccccccaattctccaagacatgacagtgccttctcttactgccaggtccctccgtctgtcctcagcacagccatttccctggaacgcgaatctgatcagttcactgctgggcctgaaagctttcgctgactccttttaatctgcagaatgagggtgaaactgcttagcttgggctgggtcccttgtgagctggccctgacttctctccagtatcatcattttctaggaaagccatttccccacaacccccaaggaaagcatatcataaacaagttttcccttggggaggttccctcgactcccttctctcctctcccttcctctctgaattgttgccatatgtgaagtccacttttctagttgtcatgctacctgttgacactaatttcccatgtcccacagaatgttccagggtatgggtccatgtgcctggtgcccagcctagcatctgccatacaagtgctggttctgatgatcagtggcttctgtggtcttagacttgtagcaggactcaaatgtctgcagcggcattggaaaggggtgccgtccagtgtgtgcatgtgtgtgtgtgtttattttaaattgtctatggaactatctcaaagattgaggccagcaggacttgacctatacatagatgtagactgtacatagatgtaagaatttctattcattttatgaaaatgaatagaaattttcattctatttattagaaatagaatgcttgctgctgcaagcatttgagtccttttacaggtgtgagatcacaaagaccgcttaccaacagaaccaacacttgtatggcagatgctaggctgggtaccggggacatggaccaaaccctggaacattctgtggaatgtgggaaattagtgtcaaatgtatgcattttcactaacagtcattaaactgcgtacaaagattatttttcttcagtctatcattgaaactattgcaccagaatatactgtactttaaaaaatgagtatatgcctcagtctgcacatatttactcttttttcaaataattgtttgtttgccgtgttctatttctgacaccatttaccttcaggaattcttactgtatgatggggagtaaacgaatatacaggtatttttttcatacttccaactgaatgtgaagaaatgaaatgagcaaattgttcacctggtgatattttatcatttcctcctctttgctgcagcaggatatgaaaacttcatccatctgatcatcgctctgcccgtcgctgtcctgttgatcgtgggagggttggtgattatgctgtacgtcttccatagaaagaggtcagtgatgtgcaaagttatgacactttctgtggctgagtggtttgatgatttgaatgtgagtgaaggtgatatttttgaagatttcaaggaaatattttatggactggaaaacctgattttcccatcaaatgttcttccaggaaaagagaaccttttctaatgattttaacaacagccaaaataatttttcgatggtacagaccttcccctggctggcttttctggtatacagatactgctgctggtgcatacttttccaaacgcgatgcgctagccttcccaatcaaataagcctttttatttccaatgaagtaaagaaacagatgtttcttaaaaagcgctaatctcaggctactgaggaagccagaagatgtgttagcaaatgtctgctggctcacccaggcctgaattgggagtgtagacaagagctgctgtagacagtaagctctccccattctgttctgataccgtgtgagagaggataaatgaaactgttgtagcgaagatgaaagtatatacaggaatgtatggaggtggggttttgttaacgtgaatttaatctttttgacagaaataacagcaggctggggaatggagtgctgtatgcctctgtgaacccggagtacttcagcgctgctgatggtaagagtccgggccaccagcactgccagcgtgcagggcaggtagatcgggagctttcaggagggttgctaatttgggaaaggaaggaggtttgcattattttgagctacctttggccttggatctgtcttcattaatatttctttctttctttttttttttaatcaaagtttttagcagttcagtgaatatgtcaaaacttgtgggactgtatggggtgccccaaggaaacacaggctttagagatgaatgtggccagcgcagtaatcaatttatttaattgcttgagatgttatgctagaatgaaaacagctttttaattgttaacatctagtcagaggatatgctgcagctgacaaaacagtccttttaaactagtttcagcttgagtatcatctcattataattgtctttgatgaattacagctctgcttttttttttatcatggaatttttctgtcattcccttccgactagggtcatacgctcgtggctcattcacattccccttggtaataactaatgagggccattcagttaagtggctgggaaggtctgacatggaagttgggtgatcctcaatggttatttccttttttgctctttctagcatttttatatccagaccttttgagtgagtcggattagggtgaggggttggtcactgagtccagtgatactaggacccttaactggcactttgctaggggcttttacaaacaccatcccatttgtttcttaaacccctgcaatgtgcgttttcttaatgcccatctgcaggtgaggaaatgaactctgggaaaaaacttgtgcaggctcacatggttagacagttgagaagtcaggaggagaatggaatcactgtggaaagggctgtgaggtcccccgggcaggcaaggaaacagccctcaggaggggctggaccggattcatcaaatgaataataaataagtgcatgatgttgagtgagtacatttagaaaaagtgtttgctgtcttcttgcctcgggagaagtgaaagtagatgcaggagatgtgaaataaagagacatgattattctaattattgtgatcaaataagaaaacataagaaaatactttaataatgtgaaaacaccgttatactatgtagggttttactatggtttctttaataatttctaattcagtttatagtaaagtcaatcaaaagcagcctcctctgaatgggaatcaggtgcagaataatgactttatttctatctacataaaggtctcacaaagttggttttttaatagtaatatatatatacatacttctgtagtgtgtgtatataaggcagagagaacattctggacggatgcacaccacacttacaagagttgttacttgtggagaggatctttccctttaaaaaaaaaaaaagccagatgtggtcgaaggcacctgtagtcccagctactcgggagactgaggtgaaaggattacctgagcccaagagctgcagtgagctagaatcccaccactgcactacagcctatagagcgagactggctcttaaaatccagcaagaagatagatatgcattgtttgtatgaataatagcttctaaaaagaaaatcagtaaggaagggagtcatcccagatgatggaattgatagaacaaggcaagaccactttccccctctgtgagggtggactgtgactctacgagagaagctattctgctttgaaatgcggcactagaggttggtgtgtgtagcttttgactgtgaagtgtccaggaagagaaagcatcaatacaacaaattcagattctcagggctctcatggtgacttgaattcacattttgtgtccttctagaatgctttcatgatacgtcttggtacttcattacaacaaaaacaaacttattgccacccaggtcgacaggtgggaacagtgtcaccttatttgaacttaatttattcggcctttgagaagcacttatagccagtttcctcgaggggcaacaaaatgacattgcagttcaaaagtgctttaaaaacttctttttcccaaagctataatctgcatgtcaccattctccagagtacattgaaaatcccctacaggaaagtgctgataacattgtgcacagaaaccgctcctggctggtggcactggggacgcctgcttaaagtcggagccgttgggttgaatcgagagaaaaggattgagcgtattgacttcagggacctcccagggaatgaatgtgattggtttcaactccatgttttatggcaggctaaacagttaattctgattaaaagcaagcctggattctcagagataaatggctggagacagtgaactctttacactttctgaggcgcattgtgaagagccttatctcctgggttgtcttgcatacttactctcctctgacaagcacccgcctcttcttcaggggtgcaagccacctatgccagctggagggcagagttccattcgtgaaacccttgaaacatacgtactatgaaatacaaaaatgtgtaggaaagaaaacaagattattaatgaagttcatattggacacccctcagaggtctaaaatgatggtgcccctcctgggcctaatttataataaacatctctcctttgagacatcacttaaaggttgatagttgggatatggagatgttaggatacagttgtcagcctctcacatccagccacaggcccagggtcagcatctgaaagcatgaaagcaaaaacaggcaccttctccacctcctttctgagccaggaccacctccttcccacagtcagtgtgtggtagagcctggtggcaggtcccgtcaggcaaggacattagcacacagcgtcagaggaattactgacatttcatatggatcttatggaacaggttgattttattttcgtttttaccctacccatttggaggtgtagaattgagcctgtgtttggttttgttttctttctttccaacctttttcctttctttctctttgttttgccttccttcctgcatagaaatatttatttattcattcattcatttttttgagacaggttctcactctgttgcccaggctggagtgcagtggtgcagtctcagctccctgtagcctcaacctcctgggctcaggcgattctcctgcctcagccccctgagtagctgggattccaggtgtgtgccatcacacctggctaattttttaatagagacagtgttttgccatgttgcccaggctggtctcaaattcctgggctcaagcgatcctcccaacttggcctacgattacaggcatgagccaccgcacacggcccatttattttcttaaaccagatcgaatctaaacagaaacagaaactggagaagaaatcctattcaggcttggtatctactgtgcattcctcccaaatctctacccattggtcaaggtccctgagttcacagagcccaggccagagccctggaaacgcctctgcccgtccgctgcctaattgcctgtccacgctgggcaccaccgggtctctccctcagtctcagagctcagttgcttctgcacctcatcagggatccagccatcaaagccaaggctgggggacacttggactagagtaatcctaccaataatgcagttcagctttgtaaccgcaaattttctagtagccgtattttttaaaagtaaaaagaaacagatcaaatgcattttaatagttttttagttccaataatacgtttcgtgtaacccagtatatccaaaatatccattttaacatggagtcagtattaaagttacctaaatatttcactttttttttttttttgtctaatctttgaaatcccatgtgcatgtctcaaattggactggccacatggaatgctcaggagtcccatgtagggaccagctgccatgttagatagcccaggcatagcatctgtgttgagggccctgacacctcttttggattcatccaagaagtaggaccttacgtgcaccatcatcacctctcatatgtgactctggcctttttcccgacccagcataagaactcttccctctccctactactctcctcctttttacatttgcgttttaatctgttggtgaagatgggtaaaatcctgcttgaccatttcattcagtttctcaatcccctgtggttaatttgtttttttcaaaaatgtgtttttatgtgatgaaaagaaatttttaaaaaccaactgctttctttcctatactagacttccttgctttgttctggtccttctatctgttagtatcctcaaattatcttgaaatcctcagagatctgaaatactagtactgactgtacagttttcttactcaaatctatagcatgtggaaagttgacagcaagccatgccatcgcctcctggtattctctgtgggtttaaggaagcagcatcttatattctttggcttagagttcccccaaagcacgttctgtctaagggcttgtttctgtacctgctttaattacggtttcttctccagtgtacgttcctgatgagtgggaggtggctcgggagaagatcaccatgagccgggaacttgggcaggggtcgtttgggatggtctatgaaggagttgccaagggtgtggtgaaagatgaacctgaaaccagagtggccattaaaacagtgaacgaggccgcaagcatgcgtgagaggattgagtttctcaacgaagcttctgtgatgaaggagttcaattgtcaccatgtggtaagagaaagttcctgaaaagccaaaatgcagcacagggagagggtatcacacaagcctcccagtatgttcttggctgcatgtacccgtgggtttggtgtcttgcctttgccttctggatagttaccccattacctcactgctaccttcagacccctgtgctcagaccaggccgcagcaccacagagacagttccagacaacacaggcaccagcaagggccaccctgaccctctgagtctttctctttttgattcctcccaggtgcgattgctgggtgtggtgtcccaaggccagccaacactggtcatcatggaactgatgacacggggcgatctcaaaagttatctccggtctctgaggccagaaatggaggtcagttttcatttccaccggtattgcatgttgcctggcctgctctcttttcctttataatctccctgcaaggaaatgctgtgtctttaaatcagtttactttccagcatccagtgtttcttactgcatgctcagttgtaggtcatttatgcaaaggatttccccaactagagtcagactctgatcttcgtgaggggaacttcctgttccttggatcccctctgctaagcccctctgtgcctttgttcctgcattccctccacccccagtcccctccccacatcagtgtccacctgccaagccaggccagcgccactccctccccgaagctttcctgccccactccagtagctatctcctctgctaacttctcgatgcgcttgactcacatcctcgtatgtgttctctctcgttatgttgtgttgtgctgttgttggagtgtgtcccccctccaccccgttgtgtttagcttttcatctcagtccaagtgtgtggctcagggccgcatttgtggcaggcactctgtcaataaatgtatgttacagttcaaggttaagctgcctggattcttgcccttgcatctgggaagttgctgggtgatttcccacccagctccgtgcgcaagatgtgcactcattcataaaccccctccccacacacagtccccttccccggcattgttggcggtccttgtctttgccactgggaatctggtttcctcagactctacgtccacgtttcaggattgatccagagtcagtgtcctgcttacgcttttgaatgaatgatcccacctcagctgcaggatttctgcttagtttcctaaaaatttcactttgggttatgagcttccaattctaaacctgctaaagtcctatgcaatttttcattaaaagtcaccgtggtgtctcccccctctgtagtattaacccacaggccagctttttaacatatgcgggcatgacttttgagtaattaattctacaaataaactgggagataaatgctgagacataaagccagcaagaactgagttttcatttggttgcctccgtgggtctgaagtctttgacccttactttgctgcttactgggtaagcagtgtgtctgcttttattccttagaagcagtgacttccccttctcggcccctttggaaattcttttgctgttcttcatttgggcttaatttttttttttttttaatgttctttgaatcggcaacttaatcatctcccaagtgacagtttcttaattttagttccaaacacctgttcacatatgacttcatgtatttgcagcacatggtgtttggggccaagtgtggactggggcttcaagcaggatggtttacaaaactcccaccctctgttctgccaagcattggtccccagcacccctgggtgttagtgcctcttcctggttcactcactcactttctctggccctctctgtgtctctctcactctctttctttcgagatggagttttgctctgttgcccaggctggggtgcagtggcatgatctcagctcactgcaacctccaccacctgggttcaagcgattctcctgcctcagtctcccaagtagctgggattacaggtgtgcaccaccatgcccacctaatttttgtatttttagtagagacggggtttcaccatgttggccaggctggtcttgaactcctgacctcaggtgatccacccacctcagcctcccaaagtgctgggattacaggtgtgagccgctgcacctggcccttggttcactttaatacacaaaacagcatgaaggagaaaagcttgatgaaataggtgactggagatctggcagagtatttcttgccagcatcgattgaggcacctctgaaaagtccaaaactcactcccttcctctccagtttcaggcacagaataaaaattcagaacacatggccttggtcctggctctgtggctggctgcctgtggtcctcagacagctgctgcaggttcctgggcctcagtgtcctcaatataaaataagagggtgggacaagattactgaagtccctttcagaactaaaattcacctttagattggtcagatttaaactttttctttctagctcatgtcaggtattaaaatgtgtgcacttaccctgcagtttcattatattcaacctgctcccccgaccaagtttcacttacgtatctcactacgagtaggtgtatatgtatacttgtcttaaatagctctaaccaaattaaaggaaagaatggcagtgtaacaccatgaactgacaaaatttcagccctctgtctttctccatgcttaaagttgagtgcttttgttgattctgttgctcacggcaattataaatgaccacttcataacacatataggtcatactgtaatatttaagaattgtgagcataaactttacatttcatgtgcatatttcctcatgcatcacacgtatctaaagccctgaaaagtagtgatttggacttacccccagtgacttaatgttgcttccccagataaccacgtgataagtgttttaagtcaccaagagacagctttgacagcctgttcagaattcaaaggtttgtgtcaccaagtgtagagaaccaacccagaagtaccgaggagttgttataatgattccaaatactagctttcagtagaaactagcacctcacagggcagcagccagcatccactgggcattgactatgtgccacgcaccactgggcactttctgtgcgtggccccaggtcatcttctcgtcagtgaaaccactgtgataccccatgtggaaaagcctgggcatgctcagctggtggccggcctgcaagtgtgggacctgtcagagccctatggctttgcagtgctgtgtgagatgctttgtggtcaagaaaaccaaggtgtagagtctgttgcacttgtatatgcaaaagtaaaaggtaacattaaaattagggactagtgattgttttaggatggagagacttgggcatgtgttttatataaaacttttttctaaatggatgtattatttaagggtaattctttttaattccaaagccagcacgttgctgtcctctgcaaagaggaatgcttatccctgttacttattcctggtttcctccaagactagtttcagctggacttcagttgccaaggacttgtcttctgtaatgcccacagaaaataataatgccacattgtaaggtgaaaacagtaatcctggtatttttgtattttagaagaaggttgaagggaaagaaaaggattaaataatttataacgatgcttttatgggaaataaaatataccatgtccatttggaaacacatttgcttacttccacacagcctttgtaacgtgctctccttcctcttacctgtacttcggtgatggaaataaaaggaacatataaacaaataggaatttgagtaactgagaatccttactaccaaaaatggcttgtttcactttaaaaaaatgttgccctacccaaaatagaaaatgttggtcctaaagagtgcaaattggtgtttccctcaccagctctgatgtggtcagggagcaagtgcaaataagcttgcggggagcaagcaggtgccatgctctccatgatggtttgttccttccgagcaagtcctggtttcttagcataaacaacccacggtgcccagattgaacaaagatgatatgcaaacctcgaaagaaattggcatggaaaaaaaaaatccaaaattctcatgtgaatttttttaaatctccaacagaataatccagtcctagcacctccaagcctgagcaagatgattcagatggccggagagattgcagacggcatggcatacctcaacgccaataagttcgtccacagagaccttgctgcccggaattgcatggtagccgaagatttcacagtcaaaatcggaggtgtgtccttagctttccaggtctgggcaagaactaaactcaggtgttttgaggactttgttggcattagtctgcccctggagaggttttctagtgtgtcccttgagtgcacggactccttcttgggaatgatgtgattgtctccagttgatggtcacaaacctggcacggtcggtcccaatgctgatagctcatggacatggtggttcagatactgggcacggtccctgaggctggctctccagacgtttgaggcatttcttggtagaacacctcttagcattggttacagaaataattaagacaatgtcttcaggagattttgacttgggaataaaactcactgtccaaccttgcattcatccctccaattttcctagcttttaaggagcattgctccccttccagggacccacattggtttctaagaggcaagctgccctaatgacgaagcctctgcacggagcaggagcagtggcaggagctggcatggcagtcccttaggtgagggacgatcactgctcactgggtttcacggctggggctggccagcctccaagctctcgaccactctctcacaacacttactgtcctgctcttagctcaccagcctactggttagactcccttgttgccaccacccactgtcacaccagaaaaaagggttggattgaatttctgagcaatggttaaaacccacttcagcctttaggtttgtgtttttacttcggtcttttaatctgcctaataaaaacacacataacatcagggctgctcaggaaaccacctgcttttaccaggactctcatcttcccactatgatacaatgatagtttagaaaaataccaaatatttatcctgagaaactgcaggggagatttaacacccaaaagaagctatttcaaatggacctctgtgtctagttcttgaactgccttttctggaagtgttcaccttcctttagtaacatatttttttcctttagtagtgatgttttaatgaaatgttttagcccctttggtgaacaatgagaatcttttagagaacggtttctttttttgagacagagttttgctcttgttttccaagctggagtgcagtggcacaatcttggctcaccacaacctccacctcccaggttcaagtgattctcctgcctcagcctcctgactagttgggattacaggcgcgtgccaccacacccagctgattttttatatttttagtagaaacaggttttcatcatgttagccaggatggtcttgaactcctgacctcaggtgatccacgcacctcggcctcccaaagtgctgagattacaggcgtgagccaccacacccagctgagaatggtttctaaagtaggggtgagtgtctttctttttactctgtaggagctagaggtattgaaatggaaccatatcccagagcccacatccctccgtcatcagagttcctcattcaggatccaccagtgtgtccctaggtttggcacgttgagacgtcctcacgtttggtgctctgtgaagctgggcagccctcagagaggcaaagaagtcccaagaggccgtcctgcctcagggctctcaggaaagagccgcccgcgtccctggctgggcttccttggtgcacccagctcatttctccttccctctctgtagaactcacattgtccccatggaaatgccagccagctcccctttcccagtgcaggggggagccaggtgggcctgaggtgggccagttctgccgctaatgggtgagagacttgggccaggtgccttacatccgggagcctcagtttcctcacctcggaaatagggtgataatgtaacagaccccatggggttatgagaaggacttggtgcaggaaagcagcagcacgtgcctggcacagggcagggcctctccagatggcagttcctgtctgtgtcttattcccaccctccgggcacatggggggaactcagtttctccccactgcgcgtcaccctgggagaggtgttttttgtgccaattgccattttaaatccaaatcagcagggatcatgtttgctgttcaaccatgtggcatatttatagtgattttttttgtaatcatggtttttctttctggaatttcaagtttttcatttgtgctgaggaaggtcgtttgtgttttttaataggattccttcttttccaccttgtgcaagtaaaggcaaatcccctatttgcatgtcactgtattaattcacagataacactttcacacttcatttttattcttctcaagggctcaagatgttttcccaatgcccagcgtctcatggatgacaaatatgacaagtaattttaccagaggcagtttgagggctcttagcatagcacaagtaaattatgttggttcaagtccaaggaactttgttctctttgtgtttgcttttgtagccttacctctttggggcatgagttagagacatacatgagcattttaaagtggagcagccctttctcctgggaaggagaacggaagagtccacttaagaaaaggttgtatgattgagtgcaaaatcaaaatctgacaaagcagcaataatttaggattataaagcgagcctgccatcaaacataattatgtggcatcttctggagacatggaaaatggaagaaattttcaaaaatgagtgggaggattatgttgaaaaacagtattgagtaatagcttcaggggcctcgtaaatagcatcttttcggcatcttactgggtacttttgtcatcatgaattgttaccctgaatattttcccccttattaagcagtgaaattatttacttttctccagtggtggggcagtgctaccaagttaagtaagcatctgtactctcctgtttatttggtcaggttttaaaaccatgtgtaaatgaccagtggtctctgcagtactatatattttcttaaattgtgggactctaatttttacaccgcttccttttttcttatttttattttcaagacaggttctcactctgtcacccaagctggagtgcagtgttgtgatcatggctcactgcagcctcaacctccagggctcaagtgattcttccaccttagcctcccaagtacctaggaacacaggcgcacaccaccactcacaactgactaatttttaaaattttttatacagacagggtcttgctgtgttgcccaggctgatcttgaattcctgggcacaggcgatcttcctgtcgtggcctcccaaagtgctgggattacaggcgttgagtcactgcgctcagcctgcctctcatttaaatgcaataagggcattaacttcctaagggaatcaaattgtaaatatattaaaagtggagattgcttggtatttgctcatcatgtgattaatcatcccttactgtctccaccttataaaattgcaaaccctaatatttggccaccttaaagtgggacgtgtctgtgtcttgccttgcgtctctccacacataatgagtgtagggtcctctgctgtgacagcagtggtgcctgctccagcgtgtgactctgcgccctctcttcccttacagattttggtatgacgcgagatatctatgagacagactattaccggaaaggagggaaagggctgctgcccgtgcgctggatgtctcctgagtccctcaaggatggagtcttcaccacttactcggacgtctggtatgagaacctttactgcattgccagcctggagcccccagcctctgcactttccaccagctcagtctctagggctttatctttctctgttcattgttacccgttgccagctttagctcagtgttgtgtgagccacacttcttcatcattgaggtgttcctgttgtcagtgggctagctaagggcagaagggcattcgtgggattttaaagaatttatgggaccaacattctttccgccttcagcagataccgattatgtttccaggaggtgggatgtgccagaagccgtcacctctttttgtttctcccctgcctgccttctttctcttttcctctttctcaataaacagatactgtctgtgtgtctgcctcacctaatctaaccctcagattgcagacagtgctttatttagacccaaagcttatgagtcctgattgtgttttcctgctggtcccatctgctgtctgtctttcagtgggcatccaccgttgtggacccagggatggttatgggaagcaaaacgtctcccttaatcataaacagtgtctaccagtggaagcccatcgaccgagggatcagaggcctctcagtagtattgtttattgcagttccttggcaacattgcagagaggcagtcaggttctgaaatacaactgaggttattggcaggctgaggccctggcacaggcaccttctagaatatcagctagtgtcttggctttcctctggggggatcccgttgctgttgtgttacagaaatggtagttgtttactccaacagtctggatgaccgcatagaggaactatttcaatagtgactgacatcattttttttttaacctcgtaaacctttcacagttcaggggccttggatcttattttgaagacaggtgcaaattggaaatagcatttgaatatgacccggcaaagcatgattgcttcttaagctcaagtatgagatctgttttgcaatcagcttgtccaagatggttatctcttcactgtcaaatcaaagtgctctgcatggtgtttagagattgggatggtgaggagagagcaagcctgggtatgtgcatgcatctgtttattctaggcttcgtgcctccaggagcttggaggtcagcttgtagtataataaaatagaaaactatacagccggggagaacagaagcagaatagaaggataaagtgttgttcatatctctcaggcaaattttacccaaattctgacgagcagttactgcacaagcaacaacaaagggacctagagtgtgttcattgccaattctgtccatttggctacataactactgtgaaccaatacaaaaagatatgtataaacatgaataggcgtttggtattcattccatgaaatgctcaggcattgacagcgcttcaggttttgtttgctttttaacacaggctttgaggatagcacaggtcaggaaggctagggcgttggagcaggtttctcagcggtccaggctctaaactaaagctgtccctctcaaaagaatggaaatgatttcagattgtattcagcagcacgaagcaatgattcctaaatagttaaaaatctagaaagaaacactaagaattgtattgggctttgtagaagagaccccagaattttaggatttgggatgtatccctgcagtcaggcccagtccccagtgcacctgcagatctttgacagctgctggttgagcttctgctaagaggtttccttccagggactccatgttcactgcctcacaaaggcaggccagcctcatgctttagacatccttgctcttaacaaatctttcgtgttctgctacgtcagcctctgtgtgacacccattggaccttctctctgtagcacaattgcataccttgctctgttcttgataagataggtctaggagtcatcgaagaggtgtgtctgttctagccagaacacctccaagtttcctgctgtcttccaggacttcattcccaggcccttgggcactgtggctgctctccctgcagctccctgtagcaccatgtccctctgaaatgacaagggtgccctctaggcatggaggaaaccagacgaaggactggggagctgcaccccacagcctagagctgtgcttcttcccgagcatctggatcacccaacacataatctttattttttattaagaagctttccaaatagtcacaaatagccaaggttatttgcttctttcatgactaattaccatctgtggggaatgtggatttctctgtaggttttaatttgctggtgagtgggccattgctaccatcccctcctggtgtggggaagtatagttactgaatgctgcctccagccagcacgggcattgcagggggactcacagccgccggtcttccccctggggaaacaacgtcaaggttcctaattagaaagggctttacacagagacatgtatctactgtttgaagattaaatctgtccatgaaatggaagacttgattttatatgaagtcatgaagagccaacaccacatagtaaaataccggctttgaaaaacacagaggtgttgcatatttctcggtgcttctgactggctgtgtggccttggttaaacctcagagcttctctggccttcggttgctccatctgtaaggcaaggtctgtctcgagaagtctgcggtacctgaatagatgttgaaatggctcctgtggcaactggtattgtgtagagatggttcagtgtccacaccttgcagttgtcacattaagctgtgaaggacgactgactctagcactcagtggtcctcagtggcaggtgatgttgacctcagacaagagttgctcaggagataggctttgcagttcacctcgacaagcgtttgtggagagctaggtctgctacctcctgtatcgttgcctgtgggtgatggtaaggctcttgggggtgtggaagatgcggggatgatgatgatgacgatgatgacgatgacgacgatgacagcgtcgtcgtcgtcctggtcctggaaggataaagtcttgtggagaagaggaggcaattctgacagtttggggttgcatcatcttcttcacagaagagatgaagttgtgtaggcaccctaagtatggattgtcacaaaaagagcactaggaagcggggcggggcggggcaggggtggggggttcctggcagtgggaatgctgggcaggcatggcagtagggagcacctgctgcaggtggggttggtgaggtttcctcgtgggacttaggctgcagagagatcaagacaggcctcagctgttgtattaggcatcctggactaattctttaagccctgttaaggtttctgaaccagagggtgattagagctgtgcttgaagttcttgttagccggagtatacagctgcattgagcaagatgttgtaaccaaaggagaggtggtggtgggccaggcaagcaggatcctgcacactcagggagctctgagggacggaaggagggtgccagaccttggacagatgtgagcctgggtggacagttcgcagtgggactccgaggaggccaagggcatgggtgacagcaggcagactgctcgggtggaatgggcatcagctgcagggaagccgggggaagaacagggcacaaatcagagttcagtgtgagacgcagtgagtttgtgggtagcccagtaactgggaacttggaatggagcagttgggccgggagggccagggtgggagccgtgccgtgagaactggctgcctgcaagccgctgacacagccaggaagggcacgtggggcaagaggagaagtgggtctgggagggagccacatcctcaggccatttcccagaccagcctgcagtcagcaaaagcagagagctagtcatttcttcttattttatttttaattttttgttgttggagagctagtcatttcttgtaccaagctgcatttcagatgtgtgggtactactgccactggcatctgaggcatgctgcctgtatggctgggctggttgtggaaggcagagcttcccgcacaaagctgatggagagccccttctcccctgggcccaggcctctctaaactgcacttttggcctctgggtgtcttgtacaacatgaagacgacagcatttcttggtcacttgtaattaaaaaggaccttgggttggtctgtcctctgattgctaagattctatttctgtctaacatctacttttagtatcaatttgtacaaaaatctttgattcaccgaaagtagctgaagcagcgaataaaacgttctcatacagtcaggagcactgtgggcttgggcacaaggtcaaggtcccaagagctcttggttggaaatctcctgccccaggtttttccatgtggcttgaccagcacctgcagcccaggacaggtccagctagaatccctgctccccaccctgctcccgcccctacttggtgatgagtagcctattttactccaccaaagtgaaccacatggaaaggcacacaggtcagggagaatttgtgaattacggaatttgccctgggagggcacatttgttttgcagattccagcattgtcttttttaacattctgtctgaaagttgtgtgtgtactctctgttttgttttccagtggtttgatcttctaaactggcaaagctgcatgcatatggcagaattgctcactacaaagttattcctcagccaacttctctgcttaaggattctttgtccatgataccccctcccagccagtgcagcccaccctggtccccccacctgtgacacagaggccctgcaggccagcagctccccagctctgttgtgggtgggggagcagcaggagttctcttctcccttggcccaactggacctcaagatccctatagatcttctaaacattccaggtcccaggccctcaccccagaccaatcaaatcagagtttctattgggtgcccagccctctgtttaaaaacctccccaggagattctcctgtgcagccggcagtgagaaccacctgggtagaggtttccaaaattgtctgattgtaaaaatcacctgaggagcttggtaaagcttgactgtcccaggcctcatttgaggctactaagtcaatgtccaggctggggcttggacaagaatgtcattctttttgggtcaaagccaggttaggtgataccgccttgccagataaatggccgggactaggtagatgctgaacccagtatgctctgcgttcaaagcacagatcaggggcttcctgaccgtgcaagggatgccggaagcgccctcaccaccttccttagctccaccaccggggctgaatttagtttacggggaacattagcagcaacagagggaggatgatatcccgcacttagcccagggcctggctcgctgtctgacaagcactgtcaccatagtaaggacagtttatctgctcgggatgtaagaagtgctggaaaggagggggcagcattgttcagtccatccctttccaagctcctcacagtttttttctccctgtaggtccttcggggtcgtcctctgggagatcgccacactggccgagcagccctaccagggcttgtccaacgagcaagtccttcgcttcgtcatggagggcggccttctggacaagccagacaactgtcctgacatgctgtacgtacttcctgggccctccgtgctcttctgagttctcttctcaaatacctgttttcttgggtcacaggagattaggagattaaagccattctctctggtcctgcacctcccttgccaggcgtggctaagaggtttgtccttgtggaaggagctgagtgggttggtcgacctgtgcttttccgtgggtaccttaattctaccccatattccgtaatgctttcgttccgatttgcagttcacactgtagtttctcaggccaaatgtctctgtgaaatgtttggccagagtaatccatccttactcatcctctccatgtgaggtttttgtttctttttaaagaaggctacaacacaacacatactactctgaagtcgaattcaagagccccgcgccccacctgtggcaggcctgagggagccgccgcagtgagtgtgcacacagctgcatggccaggactccggcatgcaccacgtagggtcagcttggtgtcttctgaaccctgccccacatgtcttctctgttaagtgtttacaaaagtcataaaccatctaagtaacatgctctccggagcttcatccgctgaccaatgtggacctggagcgtgtgtgagctgacatccctgcggacagaaggatgccagtgctggtgaatttgtcttctcactgcacttttttttttttttttttgagatggagtctcgctctgtcgcccaggctggagtgcattggcgtgatcttggctcactgcaacctctgcctcccgggttcaagcaattctcctgcctcaccctccaaaatagctaggattacaggcacccaccaccactcccagctaatttttagtagagatggggttttaccatattggccaggctggtcttgaactcctgacctcagatgatctccccgcctcagcctcccaaagtgctgggattacaggcatgagccatcgcacctggcaaccccacttattttgaaaaaacactttgcagcttttagtcctaagttttgtcagatgacgagagagagtttgtgatgcctcacagtgttggtgaggcctctctgctcagcgccccctggagaagccccccttttggtggaggacttgctctgtgtccgtggacggtgctgttttgtggctcagtggaggtcagagctgctggagcagggaggccttgttgtccttcctggaatgagtttgaggagggggtgaaggtgttccagttcagtcatcaggtgcacaacaggtacaggttgggagcagtggccttgcttttgacatgcactttaaggcaggcttcagagattgatctggatctccatagctgaacaggaaggtgggctcccactagtatctcaagaccaattcaggagatttccagaaatgcttttcaggacaggtttggcttcattttggaaaggatcctgaggaattgctgggctgttatgtctgcatgaaggcacccagctcctatctctcacccatccacccccctggagccagcacagactcaggctgggcccacagtggcgggataatagatagatatgaaccagacatgtgtcaggtggacaggagggaatgagggctccagcagccacaaaagttttgctcatttggtctcctacagtgtctgtgggccaggaatccagatgcaggtgttcttgctctcagctcagagtcacaggaggcagaaatcaagatgtcagtggggctgcagtctcacctgaggctcagggacatcttcaggctccttcagggttctgcacttgcaggactgaggtccccatattcttggcacctgtcagctggggactgctttcaactcttggaggccaaggccactcacagtccttgccatatacagcctccataggccctctcataacagcagcctatttcttcaagactgataagaggacagctctctactgcttctactggttttttacctgataaagtcagatctacccaggatactctctcccttttaagtgattcacagtcaattgatgagaagcctgattagaggagtgaagtatcctctcatgttcacaagtcccacccgtactcaagtgaggggattatatgggatatttacaccaggggcaacgatcttggggggcatcttagaattccatagtctcagaaatcattgtccctaatcaaacaatcaaggtgctatttttgtttcaaagcactttgagtgttgctacaaatactgaatccctaagctccttgtaaatggccggccagcggagggcatggggtggggaagactggatacacacccctgtgctctgggagtacgttggctgggcggcatgctcattagctgctgcttccgaacataggttcagctgaagtgtatcccaggcagtggacacttcgtgtggaattcagaaaggtggcgcaggaaggataccagggaaagccagagtgaaggcatcacccttgcacagctagcacatgtgggggctcccattgtcccatcaaggcagggccagaaccagaaagtcggctggtgccctgggcctgggccagtgatgggaggctcctcttctctgagggtggcacctacagatgcagtggcactgggtttcctggagccctcatcaaggaaacttcccagcatggcctcttcagaactccacaatccaaacttggaagagactcgaaagaccacttagtaccttttcttgcccagtatagaaattcttcttctccccttctgtgttagttttttatcgcagtataacaaactacccaaaacctactagttaagagcaacagtaaacatgtattatctctcagaggtttctgaaggcgaggaacgcaggagcggcatagctggctggctctggcttggagcccttctcgcggttgcagcccagctgtccgccggggctgcagtcatctgaaggcttgcctgggggaggcagacccacttccaaggtgttgctgcataggtagtatgccctgcatgaatcgccctgttctacgtgggcctctccgtagcactgcccaagtgtctcaggatgtgtagctggcttctctgagtgcagagttcggcacactctttctctaaaaggccggctaaaaaaatgtttttggctctgtgggcccatacgaccttgactgtgactactggactctgccactgtggagcaaacacagctgtgggcgtcacataagctagcgtggctgtgttccaatacagctttatttttaatactggaatttgaattccacatcatccctgtgttgtcacaaaatattcttattttgaatttcttttagccatttacatgaaaaccattcttagctcatagaccttggaaaactaggcagcaggccagattttacccacaggtacatagtttgcctgctgtgccctagagtaaaagatccaggacctgagcagaaggcacgacgtcctttctgaccaaacctcagaagtcacactgaggctctcaccttctccttcaggttacaccatgtgagagtcaatcacgtggggatgtgagctccaggacacaggggagaggaccactggggatccgggagcctggctaccccccagtaccccaccaacacacacacacacacacacacacacacacacacacactgcccctcacaggtgaccatctgctccacactttgagcagcgcagccactgttttcttgccagccattatgagaaaaatcatgctttcaagtctgaatataagccatggagtaagaggtctgatgaccactgaatctgcataaaggtacagtgctagaatctaggctaatactagaactggtggtattttagcaagcttagaaacagcccatgaaagcaggtgtgagttctgcttctgtggtttagggtgggtgagggagagcggtattgttctgtgctttctctttgactcgggtaaacgtttatctacaagagacttgtgggattcttacttggtccacctccaggtgactgggcttttactattaatgtaaactgcctgggacgcagcccctgccatgggaaacgcagggcacttcctgttctcagcatagagtgacaaggaaatttactcagagcggttactctgacattcaatgtttagttcaggaggcatttctgctttgccatcgagaatttttctcccttctaagaaaatgttttctcctgagaaaatttttctcccttccaagaaaagagtagaatgaaaggaggcaacttggtttcatagggagtgtcatgttgtccttctgagtttactgatgagcttacctgagaaaggagggttctagcatgggagttctgttgctacaagacatgaaagaatggcctccgtttatcccggagaggagagtccctgagcccttgggagttgccttgaaacctctgccgggtcccaggtgagaaagtgtgtgagttgtgtggttctgagatctgaacaggcaccatctggtgacactaggggctgaaggagctcggtggctgcaggtggactggagctcaccatcaggaagtagccagattctcacccctcagtgtcaccgagtgttctggctttagaggaaggactccgtggtccccaagccacaaggtgtcgaggtctgagtctcaacgccatgactcagtgtgaattaacttagcaggtatcacaacatcagatttgggttgtggttccctgctgggtctgtactttagattgatgacaaagcccgtcctcagccttatttcagcccagatctcggtatttatgccacagatactgttgagctcctctgggtgcgtgctgaccctgaggtcacacagatgagccaggagtggccctggctttcaggaaacgtagtgacgtaaaaggtcccggctgctgcgggataagggccagggcagaggtgtgaacgcagccgtggaagacttgggccaggaagccatttgttctgctgctaacacttccacagctccacgtgtccagactgttgccagagacgtctttggtctacaggattcaggagggaatctgaactttagcctggagcattatcaactcatagatgagtctgaaacaaacttagtgaaatctgatgttttttgtagttttccagtacagtttttcccatcgctggaatcctggtttggttctgcgggaatcgagtgcttgagtgggacccagacagacaggaagggcgctcctgctcagttagccccagtaagctcactgaggcacacaggccccatgtccacagccgctcctggctgaggcgtggttcctaagacgacccttactgttgagggctgccaggagggagagacacattcagccccgcaggtcctctgggaatccggtgagcgtcggcaccgggctggggccgtgctgattcccggcagcgtgtgggaatgtgcgggtgcctcgtggcctgctgacatcgcacacaggtcacagcctgtccagttcaggacatcagggccaagagtgaagtgagaatacggaggcacctctgtgtgctcaccctgctgaccgtcacccagcctccggggggggtcacagctggcccccaggaagctgcttcccagcagggcaggaattccatttgagtcttgtccctgttccaggagaagggctgggtatgtgtcccccaaaggggagagcattcgagaaggatggcgccagcctccccagaactgacctgtggttaaaaaaaaaaaaaaaaattgtgctttttaaaagatgagttttatcagctcacacatccttctagagtctaatggagattttttgtgtgtgtggaaatagtaaacaaggtcttgaatcccacagagcaaaaaagacttcctttcatgggcagcactggaagggttgttactctggaatggtttaaaagaggcgtcacatggcttgtttgtgctgatgtcactgcctcgctgctctcctgtggcacctcctcggtccctggccacagggcacagagccaagcacatctcatgctcttggcccagttacgcttctgcccaggggtaagtcagctggagaggaattcacagcccaggcatttcatgtcgttatggcctattttaatttttttaaccccaatcatttttcttaggaagtgatggggagtttggaaaggcaggcttatttgtcatcaagctgccagcttttatcaatgcaaaccacatccctgtgacatctgtgactgttccttggacagttaggtgagggagggtctcctggtggccccagggttactcttatttaggttgagaaaaattcctttttccaggatcgttggtgatcaaagtgtagtcattctgttgcgcagagaactccatcccagctccaccctcatgaattttgtaatcttggacaaattatttagtatcttagtgcttctgttccctcatctgtaacatgggggtatattatagtcagtagcacctgcttcacaaactcgtgaggacttcagcagttcacacacataactgcctcgctgcctggcacctagcgtgcacatggcattctaccgtggggtagacttttaaaattctggctacagagatacttttccataaaagtggccacatggaactctccaaatctaagaagcatactgtgggggccttcatattttgtctaattcttttctccccagaacaggaacctgcacccttccttcttttaaagggcgacgtggtaaataaacatttttagacttgcaggccacagtctctgtcctaatgtcctcagctggtagttgtagctggaaagcagctgcagcccacatggaaatgagggagcgtggccccatgccagtgcagctgatgtagaggcgggcagccccgggttaggccctgtggagacgcaggcccccgggctctagaacgctgaattctagtgaattctggatggctctccctcacacccaggcccaccctccctcaaggttgcaccttctccacctgaaggaagctgccaggtggccataggagcccttctcttggcaggccagcttccaggcccagtggcttctcttacatcaggggcctccccttggaatgttccctgaaggccagacacgggcaggtagtctgtggtcaagcagccaccctgacaggaggctagatgccactgggtgtgctttgagtttcctagatgtggagagttctgtgtggccacttttatggaaaagcatctctttagccagaattttaaaataaagaggataacttcctggtgagaacagacgtggaaaggaaggcactttggtttcacgctcatgtaagagagggctgttggcggtcactcctcagaactatggccagccctggatggtagccagctgctttttgccccaaaagtctgtttagctgggtctctgcattctggaagcttgtcaaagcccgggcctttcctgggtcagggcagccggctttccttgtccacgtgtggccggctgttttcttggggagccccggccacagccggcaggactccctttgctccatgtgactctgagggcctcacaggtatttgcagcccaggtgctgtcggagcccagccgatgcgaccgacacacagcacaagcgtcatcctgttctgcctgtcccttgcgtgtggaggggactcgtgcccagggctctccttgctggcttgttggaatctggcttcaggtctacacggggcctctcgtttggtccagaacagcctggctcatcggctggggcttgcttgtgcagggctggagcgagcacgtgctagatggagacagcagactcggagtgtgcatttcttcgtgttgcaagcctggcctcacagtgccttcttcctttggttgtctgccaggggtagccctgcaccaggaggaagcttagaaatagcacaggtgggaaccggagagagagcactgttggggaagctgcggtcactcatcagccttcctggtgagaaaccaggggtttcctgctaattctggaaaggatgtttcagcagtgcctgcatgagacgcctcagatagaaaactggttatttttgtttcttagcactgccaccatagataacagctgtcacgatggacagtgtggacctggattagtccttcttgggaaaggagagtttgggttttgtaccgtggtggttctgggttctgggggaagagaatggaaccgtacgaggtaaaacaggagactctgaaggccacttggccatccaggcagaaagccagggatggagaggggcagcagggctgtgttcagtgctcccgccgtacgcttgtatgcgggaaaccactgcaggcggcccatgaagcctcctggccatgtgcgccctcccggtttggaccccctcccgtgtgtcttggctgcaggtttgaactgatgcgcatgtgctggcagtataaccccaagatgaggccttccttcctggagatcatcagcagcatcaaagaggagatggagcctggcttccgggaggtctccttctactacagcgaggagaacaagctgcccgagccggaggagctggacctggagccagagaacatggagagcgtccccctggacccctcggcctcctcgtcctccctgccactgcccgacagacactcaggacacaaggccgagaacggccccggccctggggtgctggtcctccgcgccagcttcgacgagagacagccttacgcccacatgaacgggggccgcaagaacgagcgggccttgccgctgccccagtcttcgacctgctgatccttggatcctgaatctgtgcaaacagtaacgtgtgcgcacgcgcagcggggtggggggggagagagagttttaacaatccattcacaagcctcctgtacctcagtggatcttcagaactgcccttgctgcccgcgggagacagcttctctgcagtaaaacacatttgggatgttccttttttcaatatgcaagcagctttttattccctgcccaaacccttaactgacatgggcctttaagaaccttaatgacaacacttaatagcaacagagcacttgagaaccagtctcctcactctgtccctgtccttccctgttctccctttctctctcctctctgcttcataacggaaaaataattgccacaagtccagctgggaagccctttttatcagtttgaggaagtggctgtccctgtggccccatccaaccactgtacacacccgcctgacaccgtgggtcattacaaaaaaacacgtggagatggaaatttttacctttatctttcacctttctagggacatgaaatttacaaagggccatcgttcatccaaggctgttaccattttaacgctgcctaattttgccaaaatcctgaactttctccctcatcggcccggcgctgattcctcgtgtccggaggcatgggtgagcatggcagctggttgctccatttgagagacacgctggcgacacactccgtccatccgactgcccctgctgtgctgctcaaggccacaggcacacaggtctcattgcttctgactagattattatttgggggaactggacacaataggtctttctctcagtgaaggtggggagaagctgaaccggcttccctgccctgcctccccagccccctgcccaacccccaagaatctggtggccatgggccccgaagcagcctggcggacaggcttggagtcaaggggccccatgcctgcttctctcccagccccagctcccccgcccgcccccaaggacacagatgggaaggggtttccagggactcagccccactgttgatgcaggtttgcaaggaaagaaattcaaacaccacaacagcagtaagaagaaaagcagtcaatggattcaagcattctaagctttgttgacattttctctgttcctaggacttcttcatgggtcttacagttctatgttagaccatgaaacatttgcatacacatcgtctttaatgtcacttttataacttttttacggttcagatattcatctatacgtctgtacagaaaaaaaaaagctgctattttttttgttcttgatctttgtggatttaatctatgaaaaccttcaggtccaccctctcccctttctgctcactccaagaaacttcttatgctttgtactagagtgcgtgactttcttcctcttttcccggtaatggatacttctatcacataatttgccatgaactgttggatgcctttttataaatacatcccccatccctgctcccacctgcccctttagttgttttctaacccgtaggctctctgggcacgaggcagaaagcaggccgggcacccatcctgagagggccgcgctcctctccccagcctgccctcacagcattggagcctgttacagtgcaagacatgatacaaactcaggtcagaaaaacaaaggttaaatatttcacacgtctttgttcagtgtttccactcaccgtggttgagaagcctcaccctctctttcccttgcctttgcttaggttgtgacacacatatatatatatttttttaattcttgggtacaacagcagtgttaaccgcagacactaggcatttggattactatttttcttaatggctatttaatccttccatcccacgaaaaacagctgctgagtccaagggagcagcagagcgtggtccggcagggcctgttgtggccctcgccacccccctcaccggaccgactgacctgtctttggaaccagaacatcccaagggaactccttcgcactggcgttgagtgggaccccgggatccaggctggcccagggcggcaccctcagggctgtgcccgctggagtgctaggtggaggcagcacagacgccacggtggcccaagagcccctttgcttcttgctgggggaccagggctgtggtgctggcccactttccctcggccaggaatccaggtccttggggcccaggggtcttgtcttgtttcatttttagcacttctcaccagagagatgacagcacaagagttgcttctgggatagaaatgtttaggagtaagaacaaagctgggatacggtgattgctagttgtgactgaagattcaacacagaaaagaaagtttatacggcttttttgctggtcagcagtttgtcccactgctttctctagtctctatcccatagcgtgttccctttaaaaaaaaaaaaaggtattatatgtaggagttttcttttaatttattttgtgataaattaccagtttcaatcactgtagaaaagccccattatgaatttaaatttcaaggaaagggtgtgtgtgtgtatgtgtggggtgtgtgtgtgtgagagtgatgggacagttcttgattttttgggttttttttcccccaaacatttatctacctcactcttattttttatatgtgtatatagacaaaagaatacatctcacctttctcagcacctgacaataggccgttgatactggtaacctcatccacgccacaggcgccacacccaggtgatgcagggggaagccaggctgtattccggggtcaaagcaacactaactcacctctctgctcatttcagacagcttgcctttttctgagatgtcctgttttgtgttgctttttttgttttgttttctatcttggtttccaccaaggtgttagatttctcctcctcctagccaggtggccctgtgaggccaacgagggcaccagagcacacctgggggagccaccaggctgtccctggctggttgtctttggaacaaactgcttctgtgcagatggaatgaccaacacatttcgtccttaagagagcagtggttcctcaggttctgaggagaggaaggtgtccaggcagcaccatctctgtgcgaatccccagggtaaaggcgtgggtcattgggtttgctccccttgctgctgctccatccctgcaggaggctcgcgctgaggcaggaccgtgcggccatggctgctgcattcattgagcacaaaggtgcagctgcagcagcagctggagagcaagagtcacccagcctgtgcgccagaatgcagaggctcctgacctcacagccagtccctgatagaacacacgcaggagcagagtcccctccccctccaggctgccctctcaacttctccctcacctccttccctaggggtagacagagatgtaccaaaccttccggctggaaagcccagtggccggcgccgaggctcgtggcgtcacgccccccccgccagggctgtacctccgtctccctggtcctgctgctcacaggacagacggctcgctcccctcttccagcagctgctcttacaggcactgatgatttcgctgggaagtgtggcgggcagctttgcctaagcgtggatggctcctcggcaattccagcctaagtgaaggcgctcaggagcctcctgctggaacgcgacccatctctcccaggaccccggggatcttaaggtcattgagaaatactgttggatcagggttttgttcttccacactgtaggtgaccccttggaataacggcctctcctctcgtgcacatacctaccggtttccacaactggatttctacagatcattcagctggttataagggttttgtttaaactgtccgagttactgatgtcattttgtttttgttttatgtaggtagcttttaagtagaaaacactaacagtgtagtgcccatcatagcaaatgcttcagaaacacctcaataaaagagaaaacttggcttgtgtgatggtgcagtcattttactggaccaacccacccaccttgactataccaaggcatcatctatccacagttctagcctaacttcatgctgatttctctgcctcttgatttttctctgtgtgttccaaataatcttaagctgagttgtggcattttccatgcaacctccttctgccagcagctcacactgcttgaagtcatatgaaccactgaggcacatcatggaattgatgtgagcattaagacgttctcccacacagcccttccctgaggcagcaggagctggtgtgtactggagacactgttgaacttgatcaagacccagaccaccccaggtctccttcgtgggatgtcatgacgtttgacatacctttggaacgagcctcctccttggaagatggaagaccgtgttcgtggccgacctggcctctcctggcctgtttcttaagatgcggagtcacatttcaatggtacgaaaagtggcttcgtaaaatagaagagcagtcactgtggaactaccaaatggcgagatgctcggtgcacattggggtgctttgggataaaagatttatgagccaactattctctggcaccagattctaggccagtttgttccactgaagcttttcccacagcagtccacctctgcaggctggcagccgaatggcttgccagtggctctgtggcaagatcacactgagatcgatgggtgagaaggctaggatgcttgtctagtgttcttagctgtcacgttggctccttccagggtggccagacggtgttggccactcccttctaaaacacaggcgccctcctggtgacagtgacccgccgtggtatgccttggcccattccagcagtcccagttatgcatttcaagtttggggtttgttcttttcgttaatgttcctctgtgttgtcagctgtcttcatttcctgggctaagcagcattgggagatgtggaccagagatccactccttaagaaccagtggcgaaagacactttctttcttcactctgaagtagctggtggtacaaatgagaacttcaagagaggatgttatttagactgaacctctgttgccagagatgctgaagatacagaccttggacaggtcagagggtttcatttttggccttcatcttagatgactggttgcgtcatttggagaagtgagtgctccttgatggtggaatgaccgggtggtgggtacagaaccattgtcacagggatcctggcacagagaagagttacgagcagcagggtgcagggcttggaaggaatgtgggcaaggttttgaacttgattgttcttgaagctatcagaccacatcgaggctcagcagtcatccgtgggcatttggtttcaacaaagaaacctaacatcctactctggaaactgatctcggagttaaggcgaattgttcaagaacacaaactacatcgcactcgtcagttgtcagttctggggcatgactttagcgttttgtttctgcgagaacataacgatcactcatttttatgtcccacgtgtgtgtgtccgcatctttctggtcaacattgttttaactagtcactcattagcgttttcaatagggctcttaagtccagtagattacgggtagtcagttgacgaagatctggtttacaagaactaattaaatgtttcattgcatttttgtaagaacagaataattttataaaatgtttgtagtttataattgccgaaaataatttaaagacactttttttttctctgtgtgtgcaaatgtgtgtttgtgatccattttttttttttttttttaggacacctgtttactagctagctttacaatatgccaaaaaaggatttctccctgaccccatccgtggttcaccctcttttccccccatgctttttgccctagtttataacaaaggaatgatgatgatttaaaaagtagttctgtatcttcagtatcttggtcttccagaaccctctggttgggaaggggatcattttttactggtcatttccctttggagtgtagctactttaacagatggaaagaacctcattggccatggaaacagccgaggtgttggagcccagcagtgcatggcaccgttcggcatctggcttgattggtctggctgccgtcattgtcagcacagtgccatggacatgggaagacttgactgcacagccaatggttttcatgatgattacagcatacacagtgatcacataaacgatgacagctatggggcacacaggccatttgcttacatgcctcgtatcatgattgattactgctttgttagaacacagaagagaccctattttatttaaggcagaaccccgaagatacgtatttccaatacagaaaagaatttttaataaaaactataacatacacaaaaattggttttaaagttgactccacttcctctaactccagtggattgttggccatgtctccccaactccacaatatctctatcatgggaaacacctggggtttttgcgctacataggagaaagatctggaaactatttgggttttgttttcaacttttcatttggatgtttggcgttgcacacacacatccaccggtggaagagacgcccggtgaaaacacctgtctgctttctaagccagtgaggttgaggtgagaggtttgccagagtttgtctacctctgggtatccctttgtctgggataaaaaaaatcaaaccagaaggcgggatggaatggatgcaccgcaaataatgcattttctgagttttcttgttaaaaaaaaatttttttaagtaagaaaaaaaaaggtaataacatggccaatttgttacataaaatgactttctgtgtataaattattcctaaaaaatcctgtttatataaaaaatcagtagatgaaaaaaatttcaaaatgtttttgtatattctgttgtaagaatttattcctgttattgcgatatactctggattctttacataatggaaaaaagaaactgtctattttgaatggctgaagctaaggcaacgttagtttctcttactctgcttttttctagtaaagtactacatggtttaagttaaataaaataattctgtatgcatttctgtctctggtttggttttgtccctcctggaagcatcactacactttggtggcagggaagctgagctatgtggggcacgtgtgttcacgcatgttgcctggaagcgttctccagaaaagcattgcctcttctctgacagctgagctttctcagcatgcaaattgccagtaaagacgacagggaagctatctgtttctccctccattaaatcatctggaaagaaatttgaatacataaattacgaaactctgtactgcagttccgactgatttgtagacttttttcctataccttccactaacaacagtcaggccaaggcaagtctgatctgcatgaccccaaggcagaggacttcagttcttcacatttcccatgtgctttttggtctttcacagctgacatgcccacctcggggggatgctggtgagaacccagtgggcctcacgcagaatgtgggtcactggaggagctccaaagtcctagttactttctagctgctgctcagtgatctctgtctgcccctagggaccctacaatgtaaacattatttttgtcaggggaaatggcatgtatggcaaggtgtgttctagaatcagactaaggattcagacacatcaggcagagaagctggtcatttccttcaactttatcatgggaaattatgctccaatagcaaaatcgggccagtagaagaagagctgtccagcaatgtataggtagaagtaaaccgaagaccatggttacttcagacctgttgagcctcagaagtgtttgcacctaaaagcaaaggcctttctgaaaggggactctcagctggggtgcggtggctcacgcatgtaatcccagcactttgggaggctgaggtgggtggatcacatgaggtcaggagttcaagaccagcctggctaacatggtaaaaccccatctctactaaaaatacaaaaaattagtgggacatggtggcgggtgcctgtaatcccagctacttgggagggtgaggcaggagaatctcttgaactcaggaggcagaagctgcagtgagccaagattgtgccactgtactgcagcctgggtgacagagtaggactctgtctcaaaaagggtactcaagcttggcattgcttcagggttactgctcagtgttgtcaccgagtgcctggcactcaggggatcttcattaggtgactgatgatgaggaggtctcaattctgaggctggaaagcccaacagggcctcctccttccctggtcaggtagatgctgcccttccaggttgccacagtgcagtctgcacttggcctgcccagccagaaggagcagcaatatctaaggatgaaggtgctgggtcttcagaagcattagaacctttcccctccaggccatttcttaagactgcaagccctcaagagctatttctgcatttaccccccaagtccaggtatgagtccatactcactcagatgtgtgatttttgtagtgttctaatgttgctaaaaagaccttcacatccattctctcaccagatgttcacaatcaccctgcaaaggaaggattttaattactcttacagatgagcaaacatacaggcatgctcaagacccctcccccgcccccccacctccccaccagctaccaactcaggactcagcctctcagccttttctgctgtggttctcaatctggcttcagcactgccagaactaagcaggctctgtgcatactgacaagggatgctgggtgaagtacacagcccaggtgtgaatgagacttctggggttctccctggagaacttcaggggccacagcggggggaaatgatggggaagttcttgaagagggagctctgggcctcccaactggataatatctaaaaatttaaaaaatgttatggcatgctgccaggcagtctgaaatataacactggagcccagtcctgggggccccttgcttgccagtgtcctgggacagaattgcccatagcacagacagatctccacattagcaaccatgcagccagacctgtgcacaccgcccagcaccacctccccccatcccccaatatgtgggctttgatctgttttctagcaaatgatccaggtgtacttgcaaagggagtcccctaaaggctactccaaatgcaaaaagcgtgctggcggccttgactgcttcctttggttttcttgtgggtttttgtttgtttttttttttttttttttttgagacacagttttgttcttattgaccaggctggagtgcaatagtgcaatctcggctcactgcaacctccgcctcctgggttcaagcgattcccctgcctcggcctcccaagtagctgggattataggcacccaccaccacacccggctaatgtttttgtaattgtagtagagactgggtttcacatgttggtcaggctggtcttgaactcctggcctcaagtgatccgcccacctcagcctcccaaagtgctgggattataggtgtgagccactgcgcctggcctggttcctttgttaggaagctgcaaatgcttttcttaatagtgaatgaatccaaacactaactgatgaattttttaaatgtagtcaagtgaaaaatggtagttgtaagcacaccaacgtaacaagaaatttcccagagctcacctaccttcactcacttcctccaaaaaaaaaaaaaaaagcgatgttaccaatgggactcccaaaggaaatctgcccctagaaaacactgaacaggtagaatcttgctgggagaagcttggcacaagacccggtgctgtgtcataaaagcaaaacaaaacatgaaacagaaaggagattctgcttttaaaaagggaagacaccatggagagaagctaagcccggctattaacctgcgccttcaaaccaaacactaccagtgtgactgtaaaatggtgcagcccctgtgcaaaacaaaatggcagttccttaaaaaattaaacacagaattagcattgaatccaggaattcacctctggagattgacctgaaagcaaggactcggatacatatttgcacgccagtgtttgtagcagcatgatttgcaagaaccaaaaggagcaagtaacgtaagtgttcatctacagctgaatggatgaaatgtggtccatacatacactggaatattattcagccttcaacagaatgaaatcctgtcccatgctacaacatggatgaacctggaggacatgaggctgaaataatacgccagatgtagaaggaccagcgccgcatgactccctcatatgagctacctacagtcagattcatagggatggagggtggagtggtgagcaccaagtgctgggaggaagaaggaatagggagttaataggtacagagtttcagtttgggatgaggagaaagttctggagatggatggtggtgatggttgtacaacaaggaaatgtactgtatactactgaactgtatgcttgaaattattaaaatgagtagtaaaaggggcaaacacagagacagagaaatcatacagtagagcctcggtggcttcgaggctacccaggacctggacacacaagctcaaaggccaggaatggggtccctggagcagcggctgtctctgtgcttctgtaagcatctccaaaacaggtctgtggtccccacagtctgcgcaggatcacacagacccactgtgtagatttttggaagaaaacagatgactcggatttcattttattgtcatgaaaaccataactgaagctagttcatcccctgtgaaatgtccacctttcagagtgttctttctcctgacaataaaataaccctttgtgattttgttgggctaattcagagttttccaccctctttgtcttacaagcaatttttgaaaaagtttctcaatgcacagttgagtgctacatacaggattgaaacattcaattttctctagaggagcaatcccccggtcagttccctttggctggaaggaccatggttgagttttctt

SEQ ID NO: 49 - DNA, 5232 bp, Homo sapiens
ttttttttttttttttgagaaaggggaatttcatcccaaataaaaggaatgaagtctggctccggaggagggtccccgacctcgctgtgggggctcctgtttctctccgccgcgctctcgctctggccgacgagtggagaaatctgcgggccaggcatcgacatccgcaacgactatcagcagctgaagcgcctggagaactgcacggtgatcgagggctacctccacatcctgctcatctccaaggccgaggactaccgcagctaccgcttccccaagctcacggtcattaccgagtacttgctgctgttccgagtggctggcctcgagagcctcggagacctcttccccaacctcacggtcatccgcggctggaaactcttctacaactacgccctggtcatcttcgagatgaccaatctcaaggatattgggctttacaacctgaggaacattactcggggggccatcaggattgagaaaaatgctgacctctgttacctctccactgtggactggtccctgatcctggatgcggtgtccaataactacattgtggggaataagcccccaaaggaatgtggggacctgtgtccagggaccatggaggagaagccgatgtgtgagaagaccaccatcaacaatgagtacaactaccgctgctggaccacaaaccgctgccagaaaatgtgcccaagcacgtgtgggaagcgggcgtgcaccgagaacaatgagtgctgccaccccgagtgcctgggcagctgcagcgcgcctgacaacgacacggcctgtgtagcttgccgccactactactatgccggtgtctgtgtgcctgcctgcccgcccaacacctacaggtttgagggctggcgctgtgtggaccgtgacttctgcgccaacatcctcagcgccgagagcagcgactccgaggggtttgtgatccacgacggcgagtgcatgcaggagtgcccctcgggcttcatccgcaacggcagccagagcatgtactgcatcccttgtgaaggtccttgcccgaaggtctgtgaggaagaaaagaaaacaaagaccattgattctgttacttctgctcagatgctccaaggatgcaccatcttcaagggcaatttgctcattaacatccgacgggggaataacattgcttcagagctggagaacttcatggggctcatcgaggtggtgacgggctacgtgaagatccgccattctcatgccttggtctccttgtccttcctaaaaaaccttcgcctcatcctaggagaggagcagctagaagggaattactccttctacgtcctcgacaaccagaacttgcagcaactgtgggactgggaccaccgcaacctgaccatcaaagcagggaaaatgtactttgctttcaatcccaaattatgtgtttccgaaatttaccgcatggaggaagtgacggggactaaagggcgccaaagcaaaggggacataaacaccaggaacaacggggagagagcctcctgtgaaagtgacgtcctgcatttcacctccaccaccacgtcgaagaatcgcatcatcataacctggcaccggtaccggccccctgactacagggatctcatcagcttcaccgtttactacaaggaagcaccctttaagaatgtcacagagtatgatgggcaggatgcctgcggctccaacagctggaacatggtggacgtggacctcccgcccaacaaggacgtggagcccggcatcttactacatgggctgaagccctggactcagtacgccgtttacgtcaaggctgtgaccctcaccatggtggagaacgaccatatccgtggggccaagagtgagatcttgtacattcgcaccaatgcttcagttccttccattcccttggacgttctttcagcatcgaactcctcttctcagttaatcgtgaagtggaaccctccctctctgcccaacggcaacctgagttactacattgtgcgctggcagcggcagcctcaggacggctacctttaccggcacaattactgctccaaagaagacaaaatccccatcaggaagtatgccgacggcaccatcgacattgaggaggtcacagagaaccccaagactgaggtgtgtggtggggagaaagggccttgctgcgcctgccccaaaactgaagccgagaagcaggccgagaaggaggaggctgaataccgcaaagtctttgagaatttcctgcacaactccatcttcgtgcccagacctgaaaggaagcggagagatgtcatgcaagtggccaacaccaccatgtccagccgaagcaggaacaccacggccgcagacacctacaacatcaccgacccggaagagctggagacagagtaccctttctttgagagcagagtggataacaaggagagaactgtcatttctaaccttcggcctttcacattgtaccgcatcgatatccacagctgcaaccacgaggctgagaagctgggctgcagcgcctccaacttcgtctttgcaaggactatgcccgcagaaggagcagatgacattcctgggccagtgacctgggagccaaggcctgaaaactccatctttttaaagtggccggaacctgagaatcccaatggattgattctaatgtatgaaataaaatacggatcacaagttgaggatcagcgagaatgtgtgtccagacaggaatacaggaagtatggaggggccaagctaaaccggctaaacccggggaactacacagcccggattcaggccacatctctctctgggaatgggtcgtggacagatcctgtgttcttctatgtccaggccaaaacaggatatgaaaacttcatccatctgatcatcgctctgcccgtcgctgtcctgttgatcgtgggagggttggtgattatgctgtacgtcttccatagaaagagaaataacagcaggctggggaatggagtgctgtatgcctctgtgaacccggagtacttcagcgctgctgatgtgtacgttcctgatgagtgggaggtggctcgggagaagatcaccatgagccgggaacttgggcaggggtcgtttgggatggtctatgaaggagttgccaagggtgtggtgaaagatgaacctgaaaccagagtggccattaaaacagtgaacgaggccgcaagcatgcgtgagaggattgagtttctcaacgaagcttctgtgatgaaggagttcaattgtcaccatgtggtgcgattgctgggtgtggtgtcccaaggccagccaacactggtcatcatggaactgatgacacggggcgatctcaaaagttatctccggtctctgaggccagaaatggagaataatccagtcctagcacctccaagcctgagcaagatgattcagatggccggagagattgcagacggcatggcatacctcaacgccaataagttcgtccacagagaccttgctgcccggaattgcatggtagccgaagatttcacagtcaaaatcggagattttggtatgacgcgagatatctatgagacagactattaccggaaaggagggaaagggctgctgcccgtgcgctggatgtctcctgagtccctcaaggatggagtcttcaccacttactcggacgtctggtccttcggggtcgtcctctgggagatcgccacactggccgagcagccctaccagggcttgtccaacgagcaagtccttcgcttcgtcatggagggcggccttctggacaagccagacaactgtcctgacatgctgtttgaactgatgcgcatgtgctggcagtataaccccaagatgaggccttccttcctggagatcatcagcagcatcaaagaggagatggagcctggcttccgggaggtctccttctactacagcgaggagaacaagctgcccgagccggaggagctggacctggagccagagaacatggagagcgtccccctggacccctcggcctcctcgtcctccctgccactgcccgacagacactcaggacacaaggccgagaacggccccggccctggggtgctggtcctccgcgccagcttcgacgagagacagccttacgcccacatgaacgggggccgcaagaacgagcgggccttgccgctgccccagtcttcgacctgctgatccttggatcctgaatctgtgcaaacagtaacgtgtgcgcacgcgcagcggggtggggggggagagagagttttaacaatccattcacaagcctcctgtacctcagtggatcttcagaactgcccttgctgcccgcgggagacagcttctctgcagtaaaacacatttgggatgttccttttttcaatatgcaagcagctttttattccctgcccaaacccttaactgacatgggcctttaagaaccttaatgacaacacttaatagcaacagagcacttgagaaccagtctcctcactctgtccctgtccttccctgttctccctttctctctcctctctgcttcataacggaaaaataattgccacaagtccagctgggaagccctttttatcagtttgaggaagtggctgtccctgtggccccatccaaccactgtacacacccgcctgacaccgtgggtcattacaaaaaaacacgtggagatggaaatttttacctttatctttcacctttctagggacatgaaatttacaaagggccatcgttcatccaaggctgttaccattttaacgctgcctaattttgccaaaatcctgaactttctccctcatcggcccggcgctgattcctcgtgtccggaggcatgggtgagcatggcagctggttgctccatttgagagacacgctggcgacacactccgtccatccgactgcccctgctgtgctgctcaaggccacaggcacacaggtctcattgcttctgactagattattatttgggggaactggacacaataggtctttctctcagtgaaggtggggagaagctgaaccggcttccctgccctgcctccccagccccctgcccaacccccaagaatctggtggccatgggccccgaagcagcctggcggacaggcttggagtcaaggggccccatgcctgcttctctcccagccccagctcccccgcccgcccccaaggacacagatgggaaggggtttccagggactcagccccactgttgatgcaggtttgcaaggaaagaaattcaaacaccacaacagcagtaag

SEQ ID NO: 50 - protein, 1360 aa, Homo sapiens
MKSGSGGGSPTSLWGLLFLSAALSLWPTSGEICGPGIDIRNDYQQLKRLENCTVIEGYLHILLISKAEDYRSYRFPKLTVITEYLLLFRVAGLESLGDLFPNLTVIRGWKLFYNYALVIFEMTNLKDIGNLRNITRGAIRIEKNADLCYLSTVDWSLILDAVSNNYIVGNKPPKECGDLCPGTMEEKPMCEKTTINNEYNYRCWTTNRCQKMCPSTCGKRACTENNECCHPECLGSCSAPDNDTACVACRHYYYAGVCVPACPPNYFEGWRCVDRDFCANILSAESSDSEGFVIHDGECMQECPSGFIRNGSQSMYCIPCEGPCPKVCEEEKKTKTIDSVTSAQMLQGCTIFKGNLLINIRRGNNIASELENFMGLIEVVTGYVKIRHSHALVSLSFLKNLRLILGEEQLEGNYSFYVLDNQNLQQLWDWDHRNLTIKAGKMYFAFNPKLCVSEIYRMEEVTGTKGRQSKGDINTRNNGERASCESDVLHFTSTTTSKNRIIITWHRYRPPDYRDLISFTVYYKEAPFKNVTEYDGQDACGSNSWNMVDVDLPPNKDVEPGILLHGLKPWTQYAVYVKAVTLTMVENDHIRGAKSEILYIRTNASVPSIPLDVLSNSSSQLIVKWNPPSLPNGNLSYYIVRWQRQPQDGYLYRHNYCSKEDKIPIRKYADGTIDIEEVTENPKTEVCGGEKGPCCACPKTEAEKQAEKEEAEYRKVFENFLHNSIFVPRPERKRRDVMQVANTTMSSRSRNTTAADTYNITDPEELETEYPFFESRVDNKERTVISNLRPFTLYRIDIHSCNHEAEKLGCSNFVFARTMPAEGADDIPGPVTWEPRPENSIFLKWPEPENPNGLILMYEIKYGSQVEDQRECVSRQEYRKYGGAKLNRLNPGNYTARIQATSLSGNGSWTDPVFFYVQAKTGYENFIHLIIALPVAVLLIVGGLVIMLYVFHRKRNNSRLGNGVLYASVNPEYFSAADVYVPDEWEVAREKITMSRELGQGSFGMVYEGVAKGVVKDEPETRVAIKTVNEAASMRERIEFLNEASVMKEFNCHHVVRLLGVVSQGQPTLVIMELMTRGDLKSYLRSLRPEMENNPVLAPPSLSKMIQMAGEIADGMAYLNANKFVHRDLAARNCMVAEDFTVKIGDFGMTRDIYETDYYRKGGKGLLPVRWMSPESLKDGVFTTYSDVWSFGVVLWEIATLAEQPYQGLSNEQVLRFVMEGGLLDKPDNCPDMLFELMRMCWQYNPKMRPSFLEIISSIKEEMEPGFREVSFYYSEENKLPEPEELDLEPENMESVPLDPSASSSSLPLPDRHSGHKAENGPGPGVLVLRASFDERQPYAHMNGGRKNERALPLPQSSTC

SEQ ID NO: 51 - DNA, 1765 bp, Homo sapiens
attttatttgtatcaactcaaagcaaaatagagcattttattaaatatgtcttcataaattacgcacagtaaaatcccattaattggaccacacccagttcattatagtgtttattataattttagcattagttgaactgaaaattggtttttgtttactatgagaaaaaggtagactaaacaagatgaaacctgttgtttgcatattatgtttgtacatctttattagcaactatttttccaactattttcaactatttttccaactattttctagttataaaagcaatacataaatactatagaaaatttagcaatgcagaaatgaatttttaaaaatccctcatagatagccattgttaacattttggtgtattttcttcaagtcttagtaaaatggaacctttaaatatagatccctgtatcttaggaattagaaaggcagcaaaggcagttcctaatgagatggagaaaatgttgatttagtcatgcccttgtactgtgggggccatactgtctgttgacagagcatattaaaagacgttccctacattcgtcagccttagctaattggcagtctggtatttatgattttatattttgttaatcagcttgggagctgcagtaccccccagcctcctagaaacttggcttcccctgcctgggaggcctcgttccaggagtcgttgttgagagtcaagccagggaagtgtgtttttgtcagggagcagccagtcctgtgctgggagcatctcagggggcacctgccgttgaattgttctcacttgtgtttgtaagaatccaagtatgtcacccttacaccaagtgagcacacagtgacacaatcccctttcaatgtagataacattgcttcagagctggagaacttcatggggctcatcgaggtggtgacgggctacgtgaagatccgccattctcatgccttggtctccttgtccttcctaaaaaaccttcgcctcatcctaggagaggagcagctagaagggtaagtgccccaaatttcatgagctgacgttctattacaaaataagcagcgtgcttatgaaactgtgttgctgaggtaagagccctccctgccttgttaaagagaagaaaggaggaagccgcagtattgcctgtgctgctcgagtaggtcttgggtggagtcatggttctccattcttaggaggttgctgtttggaaaacagagatgttatcacccttactggattttgcctcatcagtcaagggttgcgtgtctgactgtgaccagtgagacggcagacgggggtgcgcttagggcttttctgccaagaatgacagcagttggtctggagtgctcacctccctgtgaaatcattgttcgcgcgaccctcatctgcctcaggatgctgtactctactacgcacaactgctccatcttttaagatattggaagtgagagcacgggaggagcatgggcggttcgttttgttagaaagaaacccggattcacgagatggtttttattgattagtttacaggatttgcactattgatagagtttttgccttggcacaggcctgctttgtgataggggttttaaaataaccgtgggcttttcactggaggataaaagccggtgcttattgcatgcacaattgctttccagccgtcagcctgtgtgtacctttgcatatgtacttttctctttaaactctcccttttaaatacgactcttgccaggctttaagtgaatgcttcaaaataaaaggagttatcaatt

SEQ ID NO: 52 - protein, 34 aa, Homo sapiens
MTAVGLECSPPCEIIVRATLICLRMKTTHNCSIF

SEQ ID NO: 53 - DNA, 5229 bp, Homo sapiens
ttttttttttttttttgagaaaggggaatttcatcccaaataaaaggaatgaagtctggctccggaggagggtccccgacctcgctgtgggggctcctgtttctctccgccgcgctctcgctctggccgacgagtggagaaatctgcgggccaggcatcgacatccgcaacgactatcagcagctgaagcgcctggagaactgcacggtgatcgagggctacctccacatcctgctcatctccaaggccgaggactaccgcagctaccgcttccccaagctcacggtcattaccgagtacttgctgctgttccgagtggctggcctcgagagcctcggagacctcttccccaacctcacggtcatccgcggctggaaactcttctacaactacgccctggtcatcttcgagatgaccaatctcaaggatattgggctttacaacctgaggaacattactcggggggccatcaggattgagaaaaatgctgacctctgttacctctccactgtggactggtccctgatcctggatgcggtgtccaataactacattgtggggaataagcccccaaaggaatgtggggacctgtgtccagggaccatggaggagaagccgatgtgtgagaagaccaccatcaacaatgagtacaactaccgctgctggaccacaaaccgctgccagaaaatgtgcccaagcacgtgtgggaagcgggcgtgcaccgagaacaatgagtgctgccaccccgagtgcctgggcagctgcagcgcgcctgacaacgacacggcctgtgtagcttgccgccactactactatgccggtgtctgtgtgcctgcctgcccgcccaacacctacaggtttgagggctggcgctgtgtggaccgtgacttctgcgccaacatcctcagcgccgagagcagcgactccgaggggtttgtgatccacgacggcgagtgcatgcaggagtgcccctcgggcttcatccgcaacggcagccagagcatgtactgcatcccttgtgaaggtccttgcccgaaggtctgtgaggaagaaaagaaaacaaagaccattgattctgttacttctgctcagatgctccaaggatgcaccatcttcaagggcaatttgctcattaacatccgacgggggaataacattgcttcagagctggagaacttcatggggctcatcgaggtggtgacgggctacgtgaagatccgccattctcatgccttggtctccttgtccttcctaaaaaaccttcgcctcatcctaggagaggagcagctagaagggaattactccttctacgtcctcgacaaccagaacttgcagcaactgtgggactgggaccaccgcaacctgaccatcaaagcagggaaaatgtactttgctttcaatcccaaattatgtgtttccgaaatttaccgcatggaggaagtgacggggactaaagggcgccaaagcaaaggggacataaacaccaggaacaacggggagagagcctcctgtgaaagtgacgtcctgcatttcacctccaccaccacgtcgaagaatcgcatcatcataacctggcaccggtaccggccccctgactacagggatctcatcagcttcaccgtttactacaaggaagcaccctttaagaatgtcacagagtatgatgggcaggatgcctgcggctccaacagctggaacatggtggacgtggacctcccgcccaacaaggacgtggagcccggcatcttactacatgggctgaagccctggactcagtacgccgtttacgtcaaggctgtgaccctcaccatggtggagaacgaccatatccgtggggccaagagtgagatcttgtacattcgcaccaatgcttcagttccttccattcccttggacgttctttcagcatcgaactcctcttctcagttaatcgtgaagtggaaccctccctctctgcccaacggcaacctgagttactacattgtgcgctggcagcggcagcctcaggacggctacctttaccggcacaattactgctccaaagacaaaatccccatcaggaagtatgccgacggcaccatcgacattgaggaggtcacagagaaccccaagactgaggtgtgtggtggggagaaagggccttgctgcgcctgccccaaaactgaagccgagaagcaggccgagaaggaggaggctgaataccgcaaagtctttgagaatttcctgcacaactccatcttcgtgcccagacctgaaaggaagcggagagatgtcatgcaagtggccaacaccaccatgtccagccgaagcaggaacaccacggccgcagacacctacaacatcaccgacccggaagagctggagacagagtaccctttctttgagagcagagtggataacaaggagagaactgtcatttctaaccttcggcctttcacattgtaccgcatcgatatccacagctgcaaccacgaggctgagaagctgggctgcagcgcctccaacttcgtctttgcaaggactatgcccgcagaaggagcagatgacattcctgggccagtgacctgggagccaaggcctgaaaactccatctttttaaagtggccggaacctgagaatcccaatggattgattctaatgtatgaaataaaatacggatcacaagttgaggatcagcgagaatgtgtgtccagacaggaatacaggaagtatggaggggccaagctaaaccggctaaacccggggaactacacagcccggattcaggccacatctctctctgggaatgggtcgtggacagatcctgtgttcttctatgtccaggccaaaacaggatatgaaaacttcatccatctgatcatcgctctgcccgtcgctgtcctgttgatcgtgggagggttggtgattatgctgtacgtcttccatagaaagagaaataacagcaggctggggaatggagtgctgtatgcctctgtgaacccggagtacttcagcgctgctgatgtgtacgttcctgatgagtgggaggtggctcgggagaagatcaccatgagccgggaacttgggcaggggtcgtttgggatggtctatgaaggagttgccaagggtgtggtgaaagatgaacctgaaaccagagtggccattaaaacagtgaacgaggccgcaagcatgcgtgagaggattgagtttctcaacgaagcttctgtgatgaaggagttcaattgtcaccatgtggtgcgattgctgggtgtggtgtcccaaggccagccaacactggtcatcatggaactgatgacacggggcgatctcaaaagttatctccggtctctgaggccagaaatggagaataatccagtcctagcacctccaagcctgagcaagatgattcagatggccggagagattgcagacggcatggcatacctcaacgccaataagttcgtccacagagaccttgctgcccggaattgcatggtagccgaagatttcacagtcaaaatcggagattttggtatgacgcgagatatctatgagacagactattaccggaaaggagggaaagggctgctgcccgtgcgctggatgtctcctgagtccctcaaggatggagtcttcaccacttactcggacgtctggtccttcggggtcgtcctctgggagatcgccacactggccgagcagccctaccagggcttgtccaacgagcaagtccttcgcttcgtcatggagggcggccttctggacaagccagacaactgtcctgacatgctgtttgaactgatgcgcatgtgctggcagtataaccccaagatgaggccttccttcctggagatcatcagcagcatcaaagaggagatggagcctggcttccgggaggtctccttctactacagcgaggagaacaagctgcccgagccggaggagctggacctggagccagagaacatggagagcgtccccctggacccctcggcctcctcgtcctccctgccactgcccgacagacactcaggacacaaggccgagaacggccccggccctggggtgctggtcctccgcgccagcttcgacgagagacagccttacgcccacatgaacgggggccgcaagaacgagcgggccttgccgctgccccagtcttcgacctgctgatccttggatcctgaatctgtgcaaacagtaacgtgtgcgcacgcgcagcggggtggggggggagagagagttttaacaatccattcacaagcctcctgtacctcagtggatcttcagaactgcccttgctgcccgcgggagacagcttctctgcagtaaaacacatttgggatgttccttttttcaatatgcaagcagctttttattccctgcccaaacccttaactgacatgggcctttaagaaccttaatgacaacacttaatagcaacagagcacttgagaaccagtctcctcactctgtccctgtccttccctgttctccctttctctctcctctctgcttcataacggaaaaataattgccacaagtccagctgggaagccctttttatcagtttgaggaagtggctgtccctgtggccccatccaaccactgtacacacccgcctgacaccgtgggtcattacaaaaaaacacgtggagatggaaatttttacctttatctttcacctttctagggacatgaaatttacaaagggccatcgttcatccaaggctgttaccattttaacgctgcctaattttgccaaaatcctgaactttctccctcatcggcccggcgctgattcctcgtgtccggaggcatgggtgagcatggcagctggttgctccatttgagagacacgctggcgacacactccgtccatccgactgcccctgctgtgctgctcaaggccacaggcacacaggtctcattgcttctgactagattattatttgggggaactggacacaataggtctttctctcagtgaaggtggggagaagctgaaccggcttccctgccctgcctccccagccccctgcccaacccccaagaatctggtggccatgggccccgaagcagcctggcggacaggcttggagtcaaggggccccatgcctgcttctctcccagccccagctcccccgcccgcccccaaggacacagatgggaaggggtttccagggactcagccccactgttgatgcaggtttgcaaggaaagaaattcaaacaccacaacagcagtaag

SEQ ID NO: 54 - protein, 1359 aa, Homo sapiens
MKSGSGGGSPTSLWGLLFLSAALSLWPTSGEICGPGIDIRNDYQQLKRLENCTVIEGYLHILLISKAEDYRSYRFPKLTVITEYLLLFRVAGLESLGDLFPNLTVIRGWKLFYNYALVIFEMTNLKDIGNLRNITRGAIRIEKNADLCYLSTVDWSLILDAVSNNYIVGNKPPKECGDLCPGTMEEKPMCEKTTINNEYNYRCWTTNRCQKMCPSTCGKRACTENNECCHPECLGSCSAPDNDTACVACRHYYYAGVCVPACPPNYFEGWRCVDRDFCANILSAESSDSEGFVIHDGECMQECPSGFIRNGSQSMYCIPCEGPCPKVCEEEKKTKTIDSVTSAQMLQGCTIFKGNLLINIRRGNNIASELENFMGLIEVVTGYVKIRHSHALVSLSFLKNLRLILGEEQLEGNYSFYVLDNQNLQQLWDWDHRNLTIKAGKMYFAFNPKLCVSEIYRMEEVTGTKGRQSKGDINTRNNGERASCESDVLHFTSTTTSKNRIIITWHRYRPPDYRDLISFTVYYKEAPFKNVTEYDGQDACGSNSWNMVDVDLPPNKDVEPGILLHGLKPWTQYAVYVKAVTLTMVENDHIRGAKSEILYIRTNASVPSIPLDVLSNSSSQLIVKWNPPSLPNGNLSYYIVRWQRQPQDGYLYRHNYCSKDKIPIRKYADGTIDIEEVTENPKTEVCGGEKGPCCACPKTEAEKQAEKEEAEYRKVFENFLHNSIFVPRPERKRRDVMQVANTTMSSRSRNTTAADTYNITDPEELETEYPFFESRVDNKERTVISNLRPFTLYRIDIHSCNHEAEKLGCSNFVFARTMPAEGADDIPGPVTWEPRPENSIFLKWPEPENPNGLILMYEIKYGSQVEDQRECVSRQEYRKYGGAKLNRLNPGNYTARIQATSLSGNGSWTDPVFFYVQAKTGYENFIHLIIALPVAVLLIVGGLVIMLYVFHRKRNNSRLGNGVLYASVNPEYFSAADVYVPDEWEVAREKITMSRELGQGSFGMVYEGVAKGVVKDEPETRVAIKTVNEAASMRERIEFLNEASVMKEFNCHHVVRLLGVVSQGQPTLVIMELMTRGDLKSYLRSLRPEMENNPVLAPPSLSKMIQMAGEIADGMAYLNANKFVHRDLAARNCMVAEDFTVKIGDFGMTRDIYETDYYRKGGKGLLPVRWMSPESLKDGVFTTYSDVWSFGVVLWEIATLAEQPYQGLSNEQVLRFVMEGGLLDKPDNCPDMLFELMRMCWQYNPKMRPSFLEIISSIKEEMEPGFREVSFYYSEENKLPEPEELDLEPENMESVPLDPSASSSSLPLPDRHSGHKAENGPGPGVLVLRASFDERQPYAHMNGGRKNERALPLPQSSTC

SEQ ID NO: 55 - DNA, 94781 bp, Mus musculus
  misc_feature (1)...(94781): n = A,T,C or G
cttattggccttgccactaaatggcccactttaggtctttctgtctctcagttgcccccttctggaggctgcgggtatggacagtgggaaaccaaaggggacctcagtgcctctacaaacaaaagctctgtgaaggtaggtggctgaagtcacacacaggactccatgcccttcttgtttgtgtattaggatgggcttccctcgtataggacttcatggttccctcctctgccccaccaatggcatcttcttgcatcaccaggcaatgcattggcatcattccgggtttaaggataacccaagggctctaggatagagacagagcatgttccgagcgttgtgaaggagagttctttgactcaagctctttggtacacgcatcacatccaggtacccagaggctggccagtcagccaagaggcctgtgatctcacaaacatgaaagctggagggaaggaaagaagtctctctctgctgggttgaaaagccaagtagtcagaagcagctacaacgtatagcagcaacgtatagcagcagcagatcctccccaccctggagagccctgaccacataggatgacgttcgtttgcttgcatcgctttccgtaacgtgtggcttcctacctcccccacctcaccaccgctccaggctccctggcaatcaactggtagtttagcaaataggcattggctccttgccccaggctagtggccagctctgttgctctgttgcttatggaaaagataatttaaacaagaccaccacctagggtatctgccttccctgtgtctctgattgttaagatgttctccaaataagaaattttggtcttgtatccagacagaccataagcagaactctgaagacaccactgactgaccaactgtgtggcaaaggagagaagggaagaaaaatgagggaacctagagagattcagcaaaggaggcagtcactaaggcagacttaggacggtgtgtgggatttcaactctgcctccaatagagaaaacctgggttgagggctaagctgattgaggccatgctatctagcattagaggccacaccaggtgtgccaggcaccacatcatgctttcatcagagtgtacacagtactggctgcgtacagagatgattgactggctgccagtggaattaaggttctgccccgccccacgtccatgctttagaccagccccctctctgccttagcctcggatagagcccaagccctttcttatcactaggtgccttctagatcccgtccactgccttggagctaaagctcaacgaggaaccacaaggtcagcctcaaaagcccaaggttctctacctgactacatatgttacatatgtactacacgtactacatgtactacatgttacattttcttgtgtttgcatgtgaagtgacccacagattcttgtgggtgtgagcactcagtcttcagcaggtggcgctgttctgggagggtgtagaacttttggtagatggagcttcccttggggaggtaggtcaccagatccggctttatatccttgccatcttcttgtttgctctttctttctatccattcagacatgagctcctgccaccacacaccactgtcctttcctgacagacacagggtgtcctcgaaccatgagccaagataagtgttgtcaggtgtttggtcacggtgacaagaaagatagctagtccaagctgaggtggggagtagtgcccatgcagcatcctgctctgccttcctcagcatcaggggccaggcctacaggattagtatttatgtttcctaggtgattccactgtacaaccaagtttgaagttagtgataagtctgagggaagagccacatgagctctgcctctgtcatagccctatggctttagccgagttagtgttgtgttttctttataaactttacatagcaataattttatttcatgaattgtgcaccgtctggagtgtcttaagtgctggataaatggttgccacccctccttgccttctcccctcctcttcctcctcttcttcctcctcagacaagagcacatcagttaaaatgctgtcagactgtggccagtgagcaatggataaatatgtattgtgtgtcttgcaggcttcctgctgtttaccgatcatgttttattcatgcatgttgcatgcagaaggctccctaagaggggagaattttcaacctgaggtttggaagacagagagctaaatctgtataaatggagggcaaggagggcaactgtaagatgaggagagcgacgttctcaccaaaggtttcactggctactggcaaagagagcccgatgatgcttgaaaagctgggcgctccttcctttctagactggtgctgccctctagtgagaggagtcacagtcagcctgagtgtcctcatcccggaggggaccaggcagagttaaaagaaaggcagcccagctacagaaacatacactaaggaggggacgccatacaggacatcctccccaatcttttcagtcctgatacagttatggtgacatccgtcatattgtgtgcacccaccaatgtgtctaatagtcccagtttgacaaggcagatattcttattcccagatgtggcattgagatattattggtcatctagaaattgaggcatgagccaaagtggttgagtctgactgagtcaacggccctctttctatgttgtcatggtagcattttgtagggcagttcctagaacccgaggtcgcatccacctcctcttagaacctgaggttatctccatctccaccatggagacgctggacgtccttagagctgctccctcccctctctgagtttctgctttctcatcctactcctcagacatgctcctcagaatggttccctgaccacaactttatatgaagaagtggtcactccaggatggcggggtgagagcggctccactttcagaatgtattacttttacgactacacaaactagagatgagttagatcattctcctcctacagaggcagaagcagtcgccagcgtgtaccaggccagatgtcacagaagagaaatcttcacattctgagagtaatctctgtatctctctccaggacaccactacattccctcaaagactagactttttttttgtcaagcacagaacccttagctctgcccttcccccaccctgtgttgtctcactcagttttgttaagaagtcaaggctgtcatgtgagacctctgtcctttggtgtcctcctgaggctgggctttagctcctcccttgccaccttctcaaggacagccaggagtgtctgctgcttgcatttccctttgattagcaccttggactctattgcaatctctgaaatagtctgtgctttagacacagtctctagggaccagagaggtgacacagatggtaaagtgtttgcctcgcaagtgtgaggaccttagtgcagaatgctagaacccatgctaaggtagattccagtggtcctgaggcaagaagggagattcccccagaagctggaggcctgctctcctgtcctacacaatgaggactaagacatcctgtggctaccaaggtagacagtgaggtgaactcccaaggctgtcctctacctctgtgtgtgcaggtgtgtgtttgcactcacacattcaaacacttgcacacatatacacacaccatatacacatcatatacgcagatgctctctctctctctctccctctccctctctctctctctctctctctctctctcacacacacacacacacacacacacacacacacacacacacacactcagttaaaaagaaaggaaaaaatacagtcttagaatctttcctcattcgttcctgggatttcagtcattggaaaatctctacgagtcttctctaattactccttataaacatgaaccttacacataggactagacaggcaggccttagctagatgcatgtcagtgtttctctgtggaaaatagagatgctgacgtgtgccttcttgtcaatcatgataaaaatgtggcaaccatttcactgtatgcaaaggaactgtgaaaggcctttgatgttcattaatcacttaagcctcaaagcagccctgagaggcaggggcttttatcacagccactctaaaatgagtgtatggaggctggagcgtccccaaggctgcacagctggtgactccagaccctggcctcccagccccaaggtcagtggcctggaatacattggtcggctcccctcctctgttgttgatctagcctccgatcattctccactgagtatggatttgaagaaaaggatatggtgataaaagaagttggtcacaagtatagtaattataaaatgaactaggaaaacagagctgtttctgtatgttccatattctctaaagcaatcggctctcacctgggatcagcctgcacccttcactttcaaatgaggaccaagtctcctgtcatcctgactgagaaagataagagctagaagtgaaggtcaccattttcctcacaggatgatgtctctgtcttgtccagcccatcccctacaacgccctaagttggtgggtttggtgagaggtgtatggtaggggtatctatacgcacaccaaatgggaaggtgtgaatgtggccccgctgtctttccttctcctgttcttctagcgcagagcaaagccatgggcaccagtggaagctgatgtttttcagctgagccagggtcaagcctgccaaggctaagggatgtactactgggcctgtcagcagcaaagtgaccctcagactggaacagcctgctctctaaccccctgaggcccatagcagttgcctttgaaggggctgaaagagcctcctttgtcttgtgtttgtgcagatccagttagtctgagatccttgcaaatgccttttgcatttaaacagctgcctttttgcagcaaagtttgggggttgatttggcctcagtcttccttctgcatgtgtgagctccctggaaacccagttctgcagagggtttggtgtaaagccgacatcaagaagtcacaagtcagggaccaagcagctgagattctgtgacctacacatctccttgggtaaatctgaatgagggcagctgactatgatgttaatggaatcttgagatctcaggcagaaattacatgttgcttagcgtgccacagaagtactcaacagataggtgtgtgggcatatgtttgtgtgtgtatgtgtgtgtgtctctgtgtgtgtgtgtgtgtgtgtgtgtgtgggcgcaagcaagcaagcaagtgcacacatgccgtggcacactcggagatccaaggccaacaggacaacaacaattaatgaaaaataacgaagacgtgaaattggagaagatcaaggaaggggcacatgggagagctagatgggaagaaataaaaggagggattataatctcaaaagtagaagaataaatctattatgctaaaaaccaaaggaaagggttgggataatagagaggagtagtgtgagcccatagctgaaaccatggcttgggtaagctgactccgaagtcaggaactctgctcttgaagaggatctgagtttggttccatacatgcaggatggttggtgactcacaaccacctccaaatccagctccaggttatctgatgccctcttccggccttctcaggcacttgcatgcatgtggttcacgtacatacacccagacacagacatatatgcataaaagttactgtccagtgtcctgtgagttcagggtccctcgggtccctattcggcagctgcagctgtacactaagtttcaggaggtcacagcttcagcaacctccagcgacctccgttccctcctggaccactacttcctccttgaaagtctattgctactagaaagcaagggtcccactgcgcttgacaggtaacttcagagaggtaaataaacactgatgaggatagaaaatagcagctctggggcttcggtctcggctatccaacactcactcataagaaccccttaatggaccggaaagccctggttctggccctttgcctgtgatgtgtttagctacatatcgctgcagacaaatgagggaacatttgagagcgcatctatccacagtagattgaatagattacgggggtgtagggatgtaaagtggtttgggttattcagggtagttaaaaaaaaaaggacaactctggatttgtggttttctggcttcctttctcaagttcttcctcagcatgcccttcctatggtgtacataaaccaagcagacagcagagggcacccttgagccacaaatgtgaaaacaacaacaacaacaacaaacaacaaaaattccctctggaccaggaactgttctacacagggatgctacagccaggtgcctgatagtgcctcttatctctcaggcagaacatttccaggcactttgctaatagacaaacaaagccatagcttgatgacaaggagagctggggacagattcagaagaaactttctgtgagatccttatgcaccttatactttccctaaggacgcaggggaagccttgtttcaaggctgctccatccgagatcttggggctccatacagtaaagggcccttctcacatcgtactgtcgggctatccgtagaaaacttctcaaaaccttcttgctgttggtttactgtgacatttctctgaggaagagccactggcccccagagacactagggatgtactacagtggtggagcagtagcttatcattcatttgacctggggatcctccctgtatcactatgaacacgcacatgcatgtatacatacacacacacacacacatacacacacacattcacacacatcagcttgcgcacatcagcttgcacacattccactctttgttcaactatcagaatctatctgcactgtgacaaagcagaccgacatgctcatcatgtgggtattattcctttacaaagttaacatgttttcccttttgaaactttccccttaaataagaatcactgtgagatctaggggctgtggctgtccttagagtattttgaaacagattaatttcttactggcagcctattgttatgatacaaaacattatttttcattgtgtctgtcttactgtctacaggccaaagtcaagtgattgctttggggctctgggtccctacttgtaaagacccagggtcctttgccaaacacttagaaacatttgaacttgggtctatggcttctgaaattttctttttggctccttctgtatgtcagagacctctgtgaagaccaggattcttaactctttgaagtccagtgctgagtctccaaccctaaggttagcacttggctcatggaaggagcttgtaaatttgatagtcagtttacattgctatgacgaaacacccatagagataacttagaggacaaagaatttatcctggctgatgttttcagaggtccatagtcacctgattctattgattccaggcctatgctgcggcagaaggccacggcagagctgcaggcttcatggtgggcaggaagtggaatgactaagaagacttggggataaaatgaagctatataatgcacacccccagtgaaccatgtgctctgagccccacttcctaaggaaccagtcggtagacaaatgtgtcttcctgtgagcttaggttccctttgcgacactgattcccacatagaccctgtagcacccattgcttcggatagtcgttggatggctatctctgtcatgaaggattgctacttaattattcatcagcaagggctggagatgatcagtgcttagaaagtgctatgaagccagcagtttagttaagcagttacagcctgtgagtttaggctcggtgcttttttccaagtgtgatccaaacattttatgcaaagcctgtgtactatacttgccaggcaactaaatacacagccaaggcctgtcatactatcaagtgtcacaagcaggcttgcttcctaaacaaccataaccacagtgacaacagtaattccatcacgggggggggggggtggcaaaactgctgaaactgtccactgtctagtcacttcttgtccaagtatactcttgtgtggattttgacatttattatatttagagattgtaaatatttagtttcatttgaaaatactttgtggactagaccatactcacttcctaagaatgcttgagtttctattagtgcctggaatctttccaggagagagagagagagagagagagagagagagagagagagagagagagagagagagaatagctaaaatgaatgtaaaaataagagttgtaaaaattctttcaaaattcattgtgtgcacacatgtgcttgtgcatctctgtgtgtagagtgtatgtgtatatagggaggagaatgtccatgtataggtacaagtgcatacatatatatcccacgctgacgctgggcgggcatcggtctgtgagaagctgcaggaccccactccaggggtggggaagtgcagtctgaggtccgcaggctggagttggctcggggatcctggacctgcatgaaggtcgagggtaacaggttctcagactcttgggcattcctgacaccactggatgctgtggaagagctgagaatggaatgggggccatcagactggatctagccagtggccaaagggaaaagggcagggaagagagctctgcctggttcctgaggggaggagagagtccttgacttgctccatgcttggcttgatggaatctgtgactgggagcacagagaggcctcctgctggagattaaagggtcagctctttaaacaaaggcctattccattgctccccatggtgggtcccaatgagaagaggcagtccatggttttaaagcatttattgtcatggctgagagttgtgatgagtgaaacagtaccccactttctcagggtgagcctgaggttaaataccttttgcagggaggagtgtctgggaaggggagcttaattgtctaagcccttcaggcctttaggtgcctcattaaaaatggagatctgtcttgaggctaagtgatctgtggtcatgtcctttacctgtggaggggcttggggcattgcccttacatgactgatgcccacagatctatggagtggagagctgtggcctcgtgtcaggagcctgggatctaggagcatggcaaaacgcctaccgtctcttgcatgctacggggttttaaacttagctcaaccagaaaccagactgcctctcacagtccaccaaaactaagttgggtgactgatgcactccagtgacctttatgtctcccccttcctcgtactgaggttccactctggctgccatggtaggctcatttgtgagtactaagaaggcaagtgagggttcttatacttatataggaggtacattgctgactgagccgtctctcaagcactcctcccctttttagtgacagaaacactaccgaatgataggcttggatttagtatttcggattggtgtgatacaaaatcctctaaaggtaagagaaactggaggaggtgtctgtgaatatcctgttaaagaaatctatcaaattctgtagataggctggagagatggttcagttgttaacaatatgcatgtgtgtatgtagaaggtctcttatagaggatccaagtttgttcccaggatgcccatcagttagcgcagacaacccctaactccagcccaggggatttaatgccctctcttccagactctgaggccacagcactcacgtgcatatagccacacatgattcaaaataaagcctaaaacaaacaaaatgctgtggaattctaccctgataaagagtattttcatggagttctcaaagatgaaagagtccttgtgatgtcatttctaataaccaggtatcttacctggccagtataacattctctttagcctttggggactttgctccttgaagggtttctatgttttaacctaaccttttgttttcttctttcaggaatcctgttcacgatgttggtatttggaccagcctgtggatttattctgggctctttctgtaccaagatctatgtggatgcggtcttcattgacacaagtaaggagcagatcatagttgctaagcgcccttacaagcatttccattcttataagggagtcttcagcctgtggctatttaagaccctcccactaactcagcgttttatttctgtgacatatatgactgagacaatcaagtcaaaaccaataaaggactattgtagctcatggtttcagggtccacatttggttgttttgggggcctcttggtaagataccacttgattacagagagcacaaggtagagcagagccagttaccacatggtggctgtgaagggaggaaagagggaaaaaatcagggtccccatatcctcttcaaaggcacatcacagcaacccaactttcgccacagggccccattttacatctccttaaggtacacacacacacacacacacacacacacacacacacacacacgtgcaaatacaaataaaaacaaaagcatcttaagcaaagcttgctgtgcttttaattagaagaggacatatgtttctcagtagctctgggcttcacatctgtgattctgcagttaaaccgtgtggctgtctgagtaaacgatattgctcttagttatgagtctcattgctgtgaccaaatacctcacatgatggctaatcttggttgtgaacttgacacacatggggaaagtggacctccaataagaaattgcctccatcaggttggcctacaacctgtcctgtctgtggggcattttcttgattgctaattggtataggaaaactcagcccactgtggacagtaccattccctatgtaggtgggcctataagaaaggtaactgggtgtggtcctgggtatgaaccaatagcagcattcttccatacagtctgctttaactcctgcatccaggttcttgcatccaggttcctgcctcaaattcctggcctgacttctctctttaatgacaacaatagaccatcactaaatatatgatgaactaaaccctctcctcccagatttgttttgttttgttttgttttgtttgaggtcaaagtattttggctctgcaacacgaaagcaaaccaaaacgcttgacattttagaagagaaaaacttgactttggtttataactctgagaagtccaccacagtggtgaggacgtgtcagctggagtgtgaggctacagcgcacattgcagccatagtcaggaggggggggagcaatgaactacttagctttccgtggatttctgccatcttggtaacaggtgtttttaattgagaatttcatacgtggatatagtgtatggatggatcaaagccacccccattccctctcctccaatttctcccatatttacttttctctccaaacttcatgttctctctctccctccnnnnnnnnnnnnnnnnnnnnnnnnnnnnnnnnnnnnnnnnnnnnnnnnnnnnnnnnnncttccccctctccctctccaagtctacttaatgctgcttgaatgtgcatgagcataggaccacttgctggatcatgagcagccttgtggggtcacgtacctgatgaaaacttactcttcctccccagccaccattagttgccagtagctgctcagctgagaacagggcatcgtgagcatccccagtccgtgctgggattttgcctgccctgatcttgtgcatgtcttattacgctatcacagctactaagtttgagtgtacaacagccttgtaatgcccagcaaataatgtgtcatcccttgggaaccaccccccaccagggtctcctctaatttttattcttctacgagctaaacacacatattcaagatttcaaacctagcactcacatacaagaaagaatatagctgtcttatttgggcttgggttacctcaatcccagctctgtacatttatccatgtttcacttttcttttttttaaatatttttattatgtattttcctcatttacatttccaatgctatcccaaaaagtcccccataccctcccccccactcccctacctacacactccccctttgtggccctggcgttcccctgtactgaggcatataaagttggcaagtccaatgggcctctctttccagtgatggctgactaggccatcttttgatacatatgcagctagagtcaagagctccggggtactggttagttcataatgttgttccacctatagggttgcagatccctttagtccttgggtactttctctagctcctccattgggggtcctgtgattcatccaatagctgaatgtgagcatccacttctgtgtttgctaggccccggcatagtctcacaagagacagctatatctgggtcctttcagcaaaatcttgctagtatatgcaatggtgtcagcgtttggaagctgattatggggtggatccctggatatggcagtctctagatggtccatcctttcgtcacagctccaaactttgtttctgtaactccttccatgggtgttttgttcccaattctaagaaggagcaaagtacttttctttacagcaaaataataatccatttctattagtcctcctttcctttaggtacttgagagttgttgcttcctcttaccacaagagggcagaaaagcatcacaaatttattctttttagtcattccaaaaacccaaccagggtaatgctgctacctgcagtgggtaagtgggtggatcatcccacctcaatgaatacataatccctcttgggcatacccagaggcttgcaccccccttcccccagcacattccactggcaaaagggcttgaccatcatggctgctctgtggtaacaaatagtcctcacattttactgatttggatatgctgaaaattaatttggtagataacttgttcaacacagattggtgttggaaagacgtgggacttagctctctatggctgttttggggcccagacccacagatgtttatcctgatcccagtgtttataatttccaggcaggacattatacactggtccttaaagtctgtgatcagaagtaatgcatcctgctcattaccagcgcaagtctataacatatgtagagtcgtatgtaaagttacccatgaaggaaacacctcgtctcatagctaactttttttttttctttttttcttttggtttttggctgtcccggaactctgtggaccaggctggcttcgaactcactgagatatgcctctgtctcccacgtgctggaattaaaggtgtgtgccaccacacctggctgttgtctcacggttctgaagtgggtctaggactcaggagcagctttagtggggtgtaaccaagtctgcagaccgaaaaggaaaggatccacctcagagtccatgcagtggtggccaggctgaccctcctggtcctctctacaagagtctgtcaccaatcctcctgacagcatgtaatgtctgtgtcattctttcctggaaaagagccagttacacagagccatggttaagctagatataagaatatgaattccaggtggaggcaaggatttgggggtgtcttagttagggtttctgttcctgtaaagagttaacatgaccatggcaactcttataaaggaaaatatttcattagggctggcttacagttcagagatttagtccatcattgtcatggcaggaagcatggcagtatgcaggcagacatggtgctggagaggtagctgagagctctcctctggatccacagacagaaggaagtcactgagccactcggcctggcttaattttctcagacctcaaagcccagtgacagacctcctacaaaaatgccacacccactccagaaaggcctctttgggtctatggaacatcataagggcatcagctgagatctgttaacagccttatgcttacaactattgtggccactgtctgaaagagaacacgggatttctacatagtttcatcagtaacaaagccccattcccttcctctcctctccctgcaggcagatgggggaggggagagctgatgctgcttcttgggctgatctgttctccggatcaataagaactctcagtccctgggttcccaatccatcatctcttgacagtgctaaatttactaattcaccccaaagaaataatgtggtcttaaatccaatcaagttgctctctgattcagtccattaatcccactgatatatttacttgtctctaatgatgttacaaatttccaagtagaaaataaaatcagacgcagccttatttgttcctgccaagtgctaggcctggacaggaagggatgaaatgcccctgtcttccagctgcctggccctttgaagtccactctagcaagcaaggatgggctgctaagggacgctcaataaaaagtcagctgccatctcctgcagacagaaaagctagctccaactggtgtgccaaaggcagcactctccaggggcagccaggggctggaggagactggaagctccttgggaaagctgccttggaaagcgatgtgtgatatgttttgtattggccatttgtgttatcaggagtgacccatcaaagtgaggcctagggggtggccagaatgtctgagccagaaagaaccttgggcagcacgcactttcagatctttcatcaaattagtgaggatcctgaatctcaggtactgaaggggaggagactcaggtacggaaggggagggatctggatctcagatccggaaggggaggggtctgacccgaccagtggaggcgcatttgtatacaaaccaagtctcctgtgccatgtggcagatttttcccactcatgatcccctctcccagacttcatgaaagagcctcctctctcagtgcctgcagaagccatggatagaatggcagctgggagcacttaacctatcacctacaggccctcagcttgccaagaggatgacagcactaaggaccccttcgagttgtcatcatctcttcttgtcccctaagccctttgagaagttaagcgacctcctccacccttgattggcattaatgcctctgtgtacacctcagatggacacttttccttactgtctccatgtcttactgatggcagccttcctgagcacaaggtgaccagagaacctttgctaagagaggatgtctgtgagtcccacagcttcttgaaggtacatgaaagtcagtgctgattatcatcactagagggcagaagagcaccactagttagggactcaaccaggaaaatctcctttccaagcaattttcattgtttctgcccttgtggcagaaccttgtcgtgtctggtgcatttggctgtattttgaggcaggatttctatgtcctttaagggtcctaaggatagctcttctttagggctgcccaccatatacaaatgttatactctacatgaatgcctgtatgcctagagccacatgcatctctggaatctggggttggggagcatgcagggaaagcaatccctgccttccctggaatttatgtggaggtggcaaaggtgtctatggaaggcccgtactgtgggacaaatggaaggaaagtgtactttcccctgacacggaggttgctaaggaagcaacagcgccaagagaaaggaggcttgcctggggcctgggagtcagtgcagctgtgggagcaggagagcaggttacttgcaggaatgagccagcagagtggcagaagagccccaagagggggtggaggtgggcagcagaggctcatctggtcaggcttaggcatgggactcggtggctggcctttcatctgggtttgatcctgtgtggctccactgctccatcctgtgagggctggggaagaagggatgagacttgcagagatctctcttcagaatgtcttgttgaaactaaagtttgaccgtgaacacagaaccttgacgacggggctcggtttcagggtgtgcccccaagcactgaatcgaccagcattagccgtgtgggtttattgcagggagatttaggaacagcagctgccacggttaaacagttattaaaggtgtgcctgtgctgtcttgttgggaacttgggaccttgtcgggaagtgtagcttctatttgataaggcattgtgtgccctgagagtctagaatcctgtgaatccagatcatactcccgtgagctctgtgatcctggggcagccattcctccttgagactgtgtgtggctaatgcaagaaaaccacacattcaacccagacaatgtcttgaatataggaagcgtgctataaaggttagatactatggcgcatctgtgaagtctactagcgtctgcagttaccaagggatccagcatgctttcagccctgattctcaactctttctctcagcctagcaacttgcctcactgaaacctgtacttaatcaagtttactccctcccatggatcttttcctagttgtttgaacgtcaccagcacacatgtggacaccattccagagtcacgcgcacaccagctggccctgcagacagctgcatggcattggtagctgcaacaagatgctatagcccatgtgcttatgggaaaaggtcaccagctaggcttcctcctctgctttttgagaggactagcgccgcagccagcttccttcagtttggtggactcattagctggatggctgggatatggaatgccccacaccctcaccacctccactttctaattaggtttgtcacttaatgatactcttgaaattcccgagtcccatagcaaaagtctgatatactttaagcaaataggtacatgaacttaaaaatacccggagagccataatggcctttagtatatggcccaagagaaagaagggactgtccccaatttgctttgagccagagttctcacagtctcgtgggtaggcctgttaatgagatgtgtgctggcttcagcctgcttcatctgattttcttcttttttaccttagaaatggggacagagccctgataggctccttgtagtcacttgctcttttcagaggtgacaaacaactgttagcatcttgcttcctttgtacaacagaactaaaaaacaataaaagcaatccagagtctagatgccaaaacaggacacaagtaggcctaagccacttgctgggttaggagagatggctaagtgggtagaagactttctatgtgagctgaagatcttgagtttgaatccccagcacccgtgtgtaaaagccaggcaaagctacacaatgcttaaagccccagtattggagggcagtgacagacagacagatccccagagcatgatagccagccagcccagccaaagcggcaagcttccaggtcagtgtgaggccctgtctcaaggcaataaagtacagaagacaacagaagaatatatgtggttatcatgctctgaactccaagggggcatggacacacccttgtgcccatgccaaaaaaaaaaaaaaaaaacacacataaaacatgcgtgcacacacaaataaagaaatgggtcttctaaggagggagagtctatacatgtctgagacacttgcaaagacaatctcagctctgtcccatctcctgacagacatatcccacacaggcacagatggaagattgtggtacggtttcatttctttcaaagtctctcccttttgactgacagaacccccttgaaaatgaaaatcctttttccctaagcgcctagagtatccaagggtaagcaagtggctgctgagccctttctctgtcaacctgcttctcctcggcctgagtcaccatcccactcttatgtcatcggtatattgatgtgtctgagtaaacgagagtgattggtgcttttcagttttgctctggacatctcacaagcagccaccttcaaacagactgaaaacaagcttgaaaagtcaatacaggaactagaaccagatagaaaaatagattctcaagctttgctgccccattccaacctgaaacagtacttttttctgtctaggtttctccaggactgctgtcgctacaaatgtctgttcccccaagacattcatactagttggggtaggcttgaccatgctacagtaacaaacatatcccctaatctgtggcttagggtggtagaattttaaacttgttcctgtcaagtatctgcagctggtcaataggaacgtttcattaatgtagtcctcctgggatgaagaaactcgggaaccacacaccagcacatggacagtcatacccagcacatgcacagtcatacccaagaacatgtacagtcatacccagcacatggatagtcatacccagcacatgtatagccatacccagcacatgtacagtcatacccagcacatgtacagtcatacccagcacatggacagtcatacccagcacatggacagtcatacccagcacatgtacagtcatacccagcacatggacagtcatacccagcacatgtactgtcatacccagcacatgcacagtcatacccagcacatgcacagtcatacccagcacatgcacactcatacccagcacatggacagtcatacccagcacatgtacagtcatacccagcacatgcacagtcatacccagcacatgtacaatcatacccagcacatgtacagtcatacccagcacatggacagtcatacccagcacatggacagtcatacccagcacatggacagtcatacccagcacatgtactgtcatacccagcacatgcacagtcatacccagcacatgcagtcatacccagcacatgtactgtcatacccagcacatgcagtcatacccagcacatgtacaatcatacccagcacatgtacagtcatacccagcacatgcagtcatacccagcacatgcagtcatacctagcacatgtacaatcataccctcatacccagcacatgtacaatcatactcataagtgaagtatgttcccctgttcactctttcctctgtaaaactctgctctgttgggggaggaacaggcatatgctctatgtagccagaagaagagctggtctacacataggcatgaatgtcacctgccatttggttctttgccagaacacacagagaaactgtcggaagattatatgccccagtacaggggaataccagggccaggaagcgggagtgggggtgggcagggtgggagggagtagggtggggggagggtataggagactttctggatagcatttgaaatgtaaatgaagaaaatatctaataataaaaagaaaagagtcaaaaaaaaaagaaaaaagaaaagaaatctgtctcaatatcagccattctagaatgatgtctcctgagcattgacaatggccgcacaagtagagagggttttttccccctgttaagtgtcaaaattcctcataaaaaaaaatattacttgaggagtttgagggatggctcagttggtaaagccctggctccaggaagacataagtataatggtgcatgtttgtgatcacagcagtggagaggcatggacaagaaaatccgtggtggagcttgctggacagccagcatggccaaatggatgagctgcacaccaataagagattctgattcataaaacagagtagctagcttcaaaagagtaatgcccaaggttgacctccggcctctacaggcatctttatgcacccacacaacaagcaccttaaagcacacatgcatttccacatgccctgatacttggtgtagagtttcccatacaggttcaagcttgagctgtcttccttaagtcagatagaaactcactcactaagcctctcccatgcacacactgaagctgactgctgtcccctaggcatgctttttctctcctgccacagtgccctgggtgagtaatcccctcctggggagcacccaggagagccaccaacgcttttatgaacttgaccctccccgtgccttcccgtaagcctcctctgagctgacacaaatggtgggcatgctatggttttgacccaggtgacatgttccttgctgtctttccattcttgagcagtcggctttgtgcatgcatgctcatagggaagaccgtgacacagacagctcatatagccagtgccagcccatctccccaggatgctttcccacacatccaagagaatcactgattgccggcgactttctacacagcactaattttgttcccctccaacaactgctaggatgtctctgcctttgctcacatctggagcctgtagggagtggaggctcccttctttgttttcatcccttgcttggcagcaggtgaagaaacacagtaagtgactagtgaaaacagcagtattcagccaccccaggcaattgtacttccttttcttttccctcatttgcatgaagatgcttccagaatcaccttgggtttccagggccctggtgaactatttcaaaataaaacccatacagggaaatgttcattcatacacttagaagcagaaaggggggaataataagagctgccctatctgaagcgcccgcatgcgccagaggattcttgcctggaagctttcatccttacagccattctcgaggtcgggggggggggggtgacactctcatttcataaatgatgaaagggcttagggtgtgctcaggctagtgagcatcagagctgggatttgggcccccacccccatcagccctctacagctctctcctctccatggcttcacaaaagcaaatggtccatcttagcacagcgagggccacagagcatcagtcatggtattcagggtagaggttatcaatatcccaaagccaatttgcacattaccagaactcttggtagtcatgggcctattgcgtagagtacagaaatcaagcgttcagccaggtcctctgggggacacaaagggattaagaacagctaaaaggaaatctaaaaagtagtgccaagtgtgggagcctctgtgtcaagatctctgtgttctaggctgcactcgtgtgatcctgggtaaagaacctaggatctctaagccttagtttccataccaatctaaaatggagacaaggaaagatcctattctgtaggcttgtaggaaggattcactgaaataacaggagtgtgttgtgtgtgactcctagggcagaggaacccctgggaaagtgatggctggtgttgtccttaggagtctgagggggctggggacactttataaatggtgaagtgctcatctggtgtctgcagtcatcactcttccccacactgttcatccatctggcctcaggctacagccccattgttctcgcctcacacacaatcacccaggtctccaagaacctccttttgggctctgggagcatggtttatcaccaaagtgacatttctaggtagcccacctgaacatgccactttgcagggcagctctaaaagggaacgccaaaagacgaggaagctacagtgatcttccgttcctgtgacttccactggcagatcaaaggcatgctggtaccaaacagcccgagtccacacagccaaactgcacagatatttgtggtgcctttgagcactggcgctgtgccagagctttctaacagagggctggggtccacactcaagacttgagtcaggctagccagtagaagcttggggacaaagaaccctatcataagtgacagattggcatcaaccaagtataggaacacatgtctggtgtggctttctggtccttccaaaggactctacagagtcctcctcatcagtgtttgtagattagcaaactgaggcatggggttcagaaagactcagaatggggtaggatttcaatgcatgcgttctggacatccattttctcgaatcacattccgcatgtgcccatcttagccgtgagcctgatgtaacccacgctgtgagggatggaatgagttttcagacaaactgttccaggtgagagagcatagatgtagtgacagcctacccttggatagtgactgtttgcttgtgtttttgtagactcagcttggcagtgcagcaagatgagtcaattcctgccttggctgtctggctcctcgctgtttttatttagacagattataagcgtgaagcagacaagaaaatgaaggggaaacatgctcggtccccagtaatggcagaaactggagcactgacagggagcagatagtttcccagcccagagccccacccacttccatcaagctctgtagcccatgaactcggtgctctggccatctctcttcatcacggtccccacagcccacacgcctactaagctctgcactttcttttggcaggtaacctggacatcactccagatgacccgcgttggatcggagcctggtggggcggctttctgctctgcggtgccttgctcttcttctcgtccctcctgatgtttgggttcccacaatccctgcccccacactcagaccctggcatggagagtgagcaggccatgctcccagaaagagaatatgagaggcccaagcccagcaatggggtcctgagacaccctctggagccagacagcagtgcctcctgtttccagcaactgagaggtaagaggccagaacttgctggtcagaacaataaggatattgtgatggggtgaggggaggggtggctgctggagggttggagagtttgacatgattggcccacacaaagtttgtgcttgacttgggatcagacatatttaatgaatgcataaataaggtaactgccatgaattgatgaaatcccagtggttactgtacgagagtctcgctttgggggcaacagcaaagctctatacttttaaaaggtggggaataaacaaatgcagcttgtctgagaaaatggcatggtgcaaataatgtcaactgagaaagatctcttctgggttgtttctgctgtcagcacagccccttaaaggcttaggaaatgactgtgatactgaatataactcagcagcctcaggctgctccatgctccccattcatcctctcctgctctctttcacacacgcacacacacacacacatgcacgcacgcacgcacgcacacacacacacacacacgcacacacacacacacacacacacacgcgtgcgcacacacacacacacacacacacacactccatgctccccattcatcctctcctgctctctttcacacacacacacacacacacacacacacacacacacacacacacacacaccccaagggggctacttaagcttatggtcttccctaacgtacttggatccgccagagtaccttctggagtttagacatgacagttggtacctgggcctgagccaggctcatgtccctcctcttagagaagttgggatgggaggaagatgggtgagcagtaaccttttgtaaagcctttagcccccacacaggcaacattccgaggcatccccagcatctccctgggatcaaatcaaagtcaaggtaggcaggtaaaggatgaggtgcacttgaggcaggtgatggtcccaggctttgactaaccccacacgtcttcattgccccaggccacactggctgtaaggtggctccactctccttgccatatatctacacttttaagactatgccgcagttctttgacagcatcatcctgagaacaagagctctgcctgcagagacacttaatcaaaccttcgagtccatgaggagcccaatagacctttactgtttctgaaaagacactaatttaataacccgatgtcatgtctggtcctgtgttctctgtcagtatctacaagttctgcgagccgactgatggccttaaaactcctctttttaagctctgaatgcactagaaggtgagaagttcagctagtgtgtgtccttgaggttgtcttagctgggaccacccccaccccgagtaagtgtgcaaattacctctacctttaaaactggcagattcaggaagtccccagccagctcaagggtgatgcctgctgttatcttaagagcacagctgactgtaatcccagtccccaggcccacaataatccatccgactggcatcagagttggtctggcacgagaggaccctgattcccagtagtgacaaccattccagatctttccttgtccaggtaatggtctcgcctcccacagaccacattcatagacccttcctttcatctctgggtatacaaagataaaaaaataaacaactgggccatcagtgaactcattggcttgccagcaaagatagccagtggttcgggaaatggcagccctgtcgagggccagggaggataaaaggcagagctcagctgggtcctaagctgggaactgtcacagtttcagagaatttcagagaaggttcagccattttgcttcatcttctgcatttagggagtcttcatttagggagggctagggatatggccatgggtcaggggctcgtgtcctagaacttctgcttccatagaggaggcatgcagcaaggaggtcaaatcaaagtgaggacgagcattgagtagttggccagaaatgagaagaatgcatttggtctgatgggttcaggactcagtagatcagaagtgggcaagcatggggtccgcatgaacgcacttccatgagtaatggtttttcatttcaaacaagcagtccctccttagttagctttgctaaaggactagactagaaggataccccagcagggcagaaaagttgtgtctctagaagacttctgcaagagccagagttcagtgacatgagggattctgctaataaaaaagaatccaggtgctggccacagagaaggatgcactgtatggacgtccttcgtcttctcccatgagcggaatgtgtctgccacagaaacacattcaccaaatgcacccttcagtgttgctggtgttcccacactaactcttactctgattccctctccctctccctctccctctccctctccctctccctctccnnnnnnnnnnnnnnnnnnnnnnnnnnnnnnnnnnnnnnnnnnnnnnnnnnnnnnnnnnnnnnnnnnnnnnnnnnnnnnnnnnnnnnnnnnnnnnnnnnnnnnnntccccgggtatgtttatgaacacaaataagcaggacactatcataagaggagtgcacgactctcagaatcaaggtggccgttttctcacgcatctctttggagctttcaaaggtttttcttcttgcacaatctacttgagtcctgagccatgctcagaaactccacccagtgtgaccgttcaatcccaccatgaagcatttccgggtttctgagagtgatataaggtcacctttctttagtgggacatcctgagatccagttcagctcagctacttttccccttgtgacacctgggtcatgacatttaactccacttattgttaacatggagggtatggatcatctttacaacaactgcctccgtttgatgtggctgtttatcactatacacagagagcttatgttgtggtattatgggaactgggtatgtggtccatgttcaagggctttgaaggtctattgccaacaatgccagccatcggctgagcttgtaactctgtataggatgaggaacagaaagcatgggatctggtttcaaagtaggcttgaagttccaagcttatagcagctgtcatagcaatagcattttgataaagcagacttcagacaaacaaatacttagggttattaagccacagggtcaccctcaagtgagaggctaccaaacccgggcataattttggatctcaacatgccaccaaatctctttcctttaagtcttggctctgagatgcttctgccccgatgagcccacacttgaggtaccctcaccatcgctgtcatcctaatgcctagtactcttcgttcctcccccttcatgccaacaggttatatgttgacaactggcatgaccctggcatgtagctgtacagtatgtgggaagaatttatgaaaagctatctagagggaagaatagctcaatgagacagcagtaaataatctagagccaacaaggtagctcattggataaagatgctgctgctgagcctgactgcttgagtgtgatccccagaactcatggatagacaaaaaacaaaataaaactgtgtctaacaactttttcctctgaacttatggatatgtgcatgtgtacacacacactcacacaaatgaataagtgtaaatttttaattaaatctaaatacaaatcagtcatgtttataaaataaacactcaatgtcattaccatttgcatgttaaatctcacacccaccatgtgtgatatgcataggcatgcttttatagagacatgtgtagtggtttctgttactgctttcaatgtcacttcaatagttttgtatttcattgtaagttgtcttcttgatcacctgggaagcctcaatggacaggatctgggtccccagtgaagtgatctgtcccccttcatcttctggctctatgcggtttatgtaatgcatcggtaattctccctcttggctctttttctgtctgggatatcctttctcctttggttcacttttgggctgtcagctatattgtgcttggatatctatcacatccacttggcctctgcaaagtccctactactacattaccattgtagtcttatacagccaggatggcagtctccatctactccagagcaaagctctcattcatctgttcatttgcagggcatggcagtgcctgacacagaagtggtggccaatttaatgaacgaagtaaccaataagtacacatgcgtgtgcacacacacacacacacacacacacacacacacaagcagggcctgggagcatgacccagtgaatggacttgttgcacaagtcttagggcctgagttcagatctctagcatccacataaaaagccaggcacagtcacatacacccgtaatcaggaaaccaaggcaggaagagccacagtcaatctagctgtgaatcagcaagtcccagatgcactgaaagactatctcaaaagataaggcagaaaatagtagaggaagatactcaacatcaccttctggcctctacaaaggtatacaacacacacatacacacacacatgcgcacacgtgcacacacacacacacgcgcgcacacatgcgcacacacacacacacacacacatgcacagacacacacatcaccaccaacacatacacacaaacacacacacacatacacacacacacaaacacacacaggcatgcacgcatcaccaccatcaaaaacagcaacaaaaaaatgtttgttcttatctatatctcagggaatctctctagctctgtaagccattagtactgttttacagatatggaaatcaaacttagagatggaaagaaaagacatttgaatcaccgtgaagaaaaacagtgcctgtctccttaagcttggcgtggggctgtccttctggctgaataagctctgctaaaaaacaagtactgtcaccaggtgctaagtgacctttccatgcagcgtactaaaaccacctcctgaggcagcacagatgtcccctaaaacagtgtgtcatcaaagggtctgcagctgcaaggggaggaagcttctgctcccagttagcactggcgggttctgactagtggggatcctgtagctgcctgtttccaggctcagaatcctcagggcaagttcctgactttgatcttggagaggggcagagaagctgagcactcttgtctcagcccttcaccctgacagacaagtggcctctcaatatccttgaaaagacttctgaagccctgtggacttcctctagtggagcctcactgtgagaggagcaagctctgccttaactaccacaccctggcccagcccagcccagcccagcccagcccagccctgcctccatcagtgtgatctgcccagggcccctgacctacacctgtcattagcagctgggtggagcttagaatcatcactgaaacaggtctctggtgagcagaggatgttccaaaaaggaagacccaccctgaatgtagtcagttccatcccaggagctcagccccagactaaatcaaaagacttatcctctctgcttcctcactgtggaaacaatgcgcccaactggtcgcctctcatgcccactgcagttgcttcccaaggctgccaaggtaccctccaatggagagacagcagaaacccttcttccttcgaggcacttcagtcacttgttttgtcacagcaaccagaaaagtaagtgatacatctgatcatgctgccacctgccacttaaagggacagtggcaaagccctgctgtggctcctctgacttcgttccacacctacctcattctgccatgtccccaccaccaccccgctctccttacaaacaccgcctagttttctgcccgctttttccttcctgtgctctttgctgaagttcacttccggtcttggacatcagcttccttttttctgaagtacagcttcctgacttcttctttcatggcctcattttactttctgctaggtgaagtatcccttcccctatacctctgtgaaggcagagacatttgcattttgtttgccacctagtactccattctgtggtaagaggaggagttaggggatcatggaagggacattaccaggcccagctcgacttcgttctcctgaaacaccctggccagacctgctccaacccacccagctctggcttctgcatggccccgctgtgagcatgtgggaagagctacacatgtctatgtgctaccacaacccacaagtgacccacctgtgtcaggaagggtctgctggacctcgctccagtcctgacttcttccattccttttcagctcagtggttggattcagcaacatttttcttattgaggagcctgcacctctcattcgagtgtgttcacgaggaacctggtagtctaagcaggctcatgctgcctgcttgatgctatctattatacaatttgtctctagagctgacttctctcctcctgtagatatgttgaaaaatctgcattttgcttccatagtgaaagaagcagtctaccttcccaaacatcttgagccaggctgtgcccacaccctgctgtgtcacaggagttcggttatgactcctcagggaccaggctggtccatgggttcagaattttgttgttgatggtggtggttttttgtttgtttgtttgtttgtttgtttgttttttatcatacctgctgggaccagcagtgagggggggacatgtcccttaatgtgctgctctcctctggctgttttagcaaggccagtgagacaaacatgagagggcacccagcatgaggccaggcatggttaacatgtcagaatgtctgttgaatgaataagcaaagggaataacggaaaggtagtagcattttgcagaggaggatccatgaaactgatcaacagtaccatgaagggaaagcagtggctatccaaacaagtagaagcctgtttgtgatcttctcagagtttagggggaagaggcaagttcataggtgtatgcagataggcatgcacatccgtgcacataaatgtaaaagccagagttcaccctcgtgtgtcattcctgtagagccatctgtggtttgtgttgttgtttgtcttctgtattgtttgggttttccagatgggcccttctctagcctgggactggtagatttatttatttatctaaccagccagacacagggagagcactgtttgttgctaccttccaggtgctatgatgacaagcgtgctgtcttaattagggttattattgctgtgatggaaccccatgaccaagagcaagttgaggaggataaggtttaatttcgtttatagttccatatcactgttcatcgattgaaggaaaactggacagaaattccagggcaggaacctggaggcaggaacagatgcagaggccatggtggggcgctgcttactggcttgtgcccccatggctcactcaacctcctttcttgtataacacaggaccactagcccagggatggcacctcccatccatcactacttaagaaaatgcctgacagtgtatcttctagaggtctagcctcagctgaggttcactcctttcagataactggcttgtgggaagttgacctaagaagactagtcagcatgcatgtgtcactgccccaggccatttcatgtggatgctggggattagcacagcaagtgctttactaacagaaccatcccttcctctttgagggtcatgctttctatcagcacattaacagctctgagcaggccaggtccaaggaaggctagataacttcattttaatctgtatttctctaagctgcatgactgagagactatgctagatctatgatcattggcaaacactaccagaattcagggtacatgatgaagaggaccgtaggaagttcaaaagttgcattaaagggccatggagcatgttctggaaggcctatctggaaggattggggaacaatggtattgccctgaaggagcaggcagatgttcctgggtgtggttaggaggagggcatctagtttgtagcatgtcatttagaaaaggttgtggtagaagacaagtgaggacagccccgtgtgtagtagagtgtctgctatctgaaatggctcagaagtcccggttgcattatgaatgaatcatcaaagccttggcattgaccttcaaataaaagtgtctggactctgttttataaacccctgtctccctgccagcagttttgagtccataccacctgtgtggtgtcttgaaatactactttgtatccaccccgcatggaattatgctcccagagctggagaaggagaggctcaggcacggtgatgtctgaaagcctccaaagtctttctaagtaaattgctaactgaacaggaatgccagagaaaaggaggtcccttgctgggtccccatgaagggctgacaggccaaagctctgcctccccccacttcccgtggttggacttgtataaattgaagtgctgagagaactctgtcacaaataagatgggacaggatgggtcccctactgtgacctggctaccatgaggagcctgctgtaaacaagcatggcagaaagtagctgacaggctgggcatcaacctgctctaccagaatgttggtctttgcagactttccaagaatgaattctcacactgtgggagttttcacttccagaaaaaccagggacagccaacctgtgtggcaccagggcagagaacattttcacagaggaagtttttagacacaggcgtgaagtaggggcacctgtttgcttaaaagacttgttattgcctaagccatctttctctctgctgcctttgccttggaaagatgcaacgcatgggtctgaagaagcagctgcttccaagcctcctttacggtcagctctgccctccctgggtaagcctgagcttgccaggccacctatggagaaagggaagaccctggataacactctggtgtggagctacagcctgagtttcaccctgttcttgctttaaacgtgcttacgagtggttcctcttctactctctaagaccctcctggtggtccccccaaaatcagtgggatcaatcaatgcttggctggggctcccctggctgatgctctccagctcacactcaaccctggcccagtgctgcgcaccggcatacatcctccccaccccacccccagccaatgcacaccagctcacactcagcttccattctaagtgcctattctgagctgatggtttccctgttgctcactaaggccaccactgtctccctacaaagaaagagagacaagcattctggatttctgaccccagagccatggtgttatttatcttgactgagttcattgtcccacttccaccatagacatgagcctgtagaatttcactagtcatttggtcctgagtttgcctttgaccctgaaatgcctgcaacaggttcccctcctcacttttgtgactcatgaactcagttagttattggattccttaaccttccatacaccacccccccacccctgtatttattaaacatatgctcttctgggacatggtgcccttgtctcaggcggctcttcacctgggaaagctaggaggcgaggcactgttggcaggaatggcagctcagggctgggcacatggagaaccagctggaagacggctacatcataatgctcctccttccccttaaccttggaatcacggcagaacctccatcattgcattttcccatttctcctttccttccttccttccgtccatcctgctatgatgatttctggttatctgcccagctcattccactcctctcttctctccaggtcctacctgttgtgaaacgcctcatgttgactcagcctttagataaacagtttcccccatgtcagcctgaaggttgaaattttggatttttgagtttcaggcttatgtgggttcatacttgccctcctgcagtactcatctttgcatttctgtgcaaggtggagtttaaagactcttggtgcctagtgtcagaagcactgatgctaaacctccctgccaccgtgatggatgcaaagtcctcagtgcagtgctctgtccagcagcagaggtttgacagagatggctgtggtagtatctgctgcattcgctggccttatcttcctgttttgacagtgggaacaatgacatgacaccatatcttaatgaatgaagcaagtcaaggccaattttagtagagggaccaaagtataagtctcagagtgtaacccaatggggtctccatggatccccatggtaaccactgttggggctcccccctgtctggaagggtagtgagttaggatatttgacttctacgctgacctgttgattggctctatggaggaggtgcctctatttaggaagccttttgggtccaatgacgactcccaagaactcagcataaaacctccacagcacaatctttctccaaccatcactcagcagtccactcacagaggtgagtcagcaaagcaagtcttgtgactcctggacatgctgtgcaaacactagggatctctcacttggtctaacttctgcctgttggtcttggttctcactgagctgctgcctatgcaccagggatgctggcccatatgcttctgacctcagatctctttccatcttcacagatgggtaggaatgagtccccacacctgcctctttagagcatggtcccggacttgactttatacagctttcctcagcaaaacttttcctatggtgccaagcttctacttcagcccttcaactctttcttttgtttcttcctcctctcttaggtcctttcctcaaaagatcttggaccaagtcccaggtccacagcgtacaagatcattttttctagtgaggtggaatatttgaatacttggttcccagtggatggaaccattcatgaaggattaataagtatgtgattaggggtggactttgtggttttaaaagcccataccatttacagttagttgtctgtctctgtctttgtgtttctctctgtctctctctctctgtctctctctctgtctctctctctctgtctctctccctctgtctctctccctctgtctctctgtctctctctctccatatatatatatgtatatatatatatatatatatatatacatatgtatattgtgtgtgtgtgtgtgtgtctcaagatgtgagctctctgctactgtcccagtgctgtgccttcctgcctatattctaacatggccctctgccataatggtcatggactcaactctctgaaaccgtaagccccaaataaactttttttccgattacatgcattggtcatggtgtcttaatacggcagtaaaacagtagctaggaaaattcccacattcattgttatttgtgaagctgtatttctgattggcaggtccagcctgctttcataattttcataataaaaaattgtggctcacaggatccaggaaagaacaaaccacttgtcacaggtgcatgctgtggcagctcttgctggggctggagttcctgctatgtctctctcattgtgggaccattctcttgcttctgttttctcatttgtaaatggaggatttcaatgattccaagattgtggtttttgtgagggttgtgttatgagtctgtgggttgtcagtaaaccctcaggatggcatttggcacatagaggatgttctgatgacaataccccctgtcttagtcagggtttctattcctgcacaaacatcatgaccaagaagcaagttggggaggaaagggtttattcagcttacacttccatactgctgttcatcaccaaggaagtcaggactggaactcaagcatgtcagaaagcaggagccgatgcagaagccatggagggatgttctttactggcttgcttcccctggcttgctcagcctgctctcttatagaatccaagactaccagcccagagatggcaccacccacaaggggctttccctcttgatcactaattgagaaaatgccttacagttggatctcatggaggcatttcctcaactgaagctcctttctctgtgatatctccagctgtgtcaagttgacacaaaactagccagtacaattgaccccttgtcaacttgacacacaaacacatcactagtaagcctcaacccttacattcttattcatccccaagatctaaataactttaaaagtcccacagtctttacatattcttaaaatttcaatctctttaaaatatccatctcttttaaaatccaaagtctttttacaactaaaactctcttaactatgggctccactaaaacagtttcttccttcaggagggaaaatatcagggcacagtcacaatcaaaagcaaaagtcaatctccaaccgtccaatgtctgggatccaactcatgatcttctgggctcctccaagggcttgggtcacttctccagccatgccctttgtagcacatgcgtcatcctctaggctccagatgcctgtactccactgctgctgctgctcttggtggtcatctcattgtactggcatctccaaaacacttcatgaccccttcagtcctgggccttcaattgcaactgaggctgcaccttcaccaatggccttccatggcctctcacagtgccaagcctcagctgctttgcgtgaccccttcatgccttcaaaaccagtaccacctgggtgacccttacatattaccaagtccagccacagcacaatgtacaactttggctatatctggaacacagccactgtgctctcagaaaacacttcccagaagatgtcacctcgatgatgctggtctcttcttaatcaccgctaatttcttagctccagctaaccagcatcaatagtcccagtaatgcaaagtttttgctttagtagttctggtatcttgttaatcacagctgattcttcagccccagctaaccagaactacagaatcttcacagtcaaaacaggaatgggcctgaaaagagtctttaatttttccctctgaaatttcacaagccaggcctccatcttctgcactgttctcaacgttatcttccaagctcctacacaacatccaacagagctcttaacaacggatggatcttcaagcccaaagttccaaagtccttccacagtcctccccaaaacatggtcagcttgtcacaggaatacctcactcctggtaccaatttgtcttagtcagggtttctattcctgcacaaacatcatgaccaagaagcaagttggggaggaaagggtttattcagcttacacttccatactgctgttcatcaccaaggaagtcaggactggaactcaagcatgtcagaaagcaggagccgatgcagaagccatggagggatgttctttactggcttgcttcccctggcttgctcagcctgctctcttatagaatccaagactaccagcccagagatggcaccacccacaaggggcctttcccccttgatcactaattgagaaaatgccttacagttggatctcatggaggcatttcctcaactgaagctcctttctctgtgatatctccagctgtgtcaagttgacacaaaactagccagtacaccccccaaatctgccttttccctcccacaatgtacagcaatcctctgtcccacagcaatgtcttctaagggctcacagtatatacctgctttccatggagccagctaccctgtgcagttttcaatcttgtaccatcctacggatgacagccatgggcttctacagagagccaaaaaggtccccttaaccctgttggtggaactgcgtgatccaacccccttctacccagcttcagtactaaagctaaatcagtaaagaggattaaatgactagtgggggatgcagatgtgcagtggcctgtgatggccctggttcaccggtctctgtttgtctggactactccctcctcaaaaggttgaattttatggtttagcaatccacttgaagcactaagacagccttacagtcaagctaattaaggcctcttatccaagctggggtattgaaggtgggctgaacctgtaaaaatggagttagcatttgatagctacaagttcttgcaataaaattgtgggtgggaggaagaatgtgggaggaagctgtcatttctggaagccagtcaggttggctacaaagagaaaagggtcatgcaaataaggtgccccagtccttccttcagtccaatgattcttgaacttaatgatttttaacatctaattcaaggagaaattagtcattaggcattaagacaagcaggaagactcctgtcttaacaaagagcccttcctgcagaatgtaatgaactccagaatagttaaaagctcgcagaagtgcagaaatgttcttttaactgaagtcgccctcatggaacgagaggccttcctatccccaaacagatcatgaagatgatgatgaagagtcacggggctactgaggtctaaagagatgtggcaactgactcaaatcatcctcagtgtcattttggaggtagataaacttggttgtcagaggctccaggtgatgtagtccagggagagcacaaagcttttcattcttctggagtcacactcgacagagactccattccaactgaggacacgaagcacacagcgagagtgtgctgcctggattgtcccaaccctgccccggtgcttccagaatatagatgccatcattccgaaggagcctagtgactaagtcacaattgtgtctgccactacacatcagcagccaggactttgttgttcatattcatccattccaagtaggtcctttgacctcatggtgtggtccatactggtctctctgcagtgtgtggatgtaactcaccagaacctgatcttgagtacagagtagcctcacgcttggcacacacacagtctcaaatttgctatggctcatcaacaatgattgatcatgatggattcttcacacccaagagacctttaactgtgaaaagcagatcaccctctgtgtattttatgttgtgttcattttccatatttcttaagctacattttcaaacactgcagagtcaacagttctgggagtatttgtacaacactttaaaacaatatggatttaacaaaggaaagtttcctaacatttaaacacagattttaaaagcaaacactcctaggcatttatttgaaatgatacttctaagaagtcagattgccataaatgtttaaaaggcctgtaaagtatacaaacggcgtgcccataaagaccaggaaactctaagcacagtgtaccaggatgaagtgcgaggacctgaggctgtttgtgtaccatctttgttcatagcctttgtaaagttttgactttaatttttttgtgtgtgctttcagttaaccctaaggctgccttcctagagcctcagaaacacatgttgaacagctgaagccgccatctctggttatcatctaaatccccttggacatcagatccatggctcagctcacagtaatcctgagcttccagtcctttggtccagtccggtgctgtaactaaacccttcaatcctcctctctggagaatttcactttggaaacttgatatctttcccagagatgataaattttaagttttgtatatctgccagtccccggcctattgttctgtcattttgatgcatggagcttgtctgttagcgttattaaaaacttatgtgtctcctattattattttattctaattagatgggccatttggaggtttcgtctcctaggagatgcaattgtgcctgtgtaattagctctcttctttaggacagctggctaattcatcaccttggagtgcagggttaggttctcagcccacctgtttattttatgtggccataggcacttagtgggtttttctaatacttaatctctgtgtctgatcttttccatgtgcacagagagaaacaagtgcaccctgtcactattccttatttttgttagtaatatgagtatagttaaatcggatcctctttgtgagacaggatcttatgtatctcaggctggcccccaaacacattatatagctgaggataatcttaaactcctgattctcctgctgctcctcccagggcctgggataaccagtatgtgccacacctgttttgtgtagacttggagatcaaacccaaagctctgtgtatgctaggccagccactctccccaatgagccagattcccttccagccccgagtctagtcacaagcacaccgcttggacaatgttttcagtaacctatatttcgcctccatctttgctctttatagaagatgatttatgatttacataagacttgtcttcaaattacttgaaatcagtttacttgtcttacgccatggcacttgatgaatcagctatatttggttaattattttgtaaataccactggcttccatctgtggaagttctacatccacaaacctaacgagccgctgattgaaacgcagtccacagaaaactgcatctgtactgaaaaagtacaaatctctcccttgtcatcatctccttgcacagtgtgctctagcaactacttgggtaacatgcaccttgtagttgatgtaagtagcttagagatgatctaaggtacatgggtgtgagttatagacaagtagtatactgttctatataatagatgtgagcatatatagattttggtgtccagcagagacatcaaaataaaggtgtaaggactaaggggttggttcagtgggtaaaagtgtttgccatgtaattataaggacctgagtttcaatccctagagcctacataaaagctggatgaacaggacatgtgtctaacctcatggagatgggaggcggagacagaattcccagcagctctgcaggccagctagcctgccgtgtgtgtggtaggaaaacagtgaggagatgcctgtctcaaggtcaaaggcgaagactgacatccaaggctgtctcctgacctccatacacatgccttggcacacaagcatctatgcaacacacacacacaataataataataataataataataataataataataacaataacaataataataaatcaaataaaggtgtcaatcctgaagagacagggctgttctagaaccatccaggatatgtcaccacagcacaactgagaagagctggttgaagactatgtgacaaggttaaagcaccaatataagaggaagtgtctgtagcccaggaaaccacactgtaagaaaaatagagccccataagcaagataagagtatgcaacctccacacactactattgggcccattcaagatgtaacacggttcataagcttcagaatgtgtatgccaaaagccaactgtcctggatccttaagtgcctgtggctagatgcctgggagcctcttccaggctaggttgaataatgaagaaaggacacctggggtgggggagggaacctatgtggtaaaagtttaagagaagagtattacagtagactaagaagatctaacatggatgcagctgagagaggaacaggctggggatgaggggaggagaatagggcatcctggagatatcccagcaccatgatgcaggccaaaagcccaatggacaaactataatcccagactctttgttgtggctctccttactgtggatatttgacgaggaaaaacaaaaaaacaaacaaagaagcaaacaaacaaacaaaaaaaacccaaagaacaaaaaatcctaagctgatcccactagttactatgtacaatgtgatcaaatcaaggttgatagctctgaccgacttaggatgttccagccctgtgggagagagctgaccagggagtgtagggaaggacttgatttgctcatacttattttgtaaaggatgagaacttcatctctttcttgataccaacgacatcaaacgtattctttcagtatacttacagagcatagttcaaaatgttgatcacatagtgggcacattgacatatgcctaagtattttcgtgtttcaaatgtataatatatatgttacagtttccattttggagattacggtcccaaaatgatttccttttgggatggggggggggggatggaaaggtcttgtaattgcttaaaagatctttgacttgaaccccctgaagttgtggtatagaagggaggtagagcagcctggtttagtagaaaagggcttaatttgtgggattttgttgtggtttggaagtcagagtttttagttataatgacttatagaatatagattctggcctgagctctccccatccccagtgatgctctacaaggtgttgattaatgaaatgggcaagaatgcatcaaggaggggtctaaggaggtcttaaataggcactcagcatgtatgaccttgacctggctttctattcttcctcacagtgatccccaaggtcaccaagcacctgctctcaaaccctgtgttcacctgcatcgtcctggctgcttgcatggagattgctgtggtggctggcttcgctgccttcctcggcaagtacctggaacagcagtttaacctcaccacttcctctgccaaccagctgctcggtgagtgggtctcattcccctcctgccataccaacatgctcaaagaatgcacggagctcaaaaatatgcaggactgtgctaagccatggtatatgtgtatccttttctatacaaggaacttcagagtgatattttcacaactattaaaaacatactagagggcccgtgagatggctcagcagggagaccatctgttgcttcaagctgatacccacattcaatacccagaactcatggatggaagataaactctactccaaatttatcctctgatcacatgggtaccatgacccatgatacacccaggcagagtaatactactaaaaataaaaaaaaaaacacacattataagaaagaacaaaggtatataatgtatatgtagaaagcattgtgagaggccaggaagttgtttgactaacatgaatgggaaatttcgaagcatatataagggaagagagcaatagaagtccatcttaaaagattagcagatatgtattagacaatgagaatgatcttagcagcataagatccacacttcacaaatacagagctaaaaagatatatccttgtgctggagagactgctcagtgggtaaagcttgctgcacaagtatcctaacttccctcgattcccaggaactcacctgaagatggaagaagacagccagctccacaaagctgtcctctgatctcagaatacactatatcaccccctacacacacacatatacatgcacaataatatttttaagaaataaagttaagaaggcatgcccatgctgatgaccttgcccatggcaggcataactaatggatcacagaatttttcccaatgtgaggcgaggctttacagttcttctcaccagacttctaatcattggaagttgagctaagaaaactcatctgccctcatgagaagcagcattgccaaggtggggtggtcagtatgtcctcagagtgtatcttagacttgcttttcgtgtgggaggaatctattcttcactctttgcgtgaccaacaggctgcattagttgagttgatcatctcagaacatgactaagaatggcgaaaacatagcagttgaggaggatggaagtgtccaccgtggccagttctgatgtaaacttgctaggaatgatacataattgatgatgtgctgcatgccattgagggctgaagaggggatcatggttaatactatagaaagttaaaacactgaagataaaagtagatttctaagccatgaaacagaagggaattgcagaagagagggttcctgagtggacagcccttgatagagagcccagctgttcctctgaaaaggcagaggagggtcctgtgattaaggctgctgagtgcagtgtatggccaggtggcagagagggctccaacccctatacttcatcttctttgtcaactaggagaaataggagggtgttcttagcttaccctttaacacctcctggggtggggctggagagatggctctgaaattaacagcatgagttcttcttgcagaggacctgggtttgaggctcactttatggcccatagccacccatagctctagttctaagggatcttacaccctcttctgacctgcaggcacctcgaatgcacatggtggttgcatgcatatgcattccggcaaaacatggacacctaaaacaaaaataataaatctttgataaaatagtttgattagtaaagcccctactgcctgagtatgaggatgtgagcctgtgtgcccagcacctacttaagagtctggcaaggcagggcatatctattacctcatgactgagggaagaagagacagacagatccccagagttcactaggtagtcagtccaaacaactggtaaactcttggattcggtgagctgctgcatctcaaaaaataagggggggggggctggaaagacagctccatggttaagagaactggctgctctttgagaggacctaggttaaattcccagtatgtacatggtagctcacaactgccaataagttaggtttcaggggactcagtgttctcttctgccctgtggacacaaggtatacagatggtgcataagcatacatacacagggagaatgcccatatatataaaataaaatacaaattttaaattaagtggagatccatgggtaaaggttccatacttcagctgccagcacctatacacccacgtgcagctgtgcgtgcacacaaacacgtatgcatgtacacacacaaacatacaaacagagagagagaagggggacagtatatgtatagagagagattccccattgctttacaaaatggccaatcaatgcaaaggatgcagaccagcatgggtgatgagggacatgcacattgaaatctatagggggcacagtgatgcaccaaccagatgatagtgctgagtgctggcgagaatgaggagcaactggaacccacactgcagtggagatgcccggggagcgagcctctgcttcgggcagtttttgcagcacccattaaagctcagcatatgcctgtgctgtgatccatcagttccgtttctgggcacttatccaacagaatcgagtgtttaggtccactcatttacatatgcatatataacaacattcagagcagctttatgcataatgatctcaagctggaactaacccaagtgtctgtctgcagcagaatgggtaaataagctatagactgttcattctatacgacacagctcaggaaaggacgaattctcacacagccttccatgggaatgtgtatgggttggaagatgtcacacacaagagaatgtatttatgggacttaaaaaaaaagatgaattgccaattaaagtaaaagaagccagagccacagttgtccttgaaggttacagctacagagaggtacccaggagcctcctaggcagctgcaagtgagtgtgtgtgtgtgtgtgtgtgtgtgtgtgtgtgtgtgtgtgtgtgtgtgtgtgtgtgtgtgtgtgtgcgtgcgtgcatttatgtatgcctttgagtctagttacgtggaatatgtatatgtgcatgtatgtaatgtacctgtatatgcaggttcattttcacacatgtgcatgcggaggccagaggtcaacagtgggtgtcttcttcagtccctctctaccctagtttttgatgcaaagtctttttcacactgaaccagctggccagcatgctgctgggctcaacctgtctgcctacaatctagctctgggattccagacatttgcctcttctcctggctcttatgaaagtgccaaggatcaaacactcccaagccccaaagtatctggagttgttctaagcttgacttgaatgctggttatggaggtatctgcatatccagttttccaagttggaaagtttaccaggatggtctttgtgtgtttcataagatgtaacatcacagttttaaaagaaattcaaccctggccatcatgataacataccacagttttctctccctggaaactgctgggcaatgcaagttcaccctcccccactaatcattcttaccatccactttttggtaagtattagtaaaatgcagtcagcttttcaatgcctgcaggacagaggagaaaaacacatccccctgtaagagaagctatagcttttgttgtctcaagaatctgggcattagacctccagcacccctgggtttatctctcaactcctggtttctgtgccaatatatcttccattttagttgttcttacacagttgcatctccgggaccaagtcctattttagaagaaatgcctaagttttctatcgacaaacaaatcaatagtctgcagggcagaaaggtcagaaaaacaattctactgcctagcgtctgtttgtttcccagtaattcctgtgtgctggagcgcttaacaaggtggaaaggaaaagggggcggggcttcttcatattctctaggcaggccagcatcaggcatttcctgtccctatgtctagcctgtggcagagatccagttagtatgtactggggagagcacactgcagagaagctggcagggtacactaggggaagctgatgtaaggagatgctctcagagtagctcctgcactcttagacgatggtaggcatgcacttatccccatctatacattcaaggctgcaggccacccataaagtcttcagcagatgggtcagagttcagagaagagcagtgtagacagtccaggagccgatgatgttgatttatgagtgcagattaaaagagcccggtctgcataagttaatctaataaggatgaagttttggtcctgaaagtcctgacaatagccatgggtgttaaggacatatacacacatcagggaagaagagagagaaaagctaatagtgactgggagaaaaggtgctgaaatcctgttgttgccatggttaccatcatcaccaggtgacacccccactgtctcaactagaaaatgaaacaaagcccagggtgctcgctgggagtgggcatgtggttgccaaggcttattcacatagttcccatgtgcttatagattcattcattctcaaaggggtgcctgaatgccaccctgtggttctgtattaggccctggggattgggctggactgaatgggacctgaagggtgctccctccttctggaaacttcatgctgatagaggatgagagcaagaaacaggatgggtaaaaataaacactgccgctttagagggcagggagagccatggaaacataaatcctgatgggggtaacaggagactgttcctgagcccagagctcctcaagtctaactgaatagcctaccatgggcatccctgtcccttcctcccaagtgtgtgattacaggggggccaccacctgccaaggtttacctggcttctgagaccccaaccctggtcctctctcacttgtgtttatccactgatccatctctcctgatcttaagtcccctttccatgtcacaagaggtgtgggggctggtgaagcctcttgcagaggaggaaaaccagccaaggaaaagtgggcaagaccatcctaggaacagaaccaatgcatgagcaaagtctctagcaccgggggcacctagcctcatctagggagagaacgtaggaaaactggaatctgcggtggccagtgacatgggctgaggatggaagcacacaggacaaggtcaagatctccataatcataccgaaggctggaaaactaagcccagatgtctgaagcagccagtgacacacaggtcctggtctgttttaagtatagtcagggtgttgtcttggcaagctaagccttcctgattatattttcttaccctaatatgaaaaattaatttgcattccctcagcacttaccagctggttgatgtagtcgattgacctgagggtcgtttgattggcaggaaggaggccgagtagactggaaaattagccatgcataatctacaccatagataaatggcactcggtaatttaaagccaagtcgtagatgaaatgaatcagaacagagccacagcaaacaggagattggaacagcagggtcctttggttctctgacaacaccctggttctttgggagtcctaggaacaggcttcggggctgctgccttggagatagctctgtgcataagagaggaagagagagagagagagagagaaagcgagagagagaaagcgagagagagaaagcgagagagagaaagcgagagagagaaagcgagagagagcggcagagacagacagagacagagagagacagacagagagagacagagagagacagagagagagattgtatactcaccaattattcaccaagtgctgcagaacgtagtgatttgattgacactgcttcctggggcatagctgacccggctaaatgatgcccactaccaacttgtgagcccttcaacctttgggttatacagccctggagcctaccatgtacctttcttgcctcatgagaaaagaaaaattctcacactgtgtatgtgtgtgtgtgtgtgtgtgtgtgtgtgtgtgtgtttgcacacacacatgtaaatatgtatgtatcttcaagtgtgtgaatagggagtgaatgcatgtgtgttcatatgcacaagcatgtctgccactcacatgtgtggtcacatgtgtgtaaacatcatgttaatgtccatgtcctcctcagtttctcagcatttaatcttctgaggcagagtctcttgctgagctttccagcttttactagtctatccaaatgacttgctggaagggtctcatccctgcctcctgagtgctgaggttacaggtaggccaccaggccttcttagcactcatgtggattctggcgacctggtctccagccatcatgcttgtctctttacctactgagccatctcctccaccaaaaagctcttcagttgatcttaagtcccctttccaggcctctttggaaatgcacagagatagttgagtgccagggtgcttaaagacctgagttccacagtcagaatccaaataaaaccatcgaacaaaaaagccaaaaagaggcagtgtctcaatgacaggtgcctgagaaatgtcacccaaggatatcctctggcttctatgtaacacaggtacatatatgtgtacatacatacaaacattcagagagagagagagagagagagagagagagagagagagagagagagagagagagagagagagagagagatcacagagaagttaaacctggtgggatatgccttgaatcccaacacttgggtagctgaagtagaaggattgccaagtgtttcagcatagcctgatctacagaataactccaaaatatcataaaggaagaggagaaaagcaaagaaagaaatactaatgcagagaccatatctttgctccctaatatttaatctcctggattttactccgtagtccccagctttctggattcatctcctagttggctgccaattagctgtgtacatgcacgctctcagatggcaggtgtggtatgccagatgtgtgcactttggctcacaataactgtcttctgttgttttccgagagttttctgggatcagacataagagcctccatgaagactttagagtcacatgaagacacagggcccactgatatccaccagtccccctttcctgctattcacactctactgctctgcttcctcagggatgacggcgatcccctgtgcctgcctgggcatctttctgggtggccttttggtgaagaagctgagcctgtctgccctgggggccattcgaatggccatgctggtcaacctggtgtccacagcctgctacgtctccttcctcttcctgggctgtgacacaggccctgtggctggggtcactgttcgctacggaaacaagtgagtagctaaagttttaactcgaccctgcccaggcacccctgggccaccttcaccgtggattcacagagagagctcagccctgcccagatccacctggaccctccaccacaggctaatagagccaacctggtctctagtgatccagagcagaggagcccagaggccttagcttcttacttgcagttggaaggctcagcctgtcctctggatgttgagctgttcttttctgcaacaagacagcccagagtacagagcggtcattcattctctagtccacttgctctttctgacatttgacttcaggaatgatgtgaataaaaatgatgtggctaaaattaaaccctatttcaaaatttggctcaaaataaaagacagaattaacttcagtaattcctacgtgagtcagaagcccccattcagctcacacagagtcagtcaggcccatggtgcgtgtgtttaagtggtagtggaagagagggataaaaacaagttgggaaggaagacagaaggagcaggaaccagcctgttgctacggaatatcttttcttatgccctggttattatcctgggactatggtacagtgtttagagcgattgttgtttaaataaattatggaactatattatctctatgtctactgtctccttccctatgggactcttgagaccaccctgagctgaagagtgtagcccagaacatgctgcatcgtagctgccctgcaggttacacacccagactcctcctccaggcagaccactgggctgcaaggaagcctggaaatgggccagaactgggctcatctactatccattgaaagtgaacaggaagagtgggaggcaaagaagaagcagcttcttacagactgaggagccctccatgcagcccccagttcttcccacatagggtaccctccaacttgaacttggctctaaacagcagacatccccatgcaacttgcaaacaataaactgcagtgattagaagcacacacacagggtcccactgccatgacatcatgctgtaaaagtgaaaaataaaaaaaaaaaattaaagttcaaggcctacctacagtcatactgcccaactctagcccatcctcaacagtcagacactacacacgtctggacaaatgagtctcctgtctcagccttgatcccccctttggtaatgtttgtggggttgtactgagaacaaacaaaatgatacatagaattccaccaacagagcatgagcatgacgaaagcaaccaaatgtcttcatgtcacttgcgttatcaggaaatactctgagccttaggacagagtaggagatgagagtactgaagtcattcccttcctctggggctgcagactgggctctccctatttgtctctttctcagtttgtacactcctggtagctgcatctttgtaatgtagaagcaagcaaaaagcaccctagcacttgtctctggatattgaaccaatcagaggcttacagccaggttgggcatcctgtatgcaggagaggaagaaacaaacagaaggggtggggtatccagcagcgcaggagtagttgcgggtaaggggaattgaaagaccctaagctgagccccagctgccttcagtgcaaagagcacatagttacaaaaggcaaaacctcactttgggaggagcccagaagtcatataatcagctacctagcccagtactgtttcaaaggatacagactaggctctcagcaatggccctgcacaagcacttgaaggtcagccaggaataagatggagggaagagaccagccaggtaaacaccctgaataagggcaccaagaagcccatcacagcagtgttgtcaccagtgttagccctgcttctaacaagtccccttcacccttcttttccagctcagcacgtggctcggcccttgacccttactctccgtgcaacaacaactgtgaatgccagacggactccttcacgccagtgtgcggggccgatggcatcacctacctgtcagcctgcttcgccggatgcaacagcacggtaattgaaaaccttgggatgcaggggagagggtaggctccaggcagccacaggtgctcacaggcctgtcaagggccacggtggacagtaccgtctttttgccttactgcagctgttcctttaccctgacccatcaggaggacaacaggacaaggcagtccctcaggcctttgctgagtcaaatggacctctaagacactagatggagcaagttaaagtaaaaatcaaaggccactatgtatacgcagctgggaaggtggctctgccatgagatatgcacaaatgatggcagggaacaaggctgtgtatgatagtggatgaccagccacggaattctggagaaatgggaaagccgggaaaagccaaagactaactgtaccttagctcgggtccctttgcctctttcttcccaactaagtgtcccccaccagtttctttcttcccagagtgttatttttatgtgttcttctcctccttaacatgaatttttaatttggccaccagtctgctgtcttaccattctctgtgtggacatctggtgccaaggaacccccatgccgcctgctttctcccacctcacaggtgcctctgccccttttctttgtctgaatcacactgccactgtggctctgcaggctggcctccttctcttgtttagacctgtccagttgtcatctagctatccttccaggacaaccctcttctactgtcttccaccctacagccagaaggatttctgtgacactacaaatgaccagctcacatgctctcctcgagggctctgagcctggtccatgtccatcctcaactctcatctccagctgtcttcttttgctctcagtgactgttcagccctctctcttcagttttcttctcgtacttctctcttcagttggacaactcttattgatccctccataccctattccatagctcgctactctaaaatgactctttatttctcccatcagagttcttgactttgagtgttcaggtacctgcttcttcctggatatatttgtctctttcacgataacaatcttctagaagtgtctgtctttgatctttgggtttcttcaactagggacattattgccccccaaccgtacttcataatttctcacacaatgcgcagatgggaaggaaaagttaatagccacgggggctgctttcagagaagtaattcagtcatttatttcctcccggccctgcctcctgcatcttaaagagcaggagttccctgaaagaaaaagaaatgaatcatttgttttcattttcaaagatttcatttttgcttgcttttaagatttaagattcctggccagttattaacattttctataaaggaaataaatcaccagagattgggggctgggaagacctggtttcataaagtagatgataaagcaatttctttatgtgagtagaagtaaatattaaaagggggttgggacctggaggatggttcaaataaaaacacaagctattatttctcataaggacaacttcattgacattttaatatccaagaagttctgttaacagaccgtttccgacattgtcctgtgatgaaaaaacctaagtgatccaaagaagccgtgtcctgagagccaacaggcctttactctaggggcgtactgacccaaccctgtagcatttgcatttcttccactcttgcccagatacagaggtctgttgactcgcagtctttccaagccgatttgattactcgcagtggctgaagctgaagagctagagggcctcagtctaagactgagtcagctagggctgacttgggacatgatgctcattccccagacacctgctctccattcacaccttgcctactggggtggtctccgggtcccactcttttcccactaaggcaatcagctggatggccctggcttcttctagctgccgtaggtaagacttggagattagagtcctgttcatagtaagtggggcccttgcagtagttgagccaaaacaaaacaacaccaacaacaaataaaacaaaacagcaacagcagcagcaacaacaacagaaactgctgcaggctttgcaggaacctcaggctgagagactgtcaggccaggtaatgggcccttcctacttcattcctggcatttaagagcttggcctggagtcaaaaggaaccttgggatgacatccaaaaagagcaaaggcaatttgagtctttagactctgcagcagtattttgaaggaacgccaaacaaaggcttacatttctggtgtagggcacccttccccctcccatccccttctctctcttttttttctctaggtactcagtacaactcttgcccacataaagggtccccttgtccctcccaatttccatggcttctttccctgtccctagagagctggctgactccgtctgggctcagtcctttcctgtgtgtttcctgggctcttttgtcctgtctgtatctttgcctgcacttttccataggaccccatgccagcccacaaggatcacacaatagagtgtcatgggattctgagaccctatgagccaaacctggaatctttctttatactttgccactccttttcagaatgcccacttttatcctacacgaaactgtctttcttcatgaacactactggcacataataacactgagccttcatgtctgccctagctgcctctccagcctcaatctctcttctcatccctcttctcatcccagtctcctaaccagccacttgttaattgaggctctctcaatggccgagctctcctttgcccctgaagctctgcacttgccattccttttatatagactagtctcccctcgtgtatgtaagtcccatcttgtctacccaccagggctcagcctctctttaccttttacctgcctcttacagagctgtttcctacctcagcactatttcaagacaatattaatgtccttccaatttctacctctcccgttcttacctggcaagagtcagagctcatctgttccaatggctcatttatttaagcatctctgtccctcaccaggggtggagatgaggctgtgttgtagacctttgtcctccacagagccagcttaaactctaggtaaagcctcagactccctaaatgtccctgggtgatcccatgcaacctcaatcaggtgactacacagtataacactcctgggtagcagttggcaagcaggtagaccagatggttctaacttcaaggcgcattcttatccttcttcaggtctctgtctgtctgtctgtctgtctctctctctctgtctctctctttgtctctctctgtctctctcactctctctatatatatatatatatatagagagagagacagacatataaatatatagagataaagatatatatatatatatatatatatatatatatatatatatatatatatatatatatatatatagagagagagagagagagagagagagagagacagatagacaaataacaaatatcagggcccatacaaagtctatcccaggcctgcattagatgcaaataagtcaaccaatcagatctttgagatgctaatgaaacacagtaagcatcaggtgcccctatctttactttctttagtatctcagttggggtgctatgtttgtttaaatttcttctttcatttcccaagcaatagcagtgaaagtttctagcccaaattcgctgttgtgtttctaaatcctgtcattgcctatggtgaggggagatgacaaaagatggagttaattttatcagcctcctttggtgtgaatatattgctcagattgtttgcatacctttcactttcaaaagtaattattcaagcagaaagcatgtatgcattatgctggaagttatgtccatctgatggactgaataattgcctcaagagaaaaacagcttttattagccaccaataggttaaaagtcaacgcaagccaagcacagcagtttgtaaggtgtaagtggcagatggctgatctacccccatccagaccacacaatatttaccaagtgctgtttgagcaaagcatccagtgtattctcagcaaggagaaggattctatcctggggcttgctgggaactggtgattccaccttgcaggcctcaattcagctacattttagaatccctgacttccacaatgaagggtctgagattcttccttattcttaaggaatttttatgtgatttttttagaagcctctcacgtgttcgtagtatgtgagcaggattagaaaccattgtggtaatagactgtttctacaccttggccttgaggatgtcttgaggtagacaattctttctccttaggagctgtcctgtgtaccataggatgtttatccacattcttgagctttatccacacagcccccaactttatctgacaaacatagatgccctcagacatactgaggtgtctctggggacactaccgctctagaagggacactccagccctagaaaggacaaggcatgttctgagatctccaacctctgagctactgctgctaatgccctgtctctctcacaagccagacagtattgcaagtgccctgtgagcccatgtggcccaagctgctgctgcgtgctaattatgcatgcgtaccctaaggaccaatttctcatggccaagccgtattaaatcaagcatttagcttggagattttgtatgtgattttagatttgggcctctgtgagaatgttggaagatacccaataggtattaaacagccaaagatgtggcttgtccttcattattctctatgtacccacagtcctcagcaacagccaccctcacacctcagccactctttcttctttgtatatttccctaagtgatcccacagccttgagttgaacaaagcctcttctatagcatgaacagatccccaacactgatttaacaatctgtgcttattccagtaaatggcttttagagaaaccttgggaatagtccaataaagccttgctagagtttgacccagctgtgacacctgctacatcccaggccctgtgctaggcattgcggaggcagagatgaataagatccagggtctgtgtttgccataaaatctactatggtgttatctagaagcttgtacgagaaagtatcaaaaagcaaaactcagtccagctttacagttcagtgaaaagaacacatcagaaaaccatggaccatggaagaagaatcttccagtaagggaaaagaaaaatgtgaaaagatacatgacttttttttttttgtcgtctcattgctttgttccaattctcacttttgtggggtgttttttttttggggggggggaggttgtttgaaagagagagaaaaaagatcagaaagtcgagtgggtaagtagtcgggaagcttctggaaggagtcaggggcggaggaaacatgatcaaaatatagtttaaggaaatacgtaggtgaataaataaaagttaattttataaatatatatataaacaatgaatgaaaaaaggccataattttgaaagagagcaaggaggggcttatgggagggcttggagggaggatatgaaaaaggaaatgatgtaattatgctataatctcacaaaataaataatttgaaagggaaaagatgggggccctgaggagatgtttgagtcagcaacgtacttatatcgtgcaagcttgaggatctgacttcagtgtcctagaacccaagtaaacagaggagcacggcagtgtgtgccacagttccagggctaggaaaaagaaagcagaggcgggggatctatgatgagccacgttggtgggcataagattcagtgagggaccctgtctcaaaaccataagtaaagttgagagtgattgacgaagacggtcagtgttgacctatatgtgcacatacatgtgtacataccaacagaaagagagagagagagagagagagagagagagagagagagcaagtgctggacaactatataagcacatgctcgcatccacagatgaccacctctgactgggaattaagacaacagtttttgttactttcttccagactttctatatattttggaattgtcccgaaatgatcacacattatctttccaataaggaaaagctttatttttaaagtccaatattaaaaggaggttagatagaaatatatttaaatataaggaagtagctaggtagaccagttagtgtccttgtgatgttatactccctagggtagaaattaactctgcgtgagactggatagaaggagggagtgggcatttatcccagggccggctgttgtcctgaaagtgagcaaccatttgcctgatgggcaagcctggaaagacattcttgcctatgtgggggagcactggggatgtggatcagtacgaaggtgcttttgtaacttgcacaaaacttgggtacataataaaatttttttaaatatcaataattaaagtgtttagatgtttgaaccagtgtggcaggatttggcatctggagacagaacacaggagggagagacacagagtctggggtccccttgacctgcggtcacatcctcccctttagtgtggtcctctttgtcccacatatggtggtagatccagagtcctgatcccccaaagagcatccccttggctgccgtccagcaggaggccccacctctgctggtccatgtgacaaatacaatagatgggggtcttgctttcttcttggcaccttttctcctggcctttatctttccgttgctgaccttacaagcaaagcagaggagagagtgtctttcttcctgcagtttttcagatatctctgctgagtctggtgggagttcactagggttgttcataatgaggaacaaggtctttgcccggagacaccagcttgggttttgttcctggcgtcctaataatgaagcataaaggactggtgacatgaccctcagtacacagtgacatttctcagagtgacagcatcttcctctgcctggattccttcacggctcactaaagctctacacacacccttctactgcttgttactgcattttcttgtgtggttgacatataccaccacatcattacttaaaatagtaataattaatacattaacttgaaaaaaatgaaggtctcccaggcagaatcagggaagaacttgacttatgatgacactcacgcagaaaataatccctcctggatcagaaatgagggaacaatcacatcttcctatcttaatgtttccagagtaaagaggctggcctctcacattttaccgcaacattttttttttttttaccaacagtagcatcgtccctcccataccacacccttacaaaagtaatctgtcaacctgggactctatttcttcagtcccattcataagaaatgacctatcagtactgagtgatgggaggaagaaaacagaagcaacttcatttgccaaaatttgtgaaacacgcctgatgagtgtcttgttcttgtagaatgagctgtcaaaatagcatgttcgccatttccttcatccaaaaaataaacccacatctaagacccagggaataattgttctgcatttatggtctccagcttttattgcgattatttgttcctgccttgcatatgatagaaacgtttctcaattaagtcagtgatagtgtgtggaatcacaatgcaacttgaagacatggactagtttaacaaacattgatttctgcttttgttttttcggttttttaaaattttgctttcttttgtatttttaatggcatggagtgcttagattcttaaaatagataatacatttataagttttaacatcgcaatgtagaaagacacattatgagacttcatccctcctcctctgtcctcccttcacccacaccttagcctgccagtagactctgtcactggcgcaggcatgcagctgagtgtcccttaactgacattccattatggtaattgatggtttatggttcttataggtgttataatctgtgcatatatcttaaaagatgttagtaaattttgatcaagagaaatgcttcatgggctggggagatgatacagtgaataggaacactgactgcataagcatagggacccgaattttaatacccagagcacatggcagaacagggaagcatggaaggtgcttataaccctgttgccacagcaggcagaaacagctgaactgctgatgatcactgacccaccaggctagcagaagcaataaggttcagtgagagattctagctcaaggtattaaggcacagattggtagtccaggacaccagctgttctcatctgtcttctacatgcatggacacgtgctcacagacacagttagttatcttcaccccccctctctctctcacacacacacacacacacacacacacaaagtatatctacaggggactcagagggccttggagatgctgaaagcattgcattttggttgtggcttgtcccatgaagtcatgtgagtggtatgattcgtgtcagtgctcagaatgctttggatgatggcattctgtatttcacattctcacacactcttccagatgttccatgtacctgtaagaccctacttcgttcctgtgatttagatttttaggtaagggcttatgttggaccttattcattcatacaaaagaggtacttttttttgcagctgtaacctcttctatcatgttgacctgatagagtctgttaaacaagaaatagttaaatattctaatagccatcccttctctcaagccacggttagttcacattactcatctgtcactttgggcctgggcaggcctatctgctgggtaagttcttatgaaatttacaagcctgttcccttctgtcatcttgttcaacgggcttgtcaagccttctctgtgagcacagtggccctctcattatccacatggaggatggcagggtattttaatgacaggaaatctagacactggtacctcacattgtgacagcagacagagaattcaattctccggggacaactgggactacatttcttcccagaaaaatcatacaatgtgaagacaatgccttgaaaagggggtttaaaacccaaccctcattggacaaaagagcttacatcttgtaatcaatccagtacttgaaaagagaaaactacatagtaagtttgaggctagtacaggacacttgaaagaaagacacaaggaaggagggagaaagagggggagggaggaagaaagaagtcagcccctagccagattgggaaacacaaatgaactgggaatttagtatactttcttagtacttaaccatacaggacctgccagagaaagctctagagtgcatatctatcattcagttagttcacagaatgttccagaagcatctgtagtttgcacaggacataagatgggagaacatacatctggcctcctttattagactaaggtgaaccgttttcccatacttggccttcctctcttctcagacttcctactgttcagagcccccacaggtttggagggttccacaggtttggaagttctttagtaatattagctggaggcaaagccccagcttcctatctctgagatgataggataaagccccactggtaaaaaccatatgcctcaaatgtgcatgcttggaaaggtgaagctgcaggtgactacccgaagttcctcatgccacatgtgagccttagtgaagagtctcctaacagtcctgggcatccacactcttcctaggttctttagcaccagatctcttgtcttctaccacctaaccataaatgagcttgaacttttaggacatcccacattcactgccagaaagcctacagggatgccctgtgccagaccactcactgtcccttcctcaaatccaactgattcatcaaatagaaaagtatatgccatctgtctggctctgacctgggtttctaacctcttctccttctgaaccctttccacatgaatcagatccggttgatcctggtatagatcctttggaaggattccacccatttactgctttccgtctttagtgggagtaagagagcacctccctggtcttgtgctgtcctccagcatccctttctatgtgcagcctgtgcctgcctcgccgattctattcagggtactatgggaaaaatgccatagacagagtaacttataaactacagtaatttctttcctatagttctggaaacccagaagtccatgatcatgacactggcagattcactacgcagtgaatctggttcccaaatgatgtcttgttcctgcatcctcaagtatttgaagaaatatggtagctctctgaggtatcatttataaaaatacttgttcatgtgggttctatcttcatgacttcatcaccccacctagccaatggcttcatcctcctcttgagtggttaggtttgaacagacaaatttagagaggacacacattcacatccatccttggccagatctgcttgttccccacctgtgccctagctctgtgccctgcctgtctgtatgccccgttgccttagagacaaacctcagcatcagacagcactacttccttgctctgctcatggaatgtcagctggatagatggttaactcatctatgtggggctctggcaaagacaccacgttcatctcattgccttagagattattgaagatctttcactaggatttaggagtttccaatccaggtaggctgacttgccagtaagccccagggatctacctgtttctgtcaaccactgtgctgggattacaaacatgggccaccattcccagctttatacattggtgctgagaaataaatccaggtccctggggctagaggttaggagcaattgttgcttgcaggagacccaagttcagttcccagcaccgaaaggatggttcacaagcatctctaagtccagttccaggggatccagtgctctcgtctagcctctgtgggcattgcatacaaacagtgtacatatgtacatagaggcaaaacacttgtacatattttttcagtacatatttttatccagctccttgtgtttgagcaccaagcactataccaaccaggctatctccccagtgatgtcatattttttgtcaaatataatataatggattatagcttaggtgtagatccaaaataaggatagacaccaagatgacttgataaaccaaacaaaggtaattagtcacatggcttactctcggggttctggcttgatcactgcattgcagcacccctaatatatacccgtgtgtttctccagaagccatgcaagccagcattcggttcctgaggcatttagtcacacagtgcaacagggactattccccatttatacttggttgatccaagtctatgtgattataaggtgacagtcacaagcctccagtcacaaatgtcttcccagccaagccaagtgatcaaagagaatgaggagagcaactggagctaggtcaggtcttggacccttttaggatgtggaaggcatcaggacataggcaattcattcagaacattttctgagtgtctattgtgagcccaaacctgtctagcacgaatgagaatatattaggtaacaaaactttagtgggctctcttcattagccttagagtcaggaggaaaagagtttgatgtgagggtgggtggtgtcaacattatcacctggttcctagggagatggtcatcattactaatgggaagagtaggaagtatcacgtggactgggcagagaaacatcccatatatgcgtttggaagagtaggggcttaatacagaaactggagtaggagagaatagaaggggaaagctctggaagaagtgaaatggtagagaggagatgaactggctctgtagtgagttaggcttgattgcaaaacccaaaaagctgtatccgtaaactgtatccctaggcttgctctgatgcaggaccagaaaggagcatgtaggaaccagagtgtgtagggagagacctgaggagctaggtcacaaggagtctttgctcccttgtatccagccttagttctagccaatggtcttctgagggtagtgccgcttctttacttcataggggaggggaagtgactgtgtctgggcctttgtggttcctagctgggatggatgcctctaacaagtgacccagtaacaagagcagagaggggtattcacaccatgtgccttgggatagactggaggtctccagtgaaatatgtgaatcacacagaagcagctttgagtccagacttaaacagaaaggggtataggaagagaccagggaacgcatgcaatacaaaggatttgttctgtggatctaggttggttagaaccttctccatcaccccttcttcctaggacagaaaggagacacctctacagaaagagatttctgggccagcacagtggtatgtgcctgtagccctagctactcaggtgaccacagctgtaagatcatttgagcccaagagtctgaaactagactgagcaacaaagccagacttcatggctcattaagtacaaagacaagattatatgacaggaccttacatatgtaatttctatacatgtggctttggtgaactgaagatgattgggggaattgtgtctgcaccaaatctgtacagaaattgttatgtcatattccctaagcaatgaatacaatataatgactatatccactgtgctagtattagatataaagtcatctagagatgattttatgtatacagaaggaagtgggtaggctctattctttttatcagggactctaatatctgtagattctggtttctgtatggtatcctggcatccaatatctttggatatgaaggaaccactgactataaatttctgtttaaaaactgatgacttctgtgttgtccaaccttctcccgtgtctctaaatgtcttcaaatgatcagctcaaactagtccttgggccaaggaggcatattttggggtagtgtggggtagtgtcctgtgacttccggcttctacaaaatgctgtatttctttcctgcctagctttcatccacactagagaaggaactctgcaagcatggaacagccttagaaggaaaactgtgggaagtatgccccacaagctcagcttgacaccacaacattgctgtgtgccaggaagggagatatagagtatccaaggggaatatggagtagaaatgaagttgaggagagtcatgaacatataggaaaatatggtgtaggaagggaagaaagtctaccccgtagccatgttagcatgggaaaggggagataatgccaagaaagatggacaaggtgtagccagaagaagaaaaagggaacccaaagaaccaaagaatagagccatgggaggcagggagcaacagagatgccatgagaggagcagggggtggtgggctagggatgtggatgccagtggggaacttcctgagatctggctcacactggtggagagggaagccagtcagaatgagctgagaacagggccagtaaggagctgtgaccactgatcatcagcagctagagaagcttgcctgtgacctcccatcatgccatacaagcttctcttggtagagactgggatggcctggtgagctgtagatggagagaagccctggtaaaggcagaggccaacctggccacctgtgtatcctaaacctgtcttctgcatttcctctagtgtcctgctgcattgtgcaagaagtttaagaaagtgtcccaggttgttcctgtctgacaggtcccattgtctctgtagggcaggtgttggtcagggctcagagggatcatgggaagaatagaggaactgctcatctggaggatgaagggatgtggtgtctgtggtaggtctcttggaaaagccaggtaaagtttttaggtatagcttaagtggtggtggacaggtgtcaggcctcagcacctggaaattgccataaacacccaggtatataacaggactatttacatagatacctaccctggcacactatttagaagatgtacagccagaaggtaccatctattccaaacaacaatgcaggaaagccctagtagttccagggtttgagacaccactgaagctatctcatatggaaaaagacaccccatgtctggaatatcccatgatggaagaaagggaaagcagcgaggaagaggagagaaccaagtgcgaagggagaagggcagaagagaagaaacacaggctttatagggagtctgcctgacccctcgggagagtttacctgctaggcatgcgctcagaaagccaatcagctctggaaagaaaagcaatgaatcatttatgattgttttcgctttgtattcattaaaggcctctgcactattattatcgagccttaattggcttggaactctgaacagcctcctccagcccctgctcctccctctgcgatcagaaattcctggagcgagctggcaagcttgcaggagagcaggagagcaaattttgcttgggaacgggggttgctgatgcagagcctctcagaagatcaaatggaacgtggttgctttcctttctcctctctgatcatatattaataaatgtatcccatcagggctctcgagctcctcccggtaagatcctatcagctgccagaatcccttagctcccctttgcttcctcagccactggacaagttttccaggttccttctgtcatcagggtctaccaggcacaatggcttcacgcatgacagcgtgtgtcctttgttctgggtgccatgccaggcactgaaccagcaacaggatgtggggttacctgatttacttcttttaatacacttcggtgtaattataactgcataaagggaagacaaattggcaagtaattacgatgttaatttggcaatgttttatcatattgtggaagcacaatttcctctctaattgtattgggggggacacatttatctacactgcagcttattgaaggtttcttgagaatggaaatgaaatacacaggagacaggaaatccagctctcctccccataaatattactttatttgcatgtgtttttgcagcctcctttaaaaaaaaaatgctaactcgtttattcaggcccaattaatggaatgccacagaatgtataattaggttgtgacaggctagctgatggattgcctcgggtgtggaaaccagagacacccccagtttaaatggctgaaccttccctttcagaacctcacaggctgtgcgtgcctcaccactgtcccccctgagaatgccagcgtggttccaggaaaatgtcccagtcctgggtgccaagaggccttcctcaccttcctctgtgtgatgtgtgtgtgcagcttgatcggggccatggcccaaaccccttctgtcatcatcctcatcaggtaagctgtccctccacccccaagtccctgagagtcagcttggcctatgcctttccacctggcacattttggcagggctccccagcatcggagctgtgtgagtcttgcaagcaaggtgagagggggctgcagacaggaacacagcagctgtaggctaagaggaaacaatcacaagccttccaccaattggggcttcttcatggtacaccaggacagtagtagaagggcacttccatagtctcccaggaataaccaatgaggcaactttgagaagtcttctatactgatctttttggtaagattgttggtaaaataagatgaaaacagtgggctggggagatagcccagctggtactcctgtctcacaagcatgggactgaggtccttccctgtaactcatatcaaacctggacgtagtagatcttgcttataatcgttatggtagtgagattagagataggcagatccctggaagcttgcaaaattgttagtctagcctattcagggaagttttaggccagtgggagactctgtctcaaagccaaaggtggaatggaacaacgttcaaggttgtcctctgacacacacacacgcatacgctcacacacacacacacacacacacacacacacacacaaacacactaaaatggcattagatgagccaagttcttatttttttttaatttattaggtattttcttcatttacatttccaatgctatcccaacagtcccctataccctccccactccactcccctacccacccactcccacttcttggccctggcgttcccctgtactgaggcatataaagtttgcaagaccaatgggcctctctttctaatgatatgtactcactgataagtggatattagcccagaaacttagaatacccaagatacaagatacaatttgcaaaacacatgaaactcaagaagaacgaagaccaaagtatggacactttgccccttcttagaattgggaacaaaactcccatggaaggagttacagagacaatgtttggagctgagacgaaaggatggaccatctagagactgccatacccggggatcgatcccataatcagcctccaaatgctgacaccattgcatacacgagccaagttgttatgcccaagccttgcacttctgttaaatagccatatacccttagacacaacatggtcccccaaatttgtttctgaatcagttacatagacagcagcacttgtcctgcttgcctgacctctcccatgctctggacccttccaggtcatgtgtgcaaaccactctacagacacagaggttaaacacactaaggggtctatggcatgcatgtcataattgcttttgtataagtaagtggctgcagcaagacacccagaattctgtagccccttgtccctgggaagctggcctggaggcagatgaggatgtcacaagcttcatcattcacaatgctattgctatcttgatttgaatgaggcacctctaatagcactgacctatatttatatcctagtgtccgtctgggtccaaaggaagaacacagtgcacagaaaggctcacttcaccacatgtgtaagcaaggccgttgaaggccaagggctggggatggaaatgaggtgcttggagccaccttgattccttgcacagcatcaggtgctttcccaggctttccctcccatgccctttgctggcaacactcccgaaagtagatttataggaagcacttgtgttacccagatggtcattagcagtggcttatgagtgtgcagaggcattgaggctgcaatagcaaattgccatcttattcttaggacgttcgacaaattcatacccagcgctttagacggctgtggtcaaacaagttagtcagtttctgctagtggtcttgaaaagcttataagtccttccagaaatgcaatatgccagtgtgagtcaagcgccataaaaatattcaggcccctgcagtcacctatccccatttgtggccatttatctcaagaaaatacctctctacaaaaagaaaaaaaaactcaatacagacagattttttattacaacgttaactataatagcagaaagacctgagttgaagtagtgagttaaattatgaaactgcagttcaaagggataatgaaaaatcttaagaacgcgcgaagtgtttatgaaatgagccattgaatttaaaactgtatgtggaaggcgattatatataatatgcatatgaacaaaacccttcaggtttcatgtatgggtttatggtggctgttttataagcagtttgtttttcattagagattctcctgaaactgtatggtaatactcacacacagaaggcaccaggaagcagtaagagggaccctcactaccattagttgtgacaggtccacttatttctcacatgtgagtttccacaaagtcccagcctccagattctaggtggtaaacctttggctgtagaagtattagctgtttccaagcctcaacttgataagcagatcatctagttttgcgggacacactggatcccctttaaatgggtcaaggactgatggtctccatgacctgtgtcacatacatctatgaatgcttttttacctaaagcacttgttcatgttatatcaaaaggggatcataatgcatcattccatcccttccccagtccagcttgccattagagaaattctaggcagaaattaggataccctatgcaggtggatcacggcagaaaattaggcccttgccctggttcaaatcagtgggcttattcttatgctgcacagaagttgtcaataggaacgcggaagtaagcgagaagagcactcacaagcatgggaactcctgttcgattcccaggacacacataaaaatgtcgggcatagtgaagcatacttgtaattccaacaatggggaaatagaaacaggagaattcctggggctcactagccagccaccctaacctaattgatgcacttcaggaaaatgagagacctagtctccaaggagatggatggcatttgtaaggatagcacagaagttatcttctggcctctaaacatacaagcatgcacatgtatgtgtgcacatgtatgtgtgcatgtgcacaagcatacacataatgtattaataaagaatgctgaaaaggaatcaggaaagcagatgctcatttggatgatgctaaggtaccactctgagcttttattctaaattactgtaaatattccccttttacacacgaagaaactggcctagcagtggctatgcaactttttaaaggtctcacaaccagtaagttaatgatagcaagcctgaatccctgcttttctgcagatctttcaataaacaccctgcctgagccctccatttcttcataactaagatgtgtggtccttatgggaaccagtttctctgcaggatatgaagcaagatcttagcaccttcctcactttgttcccagtgacacagaagctgaaaggaaatcacattccaagtgataaatagcctagctcattacaccagcatgttttcttgataaggagatttgcctttatttacgtgtctttcaagttaaaccttcaaatgaaaagtgcaaaaactgtagccacggagcaggaacaccacaaggaactttgcttgtattatgtgtgtcttccaaagagtgttcgttctgctcagagatgcagatcttatgacctggaactggtacctggctctctcagccagagtcccaataccactgctcaaaggaagttataacatacttccctgggggctcactcagcagtaccacactctctatagttaaaaagatcccaagaatagattttactgaaagtcttaggatctgtcaacaattataaaacctactctttcacagtcttttgcagagtaccatgacaaataccatagatgtggtagtttatacccaataggaatttgtttctcacaaatcgggagactaggaagttaaagatcagggctaggttaactgatgagggtcactttcagtacataaattctccttgtgttccaaggtagtaaggagacaaaggaccactcttaggttcttctcctctaaggacattaatccactcatgcagaccctggccttaggacctaaacgctgttcaaaagccccactatcacattgcaggtaggtttggatggaataatttggggaagataatgagtctataatatatatgcaattttttttgtttgcttgtcacatttgacctgctataataagaagcccaaagcatgcataccaaggttcaagccaagtcatagatcaatggataactaacttccaatgggctgatggaatcatctaagaatattattctgggactgagaacatcattcagtcagttaagtgtccatcatataagtatgaggacctgagttttgatccccagtaacctggtaaaaaccaggtacaggctcccgtacaagcttcgtactagaaaggcagagataggtgagtccttagagcttaggttcaatgaaagaccctgtcacaaaaataaggtagaatgagactaagaaagacacctgacgttgactcctgccctatacactataccacacaccacacccacacctacccatcccccccccaacacttcttctagccacatagtcaatagataggcttatacttgctataccagatagtctagtggtaatgatattctaacatttgttttatacaggaccaagtcctacaccgtcactgcattgtgtgggtctggtctctagtcttccagccacactgaagtgctccaacatgtttagggttcaaccataaggtactggttccatgcctaggcaagtctttcaagaagtatcatcacatgcatcccttcatcccttaaagaaccacaatggcaacagatattaagaagtgacactttgaagcccatgtgtatattgtccaatcaatttccctcagagccttttaccacaaacccataggtatatattcccctgcctggtaagccagagaacatctgccaagcttgccacccacatatgcatcccctcagcaaaagctgggtactagacacggagctaggattgagtcataaaggtaatcacaatgcaagtagttctccctttagggggaaagtcaagtattgagtaaatcgttcatgtaagaggagtgacctgctgtgtggacccacctacctaaaattttccaaccccatctctacaggaactctcactttccaaaacattacactctggagaacatgtaagattgttcttaggggcccaccatgcatggccaactcaagtcaggatgattgagtcagttcaaagcaaagtcccgtggccagtaggaggaacctttcaagattacaaggtactaaaacttgatgcacaaacctgggccccagctggcccacctggaatgccaatccatgcaaatctgatggggttttacaaaacagtccaagaactttgaacgtgcccatggttccagctgcagcttaggaatttgctgagttggtgttcccacatatccatcccctacccagctatggtggcacttcctgctggaaactgaaacacaccgctctaagtttagactccaggacagaaattacatccagtccttccagctcaggttattaagggggaaaaaaaccccgcttaattcctaaacttatcttggcaccacagttgcagccaatttttagacgtttagcaagaaaaagaagaaaacctattaataattttccaaggtaggatctgatggacagcaacaaataactctgagtctgttaattaaaatggagttgataagaatctttttctcccctccatctctttttatgtaggacagtcagccctgaactcaagtcttatgcgctgggagttctttttctgctccttcgtttgttgggtacgtattgtctctttagtccctccataatgagttggatgtgtattaccaggtgagtggggatctgggaaactgtccccacttctgagtttgcctcttttcctttcctatcatgtttatttattagtgtcctactttcatttcccattgcaatgataaaacactctgacccaagcaacttgaagggaggatggccttattttgctcacaattccagagtacagtctgttattcccagaagtcaaggcagcacaaacttgaagcagctggacacatctaccttggagggtagagagagaaggaggtcatacatgcctatttcacccactttcccatttatctactgccaaggactcaaaccccatgaaatagtgccactcccaacaagtgggtcttcccacttcaaacagcatcaagttccccacagacatgcacgtaggccaacttgaaccacacagccccgtactgagactcctttctagtgattctaggtctgtcccattaacaaatttaaacttgccatcactttaaatgtaaaattgttatttcaagttcagacaccaccattctagagccctctgatgtcacaggagtcacatataccaactcgggttctcatgtctgcctaaatcttcattagctacagagacactgcagtggctccaaagggaaggaaaaatttactggtgcaatttggtcctagcttgctttctattgctgtaataaacaccatggccagaagcagcttggggaagaaaagggtttatttggcttacatggatcacagtctgtcactgagggaacctgaaggcaggagctgaagcagaggccatggaggaacactgtttgcaggcttgcctgctttgttttcttattcagtgcatggtcacattgcatgggtgtgacaccacctacctataatgggctaggtccacccacatcaatcactaaacaagaaaatgtcttacagacttgcctacagggcaacctgatagagactttattttccaatcaaggctccctctttgcagatgacactagcttgtttcaagttgacaagaaactttccattaagaacaccctgggcagcctgagatatgttttctttctgggctacccactgggagtaagaggcacaatattcattacagctattcaattattttttatttttcttggattatcttattttattacctttattacttattatttatgttgtttttattattcacccaattattcaaatgcatctatttactgtgggtttccaacaggtggaccaaccccttttggcccaaggagaagagtgttacgctcttctccttgtgccaaagctgagataaaaatgacttgagtgactttacctggaaaaggagggtagagaaggagctaaccgtggcctgcaccccaatagtaaacataaagttctcactccaagtggatgtaaagacatggcactagaaatgtgaggtttgcaaaaaaaaaaaaaaaaaaaaaacattttttctcccatcagcacaacagcagggagttagttaaatcagtgatagtctgcaatcctggtaggagccttaccccattaaccttctggaaaggagaatatttgtagacttggaaaggacccaacatgtagaagggacaaagatggcttactctccattttcagatgattataaagtctatctacctatgaaaaaatattgggaggatgaccatcaaaatggttccagatagttttaattaataagactctatattttacacattgaaacctttgaatatctatacatatagattacttttataatgctgttaattcctattaattaacagcattaattgataaatgcccgaagtaggaaaaaaacccactcttgaaaaggaaacacaccataattttctccctccctagtctgtgggaacaatcattcccccaccccaccccacccccatcatcatcctggttccctgtggagcaggtctcctcttggcccctctgtttgtgttgatgcacagaggcatctttgtctttttttctgcttcatgggaaggagaaagacatagatgtggagatgccctagatgaaaaacattaagccatcttcaaattacaacctgttggtgtttctgggaagctatgatagcttgaaaacttctactgccatagacataatgatacagattgttggttttttttttttcttttatcatgggaagtgtagacagatgtattatcacgtcccctgccttcagtggtcaagcaagtggagagttagatagacatgaaataccaacaacttaaagagcttcctgttggaaaatggtggacccattcctcaggtagttgtccagcaaaacgacatttgccaagcacctccagtgttctgagctcccagaccataccaacgaaggttcccccatatcagggctcaaaagggagtggatgtttaccctcatctttatagttactatagaggtctctacatctctaatacatattaaggactctaggcagatcctataacatcaggacaagggaaatgccttggtcagtatagcacttgcctcacatgaatgaggagctgtgttcagatatcctgagcccacgtaagaagataggttcaatttgcatgccagtaattccaagaatggtagcccaggaggtaaagatatgtgtatccatggtaccaccagactagctcctagccaagtggttctcaacttatgggctgtgaccccctttggagtcaaatgatactttcacagatgtggtgtatcagctctcctgcatatcagatatctacattaagattcatttaaaataacaagattacacttatggagtagcaacaaaaataatcttatggttggggggcatcataacacaaggaactatagttaaaagctgtggcattaggaaggttgaacactactgacctagtcagtgtggaaaggtttcaggccaatcaaacatctcgaacaaatcagaatatctcaaacaaaatttggaaggtgcctgaggtccagcacccaaggataggtagaatgatggacatgaaataccaacaagttagaaagccttcttctggaaagaggtggaaccattctgcaggtaattatacaacaagctggcatttcctgggcacctccggtgttctgagaccccaggccatagcaagatgctatgcaaaaagaatgtccttcataataatctcaagggcagaacattgtaaaagaataagttatttctgaacgttataggataattggagataaaaccaaaacttaggtatcataaggtgatccctcaccactctgaagttgatccagagtttgtctgtctgcttcaggaaaagcaggtaccatcaggaatggggatttttccatttctgtgcctataagccagagcaagagataactttctcatcatggctcattacatgcatacatatgcatagatatagctgaaacaaaaacttcatggaaaaatacctttaatatgtgtaacacattctgatatcttctattctgctccaagctttctggaaagttggtcatgacccagcatattgattctattgcccattatgggtcacaaatcagtttggaaaaccttgtgctgagaggatatgacactatctcatcttttaattaaaagcggcttagctgagaagtcttggcatctggcctaattccatctcctccagcacccagtaagattaacagtcattatttttaatgcaaggccaatgaataaatcagataccatgacactgccaaccctcatggtgccccatgtggataatgggaatacaatggggacactgaaattgagtgtgacatgatctgtgatggagcctgcagtggtgtaacagtgacttggggaagggccacctaagattgccttgagattccagcatgatgtcctgagcagagagtaagtaagtgttatgaagatgtacaggaagaagaaagagtgatgtagacaagagaacttacaagtataaggctttcaggctgcagagatcccattgaggcaagtggggtgagacagcggcagccacactgggctggtaaaggtggtgagctaggaacttgatgaggaaggtgtcctgtcccatgggtatctttgacctttatctttaaggcaagtagaagctgctattaggtaccaaaagaaggacaagatccactgtgtatttcagaaagggatgctgtctagggaccaaatgaggtacagtcaattagaattaagagagggttttgcattgagatggtggagctgaaaattaatgaagaagggccttcatggcttggtctctgaattgaagttcagttggctctctacctctgcaagtttcaaaaagacgaattaaaacaaaaacatcttatttttcattttcattaaaagaataaaaactagagtgtctgtactgaaaatgttcacaccagcttttcatgtcactgcctctttttttttttattacgtattttcctcaattacatttccaatgctatcccaaaaagtcccccataccttccccccccccactcccctacccacccattcccacttttggccctggcgttcccctgtactggggcatataaagtttgcgtgtccaatgggcctctctttcccttgatggccgactaggccatctaaaaaaagcagtagtagtatgagctacttggtatagtatttactttgtattgtgcatctcagataatccaggcatagtttgaagtatgcaggagtatgggttgagataagcagatgagctcaggggcaggaggggagaagtatgggccatggctgggctgttctagagtaacaaaagaattgttctgtgtctgcatcctatgtggcttttgagctactggaaacatagcttgtatgcactgtctatttaacttgtattggttttcatttaagtagcaacatgtgggccagtggctgtcatactcggcaggaatgtataagggccagatgttgatacatcggggcagaaagaaataggtgagcatggaagaccacactagggtaagggtggggtagagaaaaatgccagagtccagaaattaaggtagcattggtttcctgtgttactttagaaactgagaagaactagcagatagagcaggaatctcagtggtgctggccactgtggactgagaacttccctaacaaccctacggcagaagtaagtttgcagttggtggtatcagtgggagctgaggggcaaggaaagcagagcaaagaaattgaggatgacgggtcaaggaagtggctcgattgttagactgcttaccgagcatgcttgaagctttgatgcccagtaacatataagagcaggcacgatggtgtagtttcagaaagaagacggtaggaggatcagaaattcaaggtcatccacttatgaagcctgggctatatgagagcatctttaaaaaagaaaacacggctagcagccagagtgaagctaacctgattggtgggagtgcccgtgctgggtaaagaaagtggcaaagagataattagaattagaagaacctgatggggcatgactgcgggcaccagctgtatgtaggaaacagtgagagatgacttgggagctttgcccatagctgttgtatctgattttaagatctgagaggtgctgagatttgacaaaccctgaggcatggctgaccagagagaaacagggagaaccgcctcagcgttgagagcaagttgtttaaaggccagagtgtggtaacacatgtccagttcatgtcatccaggacactaacagaagtggaacagggaaggaggcctcagagttggaggagggtcagtcaccgaagaaggaactggttgctccctcagcagaattcctgacacgatggagccacagattggagatgtccattaagccacctccccatctctgtagccagccaagtagatttgagcaaagaacaaacagacccagatgaagttgagatttaaatttgagttctgtgattctgggaagccctgaatggaccaacagaacagagggtctccaaggtactgagcaaaacaggctggactctatcacgaagtctctgcccacaaactaccatgcttagtctgacagcgaaactgctaagcaaacagcactggacagcccttcctattcatcagtctgtgtctgcagggtcatccctgggcatcctgtccttgggggtttaggtcttgtcttttgaatcacaaatgactctgggaagatatgtgttagaaacctgaggcagatctttatgggttggtggagcgccagctctgagcatcgtctggaatagagcacagtatacaggcaagtaaaaacccctcagctcatggcttattagaaaacataagcatagtgcactcaaggaccccatgtgggcaggagcaggatttaatgtagggaagctgggaggacttccccactcactgtgttctgtttcatccacaaagagttgttaggtaccagctgcacaccaggctccagaggctcctcctgctgtctgcgtgtgcagacgccacatctcttacccggcctaaggtgatattacactgaccaccgaccccctctgcagccaggtatacctcggtgtgagctcttctcagccagtcctgtccgggtggcctttggcaggctatgtaagctctggaaactttcagactttataacaaagggctcaggaatgaagagaggcggcagtagctcctgacttctcaaaattgagaaaagtgactggcaggtgtccctggaaagcacctgctgatgtcaacagtcccagtttctttcttggcatggcggaaggagagaaatgcgtcaatcttttcaggagaatacagctttcgacattcccctctagctggagccggctgtaacagtaattgctacaggttgaatagagagtccagggtaaattcaagtcttggcaggtaagctgaagagtaaccattatctttctaaatgtaaatgacacagtcattttcagcctcccttttgtcctgtaaaggaatgtggatttatttttcttacaaaagcctttcaatttaccttttaagttaagtccaaagaatatgaatagggtttgccttttcaaacatgggagtgaaggaaaaagctaagatacagccctgagggttaatctctggtaatagattttaggaaaacagagactgtctccttaagcagcatagcattttttttgctcacacagtgtatgtgtgtgcttgtttacagatatatatattacatatagatacctaagtatatatgtatatatgtacatgtacatatgtgtgtgcatgcatgtgagctacagtataaagaagatttaatcattttaatatttttggagatagcaagcagtagtgagcttgccacatagcctgccagcacatgacttagctctattgagacatgtttcacacacaaggttttgcccaggaaatacaaaggcaagggagactcttttccaggctctgaggaagagaggaatctccagaacacattttctaacaaaatatcccaccagcatcagcctgcctcctcattccttcctggacaagagtctagcagagcaaaggtgctcaaacaaaaagagacactggtggatacctggttccccatctagaggcacacaattgtcctccaaaataggctagctcttcagaggttacccgccaagtcttgacttgagaggttctctgaaatatatttattcctttggagatgttcattagccaaagagatttaggccaaaaccctaaaaagtggggtcagaacctggtttggtgagcgctctctaaccatactctctcaataaataaataaaaatagctctacaataaagcatgatctggggtctggggagatggcttagtccttttaccacctgaggacctgagttttgatccccagctcctgtgtaaaaggcagacttgctggcacttgagaggcagagacaggctgatctctgggtcttactggcatgccccccaatcgcaactttcaggtacagtgagaaactctgtgtcaaaaggaataaataaaatggcgaaaggttgagaaagccactcaatgttgacccctgtccttcatgtccacttgcacttagtcacaggcaataatacgcacacatggagaaagcctacacacatatatacccattttataacgaggctgagattcagtgaggttgtggaacttgaccgaactcccacagttcccaagtggtagagttgcaagagagggttcctccttccacatatgagttccttgattgaagagaaaggtgacaaggacaacagatgactaagtgtctcttcctgtgacaagtgtctgccagtgctaccgagaggcacagtgccagataccggagggagaagctggtgtgcaaatcaggctcccagtttctccaagcctggaggaagtacccagggagctggggggatctgcaactctataggtggaacaacaatatgaactaaccagtacccccccacacacacacagagctcatgtttctagctgcatatgtatcagaagatggcctagtaggccatcagtggaaagagaggcccattggtcgtgcagaccttatatacctcagtacaggggaataccagggccaagaggtgggagagggtaggtggggtagtgggtgtgggaaggtgtgggggacttttgggatagcattggaaatgtaaatgaaataaatacctaataataaaagaaaaaataaatttaaaaaggcctccatttaaaaaaaaaaaagcgcagaggaggaagagcgctagagctagcaaagatctgagctccttcccgggtgtttctctctcttcatgcttcaaaacagagcttcctcaagctcagtgggaggtcaataaactgttctctgtaaccctggaaatcccagacaagaagtccaaaaatcctcttcaattaacaaactttgaattagaagaaaagtagatgatgaggtttaagagaggttatgagttatgaagggagtcataatggattgagctgcatcccctggagatgtggggtggttagctggtcagttactactagtatagaaatctcccatggtctctgggtaagtcagcgtcttgtattgacagcttgtttttgagtttttgttggtgtttttctatgtagtttaatggattcgtaaatctatccagatgaatggctggtgtgaaaattttgtcagaagtctaggaatctgaccagtgactgctcaggagagttccagagtagtaaagacttcctgacaaaaggatgcccttcagatctgcatctctgtagatatgaatttaaagtctgatggtagcttagcatccacctttgggagagatgtgcaagtcaataaaactgaagagtttaatttgacaaaaaggaaggctgatgttttatgaagaaatagaaagggagtctcatgaaggttattttttggatactaagcctagcgtttagtctaaaatctcaccttaagtcctggtataagataatcctgttagcagaagttctggccatgtgaataggtcaggcctcttgctaaaacatagaggtggtgtcagtcccatcttatatgggggcactgagagagggagtgagctgccctggcattttcagctccttaaattaaaaagcaaaaaaacaaaacaaaaacaacaacaaactgtcatctctataaccaatgttctcaaagatctggagtaaagcatgaaaaactttgatggacacttagctttctaagtacttgaaggttttctctagttctgtcaggaacatcattgtctactaggggaacctaaagataagataaaaccgacacttttagacaacagagcacgcgtgccttacttaaagacaactgaatattaatatataatacataaatgaactttctcattcagatgatcatgaaggagttagttacataatgagtttgagcttgaacaaatactaactgatggctcatttatactccagatgtcctgggatgtgataaagttatattctgatctgccaaacttgccatcgtgtccaggaacccatgcgtcatggagtaaggaacacctaactctttgttcctccctgtggatgaatttttcaacaggatgtccttagagcagggtgcccatctataccgatgcttcactgctacatgaatagtagctagggcagaggctaatgacctcaagattggtcacaataggtagaaagagcatttggcatctaatcacaaaataaaaccacaagaagcagaaaaggtgagtggatttatgctgccccattgtgcccgagaataggtcaaatcagtgccatttagccacagatccatccacatgtgcatcagttgccatggaaatccctccatattggagtggggagagcatgttccaactcagcctggggtgggaggttgggaagtgggggagacaaaagctcctgagcagtctctgtgccactgggatcgaggcaggtatttttccactttgcaggagcaaagtctgcaccaggagcagagaacagcttgtaggggattctgagcttacaatgtttattaaatcaagctgcttgaggagtttaatgaggattccaataaaatccaccttgcgggggtttctctggggtaacaagcaacagacttaggagaaggaccaagacaccaagacctaggagccagtgctcaaccagctgctcaataccaagactagaacgagacccagcgatctatccaggcatgtcttaaaatagggaagtgctgaaacctcctccatccactgctttctggtccctagcttttcacccctcctcagcacggtactgtagtattatctaaatgtctgaaagacttgtgcttctaacccctgtggatggactttgcagatctctgaacccctaaaatgtgtgcttggcatggagaatccatctgtttttctggacaaaggatcaaattctcagaaatgccttcagtggaaggtgaagtttgatccaggatggagcctggaaggaacgctccaggaagctggtaggctagtcctagagtctcaggattgtcccctctaattgccgccatcatgcctcacaattggggtctgtcactgaaggtatcggtaccagattctagcctcagggaatgctaggattcataaacaatgaatttttattaataaattattcattttccccccataaagctccttaaaacaagaccagaaccatctgggattttttttttcagtgctgaggatcaaacctaaggcttctagttcattttcaaaattcaaatgacggtggctggaacgctgtctaagttggttaaggtgctagccacgcaagcaggatctgattctgacattaaaacaaataagtaaacaaacacagcattgcagtcccagtgctggagaagcagcaggaacaggtgagtctctggagggccctgggcagcccacacaactaaattggcaagttccaagacagtcagaatctatgtctccatttaaaaaaaaagtggatagttccagtcatacaacactgatgactgacctctggtttccacatgcacacataaacatgcacagaaaatgctgatgactgaggccagggtggtggctagcaccaaagtgcctgtaatccacctacactagatgctgaaaagagagattcacatgagcccatgaatttaagaccagactacacaacataatacctattttttaaaacagagaaaaacataatagctgagctgtatctcaaacactgggatgtttttggccattggttgttagtctaaggagtgtcaaatagcccttgatcaacgggatgagagcaggcaaataaaccgtcagattgccatacacttgagttaagagtggggaccattttcatctcgcctcatgtttctgataacaactgtgggtatctggtgccagccccgcatggaaagaatgcacaccagtctaagagctggacaaatagtaaccacgagaatgtttgtcgcatttctcatttcaaactataaatgtccgtttttgcgctcacacagtataacccattcccattctacttctggtcccaggtccctccagttggcagctcacaccgcccctgcaaacccctgcaaaagggctatgagcagagccactcgcctctttggcattccctctaggaggccaactaatactaatatgccttcaggaatgactttatcccttctcagaataatgacatctgtcaattatcttgtgtttacagttaccaggtaaatgcacagcatcctaaatacttttcacatattaacttaggcagcatcaggcacagagggttcaatgattttgtctggataatgaaggcagagatgggatttgtgttcctgtggtttgaaccactgcactatggagccacgtgacccagcgtagtctcaaagcagtccgtaaacagctggacagccagggacagaaatgcctttctctgcagtgaattctctcccagagccagagtttgaaatgatctcttccctctgacaggtttcatccccccacctctcatcttcggggccggcattgactccacctgtctgttctggagcaccttctgcggggaacaaggcgcctgtgtcctctacgacaatgtggtctacagatacctgtacgtcagcatcgccattgcgctcaagtcctttgccttcatcctctacaccaccacgtggcagtgcctgcggaaaaactataaacgctacatcaaaaaccacgagggcgggctgagcaccagtgagttctttgcctctactctgaccctagacaatctggggagggaccctgtgcccgcacaccagacacataggacaaaatttatctataacctggaagaccatgagtggtgtgaaaacatggaatctgttttatagtgactacaggagggctgaactctgtatttgtgaacaaagagtcattttcttaaaaaaaaaaaaaaaagaaagaaagaaagaaggaaagaaagaaaaggaaagaaagaaaagaggttttgaaaacagagatgcacactctctcacacacacacatacacacatacatacacataagacctttgtcctttttctaaaactcagagccagtcaggattcagaataaagagagaaggggatggccctggaggacatacacactgctgggctcagaatctgcttggaaggcacctcatggttttcacgatgccgacagctacaagcaagaggcactgccaaattcagggaacacttgtggccagcttggaggatggacatctctggatatgcatacacatacaaaacttaaaaggcattaaaaaaatgagtctactaaaatcacaagttcaagttgaaaaacattaccagattaagcactagagacaccctctccctccagtggggtgggggggggatacaggttggagggatgggaaccccactcctctttccaacttttgcaatatgggtcactgtgtagaccactcactcagtctatgtgtggttcaagcccccagagttctcaaagagatgctgacgggttatccggactggagtctgtggttggcacctctcaccagctccatttccatgttcaagactgagggcccaaaggaggggnnnnnnnnnnnnnnnnnnnntttttattcttttaatgaaaatgaaaaataagatgtttttgttttaattcgtctttttgaaacttgcagaggtagagagccaactgaacttcaattcagagaccaagccatgaaggcccttcttcattaattttcagctccaccatctcaatgcaaaaccctctcttaattctaattgactgtacctcatttggtccctagacagcatccctttctgaaatacacagtggatcttgtccttcttttggtacctaatagcagcttctacttgccttaaagataaaggtcaaagatacccatgggacaggacaccttcctcatcaagttcctagctcaccacctttaccagcccagtgtggctgccgctgtctcaccccacttgcttcaatgggatgcctcctaaacacctcctccctaccagccccacagtgtgacctcaggaagctgtgggcctcacctggctatgactgacccgctcagagccggtgagcgccaatatagcccatgtcatttgcttacatttgccaaacattttgccattttttttccaaaaacaacaacaaaaaatataaagcgtacgaatttccaactgttgtatgtataatcctctaatactatttttaactgcttctagaatctgtgttaacccttcagtcactaacaaagcttttacttctctcctttttttaatgcaccaaaaatataaagggattcgagggatgcagttaatctattgtaattttcattcttactctgataccatgaaaacaaacaaacaaacaaaatcaaaaacacaatgtggtataagaaaaagatactccggaaagagtgtaaatgcatcttgaaaataatcacatctgagataatgggataatgtgacaagctgcaaatctgccttctggctttatcccctgtgatgatgttactgtcacaagaagcccttttatagtcatgcttcaggtccaatgggcattcctcttagcctgtgaaggagactcactcaaatgtgggttgatgtggatgggagccgtgctcctggggataggagagagagggtgtgtggctcctgcctacgactgttttgtgagctgtgatacttgtgatcataaacccacaagctcctaagtgatcactgtccagtccatgaaaatgttagtgacaggtcccaggtcagtcctgaactctgtgcattgaaagtggctgaacctcagagcatcaccttgccatttgggataagaatcgtatgggtgttggggggagggaagatctcttgcaccagcacacttaagacaatgtggcctctctcatcaggggatggatcagatgggagcatatatatccatagcaaagggtccagtcagctcacccttcatacctctttattgaccttttttgtagacatacatacggtaccaaagtcgaccacaaaggatgcttggtttcatttttccaccttaaacatccactcacctgaagcaatgaaagaataaggccagaagagtaaagacatggatgttgtgccatattttctttttacagatagtataagtggggaagactaggtaatagcctcaaagtagagaagacatcaagcaaaggcaactgagaaaatgtctgtgtggcattgtggctatggttgaccatctcattcagggtgcttctaaaacagccctcccatctgtctaccaggagttagcctatccttgttgatgaacatagggtgctcatcagtatagtaactaggaatggggaacagttctccaaacagtttgtaaggtgatgttctgtcgctctgaaggctttgatcatgctccaaacaggttttggttcagtcttgttttgaaaatgaatgactaatgggtgaccgccctctctgtcgtgtgtctttgcaaacggaggccctgggatgtactctgtttcatgacatgatttgatttgatttttggaaaaaaaaataatgatttttaagctctttgtatcttggatttttttccccttaaaatgttcttaaagatagcaatggaacccaactccagggcttgctttttatcaacagttatttataaatttaaaatctccctgtggcaaaatgatttccatgagtgttgtgctctctttcaatttttcaatttttctcatgaatgtcaaaaaagaaaatccaatctacttttcactgtgcatccaaggttagatccagccccttggttgtctgcttggttttgagtggtattctagatgaaaactgtcctggtaagatctcccttgaacatacagaaaacaaaccggggatggatggagaagacgtatgaaaggaatgctggagtgctctcttctgcagtcacctcctccactatcttggttgaatacacccaaggatggatgtaaaggtctctgctgcaaccttaggcagacctttgtaacttatacatgtaggccaagcaggtttgatgctttgtacctgtgctacttcccacattgtggcaaatgggtttttcttccttctgctgaggttctgtgctgtcagggaacacatgtgcctctgttactcacttcccacccccacaaggggagccaccaagctctgataccctggggggtaataacaaagccatgggatgcccagactttcctcacagctaagaaagagcaaaagaatccatccttttcttttcccctaaggagcctgctgctagtgcttagcagcaaaataataaaggcagccaagagttcctgaggagctatttgagagttagcatcttccaagcaggagggagggtgtgcttcttgctaacaatcctttctttttctctacttcacagtgggttagctgctctggggatgatgacctttcaaggagaggtgttgtggtatctgtccatttggatccccagatccagaaatgccctggagtttctcctcacactatagaaaggcttgtaggcctgaggcagcctacaagaatgtcctacacaaggacacccacccagtgacctactgtcactagaaagtagtcatgctgcccctggggaattttcctaagattctggggtgattttactagttggtcctctccagtagcttccagtggagacatttcaaaggaacccagaaagtgtaagtatggatttgggctcacagaagaatgctctgaggagacatggtggttgctcagccataagtctgcccatctggctttcttttaatgtgctgtttctggtcctggggaagagtggtttccgtatcaactagggcttgtcaaccatgggatgtgtcataagatctccatgagagtcttgaaaacagtattcattattacgaaataataaatatccatctttttctattcagtatgtggaaatcaactgtctgacctcacagtcaaaaaaaaaagaaaggaaaaaggacactggcagaacaagctgcccttgctgtttattggaaccctgccatctttttgctgtgtgtttggtttggttatggtgagcaaggagacccaagtgtgcagcttctcactctagcagatggaagatatttatttcctgacttttgctgttcttacctgattgttttgatgcatgggacagccagctatctggccagaaatcagggacagcaccaaccagtagggttttcactggtcccctgggtttccttcaatacaattaactttaaaatctttaagttaagaatccaggttgaatacctaaacggcaccatgttttccaagagagggtaatagtgaaataaaatctggtttagggaattcctttgaggtccaaacccagctcttttcctcctgccttctaatttgctgcattcacccaattcatacccaattctatccttccaaacaaaaacctagtttcatagtcaactgaccgaaaatgacaggcagtggatccctggtcctctagagtattactgctactcaagggccagttagaagacattctcattggcaagacaaacaagaaggttattggtattgttcacaagcctttgctaagatcacttctttgtgttatacctggattgcatcactccacactgcctcctttgctcttcacgaatgtgaagaacctcagctactgccaagtcatggtgggaccaacatggcttagcatacttccacaaaaaaagaaagaaaaagatggtgctgtaactcaggggtgtttgcctgcctcaaaaatgaagacaagggttcctacttttaagaggccacctctgatagcataatttttcattgtagtgtttcttttcctcaaggatgtggtgtttgaccataacccagtcatccttgtatctaaaatgttgggctgtgtgtcatctagactaggtacatggcccctttccttcaagagctcacagatcagtgaactggaacacaacaaatcgtccgaagaacattcctagccaggttctgtctggatgtgagagatgattcagagctgactcacagtgatagcaagctttgatcgatagctgtaataatcaaagagagagaagaagaaggcagggttctcaataccaaatgacagtgagtgtgtcccaattgggtagtaagaagacaaaggaaaaagtcactactaccacacagatagaaccaccaaagcagagcaacacattactcttgtttgggattacctagtaaaatacttgaagccttgtaggccatcagactgtcaaaactacttaccctgatggtcttacccaaggtcagctcaaagcaataaatgagcaaatgcctggcctgggtaccaacaaagctttatttacaaagacagtcagtagctgaagggccagacagggtgtgctgaggcaacaccgtcttagagatgccaacagttcagcacaggtagggcagatctagcacctacatcttggccatgacattgactgagtcatttctccaaagggccctggaatagctgtctatcaaccctactgtccctaaaccaagaagtctagttaaaatatctcacttgtttccaagaaggggaaagtgcttttctggtgtcagagttggtagtttaaggcaacgttacttttccctttggtgcaataaaaattttgaactacagaacctgtcttcccttccagtctgacatttggcatttcaactagactaatcaagcccccgccccccaactaaagaatggatacagaaccatgaaggagaagcataggaaacaggaaaagaggaaggaatccagatactgactagagcttcaaacctttccctcttcagcaccaacataagacattggcattctagagctaatcaatcaggtagaataattggtcagcactagtaatagctaataataacagtcactaacatttatcaggtgcttactttgaaactagctgctgggctgagctgattacctgcattaacacattgactcttaacactaaccctgtgaggcaggaactattgctagttgtattttacagaggaggaaaatgaaacttggaagcattcggaattggctcaaggtcatgagaagagatgagattcaaacccaagcctgagtccaaagtgcctgttagcaaccataattagatgctccctccccacccagcaaaataggagggagccttctctgcctccagggaatgcctaacctcaaaatctctagcacaaatgatccagaggccacacattctttgtgtgtcccccgggatggtaagcaggacacaatggcagctgtaatctagacacagtattggctatccctcctttagccatgttctttatccctgatctcagtagttcatttatacaaagtgtcccaccgaagataggcaggtaaaaggaaacagaatgaaatgtatcaggagtcctagagactgttctcagtaccagacaggagctcacatcccctatctcctatgaggtatcataacacccatctcatatatctctgatccaggggcttcaaacttgctaaatattgactatgtctttcgttccagatcgcaggctttgaggagctgagtatctagacatttacatttttataataacaactcaagtcgacaatcaggggttgataataatcatacattttgaatatttttccataaggttgaagtgattattatttttgctatgagcaaatggaataatgtagccaattttctggagatatgacattctgtaggctggaatttttgctgtttccttactggttttcttaagttcatgctaatcaaatggaaggtggctcttgtggagataaatttggcctgaaagtttgatttacaatctgaggccataaaatgaagcagaactgggcaattcagggagctcactgtaaggagaacagaactaaaacagcttgagctgaatccagcagctcaaagggacaagggcttgggagttcttgtttattaagcctgcaagctttatgccaggtctgagaatgcaatatcccagttgaccccaccagcccttttattcattccctgacaggtaagttatcctcccaccccctttatagatcagacaagaagagcctagaaagttcatttcccaaggtcactagctagtaaagtcatcaaaagtcagtatgaggtctccataattcctaaattggagctctttccagcccagcacacaacctcctgagtgggaacatggaagccaacagaacatccatatgtggtatggaagagatgggagtgtcccactcctactgagagtcaatagtttctcagagaaatgagtcaaagctacaagacctctgcaaaatgttgcctgccaacataagacccataaaattcgaaaagctgttccactctagcagttaccagtagagacctttcaaggccttcctccttccatcttagacatatcaaatccttcccagccagttgaactgagcaagaagcaacttcagctctcatttctgccctgtcccctagagtggtgctaacccatatgcaaatttccttcatcccatccctctggcatctctgtggagagatggcattctgacatgtttctttgtttgtttgtttgtttgttttgttttttaaatcatctggggaattcttctctgatgacttctcccaagactctaagaacataagacttccaaaaagtcaaatacaggacatgggtttcttcctctctagcttctaaatgccaaggaaattctcttgccttttaaactgccaggtcaaagtcaaaagaggacagatcaataaccaggaattattgtggtctccccaaacctgttgctcaacaagaattagctttgcatggcgtatcatgtggatgagttaaaacgtttaggctttttatataaaaccacagcgtcatttatagaggtgtgacctgggctcagacctggttccagccaagatattgtttgacttaccatgcagtgactgtctgtggatgaatggacagtaaactggtcctgaatgcaaaaggagaaagcatggcaatgattcaagtggttttccctggcacgcagcctcctctttgataaagacatagtgacacttggacacaagatctattactggggacttgtgtaaaagatagataaataaaggtttggggtacaacctttggggtataacttatcccccaaatgagtattaatatgataccgataaactagctccaaaagagcctggcttcatagaggtccgtgggcttagaatctgttctttcgagggtgagatggagaagaagctaacactttactgctgtgacttctgctcatccctttggctggaaatccatgcggctgtgatgtaagtctaatagagagtaggaaatgcagaaaagacccatctcttttctccttttggctcttcttccctccttcccctctaggcacagagtatcaagacattgagacagagaaaacctgccctgagtcacagtcaccttcagaagactcctttgtgcgaagctgagggctgctctcttaacagcagagcccaccaccatcaccaccaccaccaccactaccatcaccaccattcacagacctcgaggcctgacagccctgtgctgcctgggatcctaagggttcctatgtggattaacctatcgatatgtggtcctttgaggcttcagacacaggcctgtgacgaggactaaggaggtggcacgtggtcagctgccctccagagtgggcttcggtcctaaaatgcaaggttgaaactgacgtgcaaatttcctttcggcctatccctcttctcacttctgtggggatggctttctgacatgctttagaaaaccccctctggggatgcttctctgaccaaacactcttaaccgttccaaagaaatcagcggaggctgagctttaacagaagggtgtaaaaatccggattcccagcagagaagagggagaaaagcacagacttaatagattctgcgtgtggtagtctgtatttttgcagcttctattttccagatgagcagtttagagatacatgatataaagtatatactgtacatttgctgaaattatattaaaagcactattttaattctttccctgtctcatgttgtcatctctgttacgcctcctgtgtctctgagtggaacgagccgaaccggagtgtgccttctagctgtgtgtattctgtgtgtatttatgggctttgacatgattaaaagagcacaggctctggagtcaaaccagacccaaacccaatcttcctcgaagcgctggctactgatacgatgctggtcgagtgatctggcatgacagagcctcggtgtcatctgcaaagtgggaacaatcgtggctgctttaaaacaactgccttgagacttcactggaagtgcatgtgaaggcgacaaattcagtgttctgcataaaaactgtcattgttgcttctacaacccaaagctgtacctgatacagctgctgtgaatgtctcagtagtcctccatacccaatctcctttctgagtctcccaccatatagacctgggaaaggaagagactatcttcagctcaacacaccagcattgttcaatacagtccgtgatggtcaatggatgcttagtatataaacaagtcttgagtagctagccctgggccccgtggcctgcagggatctgacttaattctctttcatctaccacaatcccagcactcacttccctttctctgcatccacatatcttaccatgggcagagctgcagctgccttcttctatcctaccaagcctcttcccaataaactggcttcatttccatatccttaccacttcactggctggactccaacctccatgggcaggttgggcaggtcaatcttgccactagcctgca

SEQ ID NO: 56 - DNA, 1537 bp, Mus musculus
gaatcctgttcacgatgttggtatttggaccagcctgtggatttattctgggctctttctgtaccaagatctatgtggatgcggtcttcattgacacaagtaacctggacatcactccagatgacccgcgttggatcggagcctggtggggcggctttctgctctgcggtgccttgctcttcttctcgtccctcctgatgtttgggttcccacaatccctgcccccacactcagaccctggcatggagagtgagcaggccatgctcccagaaagagaatatgagaggcccaagcccagcaatggggtcctgagacaccctctggagccagacagcagtgcctcctgtttccagcaactgagagtgatccccaaggtcaccaagcacctgctctcaaaccctgtgttcacctgcatcgtcctggctgcttgcatggagattgctgtggtggctggcttcgctgccttcctcggcaagtacctggaacagcagtttaacctcaccacttcctctgccaaccagctgctcgggatgacggcgatcccctgtgcctgcctgggcatctttctgggtggccttttggtgaagaagctgagcctgtctgccctgggggccattcgaatggccatgctggtcaacctggtgtccacagcctgctacgtctccttcctcttcctgggctgtgacacaggccctgtggctggggtcactgttcgctacggaaacaactcagcacgtggctcggcccttgacccttactctccgtgcaacaacaactgtgaatgccagacggactccttcacgccagtgtgcggggccgatggcatcacctacctgtcagcctgcttcgccggatgcaacagcacgaacctcacaggctgtgcgtgcctcaccactgtcccccctgagaatgccagcgtggttccaggaaaatgtcccagtcctgggtgccaagaggccttcctcaccttcctctgtgtgatgtgtgtgtgcagcttgatcggggccatggcccaaaccccttctgtcatcatcctcatcaggacagtcagccctgaactcaagtcttatgcgctgggagttctttttctgctccttcgtttgttgggtttcatccccccacctctcatcttcggggccggcattgactccacctgtctgttctggagcaccttctgcggggaacaaggcgcctgtgtcctctacgacaatgtggtctacagatacctgtacgtcagcatcgccattgcgctcaagtcctttgccttcatcctctacaccaccacgtggcagtgcctgcggaaaaactataaacgctacatcaaaaaccacgagggcgggctgagcaccagtgagttctttgcctctactctgaccctagacaatctggggagggaccctgtgcccgcacaccagacacataggacaaaatttatctataacctggaagaccatgagtggtgtgaaaacatggaatctgttttatagtgactacaggagggctgaactctgtatttgtgaacaaagagtcattttct

SEQ ID NO: 57 - protein, 490 aa, Mus musculus
ILFTMLVFGPACGFILGSFCTKIYVDAVFIDTSNLDITPDDPRWIGAWWGGFLLCGALLFFSSLLMFGFPQSLPPHSDPGMESEQAMLPEREYERPKPSNGVLRHPLEPDSSASCFQQLRVIPKVTKHLLSNPVFTCIVLAACMEIAVVAGFAAFLGKYLEQQFNLTTSSANQLLGMTAIPCACLGIFLGGLLVKKLSLSALGAIRMAMLVNLVSTACYVSFLFLGCDTGPVAGVTVRYGNNSRSALDPYSPCNNNCECQTDSFTPVCGADGITYLSACFAGCNSTNLTGCACLTTVPPENASVVPGKCPSPGCQEAFLTFLCVMCVCSLIGAMAQTPSVIILIRTVSPELKSYALGVLFLLLRLLGFIPPPLIFGAGIDSTCLFWSTFCGEQGACVLYDNVVYRYLYVSIAIALKSFAFILYTTTWQCLRKNYKRYIKNHEGGLSTSEFFASTLTLDNLGRDPVPAHQTTKFIYNLEDHEWCENMESVL

SEQ ID NO: 58 - DNA, 337344 bp, Homo sapiens
  misc_feature (1)...(337344): n = A,T,C or G
tctagcgagtctcctgttacatgttacggaatatttttcatagactcaatgtatctttataccatcccccagcgcatatgcacttactccctctccaacaaggatatagctgtccaaattgtttgtactctggatctgccagaatcttcctcttaaatgtttaactgaagaggaagctatggtgtctagctagcaatgtgtactgttacactatgacatgaatttctcttgcttccctgtttctttgtaaataaaaggtgaattcattactaaatactttgaaacattccatagtctttttgtggcctgaaacagtgcaggggaaactccgattccaagacacagagctctcaatgtatctggcagattgtatttttcaaaggtagccacagcaaatatatacctcattccttggttcttctaacaaagtgacatcaaacatccttcaccaggagatgaagtctatgttctcccgtcttgagtacagatggaactttgtagctgcttccatgaacaggctgcagcagaactaacatggctgacttctgaggctaggtcataaaagtcacagggctccctctctgaggcaggtacactgggagccgggagcctgcatgcattaagtctggctgccctgaggctgtcatgctggagagatcagggtgagagcccgcaaacagatacccaaagaggcccagctattctcacccgcagctgtttgtctttgtagaccaggtgccaggtgccaaatgagatgatcccagctgacagtagagtccagctctccctcctaagccctgtcctgactgcagatttcttgagcaaagtacgtattgttttaaaccactaagttctgtggtgggttgtcacccagcagtagataattttttaaaagtttcccatccttattcgcacttacattattttacatcccagggcatactctgcaaccacccatgcatttcacggaggcccactgcgcctttctgggagttgcaattgcacagatagattcagcaaggtgagaatgccatcctcaggcagccaggaggtgactgtcaggctatttggttggggaaccagccagcatcccctctgcagaaccttcctctctttttcctatggaggaagtaggaactcctcttccttggtcatcccatctgtcctgtgtgaggagtaatttccctgagaaactgaccatccatagtcaggatcctgggttttcagccttttatgtcctgtgagcctctggatttttgttgggtaaaggcagttaggagggggaaatccaggcaaccattatgatccagaagctcagtatctcagctttcattctgagattcagatatgccaccaaaacaacattcagacacaaaataannnnnnnnnnnnnnnnnnnnnnnnnnnnnnnnnnnnnnnnnnnnnnnnnnnnnnnnnnnnnnnnnnnnnnnnnnnnnnnnnnnnnnnnnnnnnnnnnnnnnnnnnnnnnnnnnnnnnnnnnnnnnnnnnnnnnnnnnnnnnnnnnnnnnnnnnnnnnnnnnnnnnnnnnnnnnnnnnnnnnnnnnnnnnnnnnnnnnnnnnnnnnnnnnnnnnnnnnnnnnnnnnnnnnnnnnnnnnnnnnnnnnnnnnnnnnnnnnnnnnnnnnnnnnnnnnnnnnnnnnnnnnnnnnnnnnnnnnnnnnnnnnnnnnnnnnnnnnnnnnnnnnnnnnnnnnnnnnnnnnnnnnnnnnnnnnnnnnnnnnnnnnnnnnnnnnnnnnnnnnnnnnnnnnnnnnnnnnnnnnnnnnnnnnnnnnnnnnnnnnnnnnnnnnnnnnnnnnnnnnnnnnnnnnnnnnnnnnnnnnnnnnnnnnnnnnnnnnnnnncctgtctctccctctctatcctcctccctccctccctccttccctctctccctcccttccatgtaataatgcctgtgctgctgcccagggaccacactttgagtagccaggctctaggcaatccctcttgctctcacctcctgcctggctaggtgcagtcttacagctactgtcactaccatgtccgttttcttctttcctcctaatgcttacgggctcttcttgccattttctcctgtcccatacctgttgggcagctccagtgatgaagggtttcttcttcttgtgtcctcacttgtttgttctctccctcatagttactgaccactctgggcttggctcttttaggaggcaaaaatatagaaatgaaagacactgaccaaaggctaatgagggagaagcacagtgagagctctccacagtgggatccatgctagggtgtgcagaggctggctcaggcggagaggggaagcaggtgggagggagtcaggaggcagttagtgagagggtattctctgaggacttcctggaggcggtgacactagctggatcttaagatactagtaggtgtaagccccctgaagaaagggggaaggaaggacattccaagcagaaggaacagcctgcacaagtgtttagaggaggagaccgcatggtgagctcaaggaactgtaattaagcacggatggagtgtacggtgtgtgaacggctgggggagggttacggttgtatattatctgctccggctgccataacaaaatactacagactgggaggcttaaagaacagaaatgtgttctctccccattctcaagactagaataccaagatcaaggtgttgacaggtttggtttcttttgaggcctctctcctttgcttgcagataattgccttccacctgtgtccttccatggtcatctctctatgtatatctgtgtcttgatctcttccaataaggatacagtcctattggattggagccatatgagcttgtttcaccttggttacctctttaaaggccctgtctccaaatacagtcacattctgaggtggtaggggttgagtttgaaacatacgaattttgggggagatacagttccgcccataacaggtcatcaaaggttggacagacttcttgttctgtttgttcactcctcactcctcaaccctcctacttgctgtagtatgggagaggcgtatgcctggaggaatggcaaggaggcagcgtaaggaagctagggtgcaggaaacaaatgtatcccgagcagaggttttgtatctttctcccatgggtatatgatgtctctataacccattctcttaatttaggttttctttctctgtagtggcagtctacaccctggagattttttttccatgacctccttgtatgttctccagaaactcttctttcactttgatcagtccaagggttaatggactgactgcaccatgcccacttgaggtacacaggcctggcacccactacccctcaggagggcagacagctgtgaccactttctgctgagcttggaactcacgatactcttgacatataatcactatccctcatgcttcctttgtggaaatgctgttgggccttcaactggtttccagtgctggctcatgtcatttgcctaccatagcataacccactctccaaatatcaaggtttgtgtgcatttttcagagaccaggagcaaaggtgggaaaaccctcctccgagagagaggacgaaagacattgtgtccaggaaaggggctcgtggggacaatttttgctgcaagaagggtgtgtgtgtagttgcacagaggatgcagaggaggtccctggggggaatgcctggaaggaacttttctataaacattgacgccttctgaacattgacaccttctggatctcttctgtcctaatcagaggtattaagcttcttggcacgaggcctggtggtcactgagaacaaatgatcctttatttttattattattgttattattattttgagacggactctcgctctgttgcccaggctggagtgcaatggcacgatctcggctcaccgcaacctctgcctcccaggctcaagcgattctcctgcctcagcctcctgagtagctgggattacaggtgctcaccaccatgcccggctaatttttgtattttttagtagagactggtttttcccatgttggccaggctggtcttgacctcctgacctcaggtgatccaactgccttgacctcccaaagtgctgggattacaggcatgagccactgcacctggccgatcctttatttttatagtaaaacactttctatacccttaagaagctaacagtctatgtggataaacaaattctatttatatgcatatcaacagaagcagcaaatgatgatctccccaaatgtactaatattgggaaatgtttattatctctattctttctcctttacctcaaaactcattttccataaatataacagattcctaaaaccctggttttctcatatcaattctttctatttccattaatggtcttctttctttcttctgtttctccagttgaattcaccattttttagaagtatatctacattgatgtttatcattttcacttctttgctgagctttagggcacattcaaattaagagatataattcacaatatgaaactatgaatatagtaagtagcaaacggaggctatttggtagaaaggcatatggaccaggctaattggaaaatgggggtggggagagaaaaactctgagaaaaagaaaataagcttcaactcagcccaaatattagtttcaagccaaataagttggcctagccccaattctatccttggttggacacaacataggattggtgcattttcagaaaaaaaaaaaaaaaattcacagggtgagaatctaagcatccattttccatcccagtgacaatcagaaatcattctttgcatttattcttcaactttgtatttgcctgtgaacaaaactgaagctggcaaaagatgcttcacgtgaattacttgaacaacaatttctcattgtgttgaattacactgaggctgcttgctgggaaatctttcacagtccagtaacagaggaagatattgtcgttttttcccacgaccatatagttaacccacttctctcctaccaaaatgaatagacagtcctctctaaaatgagggaggaaagctcttcaaatcctgatcactaagcatttacctatagcttatcaatatcttacgaaccaaaagccagtttatcttctcatgtcaccccactttcttttttgcttccccacatcagattttaagattacttggcttctcaatgtttagaatacctctagtagccaacaaagtaaggaatcacggaaccacagccttagctagcaatattttcatcttgaaaagtcatctagtccagaaagtagttgagaggctaaaataatcataaaggttctagagtcattcataataccaacctcttcctaaattcaccatccaccactagagggagagatgaatgaaaaaggccctagcatggaagtggaggttacagcatttctccaaggcaacatttaaggaagcccagttgaggcctttaatggggtttaagttgtcggctttcctgctcacatgagtgttaaccgtctatttcagaggcttgttggagggggcactgcagttcatggaagggttaaaccccctctacctccctttctttctcctccctgctcccgtgtcaggagttggttccttcctgtgggttcgtggtctcgctgacttcaagaatgaagctgcggacctttgcggtgagtgttacagctcttaaaggtggcacggacccaaagagtgagtagcagcaagatttattgtgaagagcgaaagaacaaagcttccacagcgtgggggggggggggggggggcagcttttgttcccttatttgtccccactcatgtcctgctgattggtccatttttcagagtgctgattggtccattttacaaacctctagctagctacagagcaccgattggtgcgtttttacagagcactgattggtgcattttacaaacctctagctagctacagagtgctgattggtgcattttacaatgctcttgtgagacagaaaagttctccaagtccccatccgacccaggaagtccagctggcttcacctctcactcccaccaatttggggtggcaaatgtagactcaattcctgccacttgctggcggtgagctcccaaaatccacctactgttgtttcttttgagaaaaaaaaggggctaataagaccagctctccctgttgtaagcttcagctgagatacaggacatagaagtacttcataagcattaacgtgctgtacagatacaaggatgtttactatttttctgctgcttcctctatctgcatacggggctaggggaatgccaagcagaagcacttggtgctcataaacccaccttatcatccctggagccctgatctacaagtaaataaaggatgagcaaagaaggaagggagttgaacttgttaaattccttctttctgactgttgtgaggccgcagcctgatttccctgaggctgactttgatgattctttaggcttcaggcaccaggattactttcatggctgcttaccattaattataggaagaatccacaaccctaatccgaaatcctttatctgacagcaaaagtgtgtgatttctctaaagacagctaattttttaatctaaaataaatggttaagctgaaagaaggctgtgcccttctcagtctgtacatgaggcattgtggcatagaacaaaaagggctggccgggcgtggtggctcatgcctgtaatcccagcactttgggaggctgaggcaggtggatcacctgagatcagagttcgagaccagcctgaccaacattaagaaaccccgtctctattaaaaatacaaaattagccgggtgtggtggcacgtctgtaattccagctactccagaggctgaggcaggagaatcactgaaacccgggaggtggaggttgccatgggccgagatcgcaccattgcactccagcctgggcaacaagagcgaaactccatctcaaacaaacaaacaaacaaaaaagaacaaaaagggctggacatggatgcaagttttgttccctttccagctttataaaagaggaacaacataagtcccagcctccccatcagatgaaccacactgcgtgataaacgagataatatgtatgtagttataaagaacctgggctatgatggcagacaacctggttttcaaagacttgccctgccacttactagacaagtgacactggtcaggttaacctttctaggcctcagttgtctcatctgtaaaacaaggctaataatagtatctggtttagaggattgctgtgaggattacgttgtaaatgcgggtgaagcactgagaatggtgtctggccataataagcacacagtaaacattagctcttgttattacaaagaatgtaaataagagttgaagactataaagcactccgcacatttcattagcaatggggtcaccattcgtagacaagtctcagctcagctttgcagcttaccgtcacagaggcagggaacagagctagcttgtcaagggtcttctcaggaggaagtggggaggtagcccatgaagcaaagtgatggggagggaaagagggggacataaagatcctgcagagaagttggctccgagtgataggagggtgtggggaagaaagaagggggcagtaaggattctcattataggactggccgggaatggtgtgaccactgattcaggaagtggggaagacgggaagagacttcaagtgtggggggagccaattcagataggaggtggcctagacaaggtgagggcatctcaaagcgacaccaagcctgggtgagatcacgtctggagccacagaaggatgaagcagtttatatttaaatgccatggcaaaacaacatccccaccattacaccctccattctcattcaagttcttcgggagaaaggaaaaatatggtcgggttcattgctattcagttttgaagttgagcctgcatttggacacaggcgcttgggagagtgggtcattttctttgacacaattattaaggaaaccgttttaaatgattccttgagtcccccaatggcccaggtggaaggtgctgtttcctggtacctgtccagccctctgagcttttctctcagcttccaaacgctgcagttgagaactagcagatcctattggtagtgccctgtggcccacactccttggtaacggtgagagtggggagtaattaggagcggctgccatgggccaggcattcaggtcaaggccgaggatggtggccagggccacagagccaggggacgggtggggacccagcaggcctgcggctggccgcttgctgagcgctccagcagcggggccctgggcggatgaagggccggagaaggccctctgctggggccgcggcgatcttgcagcgcctggacaccgaggctggggcactaacggtccgtggggctcccgacgtattcctctaacttcccctttctgtcctttcggtctggggccttttcaacaccccctgtggccggggacagctggggcagaaaccggcaggcggcagaagcctcaagcagnnnnnnnnnnnnnnnnnnnnnnnnnnnnnnnnnnnnnnnnnnnnnnnnnnnnnnnnnnnnnnnnnnnnnnnnnnnnnnnnnnnnnnnnnnnnnnnnnnnnnnnnnnnnnnnnnnnnnnnnnnnnnnnnnnnnnnnnnnnnnnnnnnnnnnnnnnnnnnnnnnnnnnnnnnnnnnnnnnnnnnnnnnnnnnnnnnnnnnnnnnnnnnnnnnnnnnnnnnnnnnnnnnnnnnnnnnnnnnnnnnnnnnnnnnnnnnnnnnnnnnnnnnnnnnnnnnnnnnnnnnnnnnnnnnnnnnnnnnnnnnnnnnnnnnnnnnnnnnnnnnnnnnnnnnnnnnnnnnnnnnnnnnnnnnnnnnnnnnnnnnnnnnnnnnnnnnnnnnnnnnnnnnnnnnnnnnnnnnnnnnnnnnnnnnnnnnnnnnnnnnnnnnnnnnnnnnnnnnnnnnnnnnnnnnnnnnnnnnnnnnnnnnnnnnnnnnnnnnnnnnnnnnnnnnnnnnnnnnnnnnnnnnnnnnnnnnnnnnnnnnnnnnnnnnnnnnnnnnnnnnnnnnnnnnnnnnnnnnnnnnnnnnnnnnnnnnnnnnnnnnnnnnnnnnnnnnnnnnnnnnnnnnnnnnnnnnnnnnnnnnnnnnnnnnnnnnnnnnnnnnnnnnnnnnnnnnnnnnnnnnnnnnnnnnnnnnnnnnnnnnnnnnnnnnnnnnnnnnnnnnnnnnnnnnnnnnnnnnnnnnnnnnnnnnnnnnnnnnnnnnnnnnnnnnnnnnnnnnnnnnnnnnnnnnnnnnnnnnnnnnnnnnnnnnnnnnnnnnnnnnnnnnnnnnnnnnnnnnnnnnnnnnnnnnnnnnnnnnnnnnnnnnnnnnnnnnnnnnnnnnnnnnnnnnnnnnnnnnnnnnnnnnnnnnnnnnnnnnnnnnnnnnnnnnnnnnnnnnnnnnnnnnnnnnnnnnnnnnnnnnnnnnnnnnnnnnnnnnnnnnnnnnnnnnnnnnnnnnnnnnnnnnnnnnnnnnnnnnnnnnnnnnnnnnnnnnnnnnnnnnnnnnnnnnnnnnnnnnnnnnnnnnnnnnnnnnnnnnnnnnnnnnnnnnnnnnnnnnnnnnnnnnnnnnnnnnnnnnnnnnnnnnnnnnnnnnnnnnnnnnnnnnnnnnnnnnnnnnnnnnnnnnnnnnnnnnnnnnnnnnnnnnnnnnnnnnnnnnnnnnnnnnnnnnnnnnnnnnnnnnnnnnnnnnnnnnnnnnnnnnnnnnnnnnnnnnnnnnnnnnnnnnnnnnnnnnnnnnnnnnnnnnnnnnnnnnnnnnnnnnnnnnnnnnnnnnnnnnnnnnnnnnnnnnnnnnnnnnnnnnnnnnnnnnnnnnnnnnnnnnnnnnnnnnnnnnnnnnnnnnnnnnnnnnnnnnnnnnnnnnnnnnnnnnnnnnnnnnnnnnnnnnnnnnnnnnnnnnnnnnnnnnnnnnnnnnnnnnnnngatcttcctggtgtccgagtgcgccctgatgctggcgcagggcacggtgggcgcctacctggtgagtccccgagccaactccgccgcgggccccttccccagcccggctctcgagcggccgcctggcccgacgagggggccgcccggcgctgggggcaggcgggcatgacctcggcccggcgtggaggttggcgagtggtgcagaggcggccgccgggggagctgccggccggggctgccagcgagcgggtagcgggcgggaccgttgatgccggtagcagctcgcgcgcgtccggctggggcagggggtgccgggggaggagaggcggcgggcaggtgggcgtgaaactattcctctcccccccataagagcggagcgagacggtgagttcagggttctccttggagaggaaagaaaaagcgtcggggttttcaggtgacctgcacatgggaagaaaaaccagttagcatcctgcgtcctctactctccattgcatcctcctcgagaacaaatctattatgcatcattttctccgggcgctttctacatccgccaattacagggggatataacagcttagagtgaaatgcgccctagtgtggccctggcctgagccggggctgcagggggaatattcccacccggtatccctatagccctctttgagcgtctgggataaagttacggtacctagagagcagctgcgagtttgtgtagttcctgctatccactcttagtgctaaattccccatcgtggtctgtcgcccacagaaggttgcaccattttccacaatgaatatgtattttatttgcctccagaaaggggatgttaatgctcagagggcccatgggtgcgtaacatttcagaggaaacagcttgtaatgactcagcactgtcaggtacctactttgtcgctttcgcctcctctgctcaggtggtcgcaacttgagttccagagagcgtgcttccacacctaagtacagtcctgtctaaacgggaaattttttttgagagtttatagtgttaaatcattacttggctattgacccgcaactggaatcaaatgtcatagactttgagtattcctgagcaagtttgatggagatagaattggacaagattttggccattgaataaccacatccagagatagaaccacgcgtatcctgatgctatgattaatccctcattcctggccttggggtaaagttcatgagggccagaggctgggggctgtataccattcataaactatctcttaaggctcagggctcactgttaaagggaaatacaagcagtgcttggtctccggtgttgaggaagttaggtggttgtgagagagggggtcttcaaactcagctctgttcctggggtgacagaatttcagggcttttgaaaatcaaatacatttctgttgctcattctgagacgaaaagcgtttacatcccggtctctgtcttgtgcattcgtaacttgtagactgcaagtgaaccctgtagtcaaaagcataccttgttttctgttctataaaatacacttattgtgtctatagttataatatgcagttgcagacagtacctattagcccttggaatttgagggataggggataattgtgttttgggagtcagtttatcggcacttccttaggggaaatttaactgttaaaatatttaaataagtacatgtattacagagatgcaaattcacattaataaaatatatgtgggtctgtactgtgacatatgcaaagtacataatacctaaccgggtctatgtttagaaggaggtaattagtatatcaacagctgcctccactttaacggtttgtttgcctcaaaccaattttgctcggtagagtgcattattcatgtgtggcaaacacccgcagaacttttcaccccaggagtgataaaagcgtgggcttactatttttcggttgcagtgatctaaggatttgacaaataaatgaagctgggctgcaactagatgaatggcctagctcctttagaaagttaagaagccgagtactcctggagtggtggacttctggaggcagggctggccccaggagataggaggttgactttaatcccagaacaggggaatggcaagcagaggaggaattcggtccacctggtggcggcatcctggcacttctagccttcgctgatggaaagcctggttgggtggggtagggtaacaggagtcaacaggtgacttgcagaaagcagctggaggcccaggagaggacaggcctaggaaattgaattcattttgattactaggagtggaggcataaggctctaagggctctgctttgcccggctgccctcgtctttgccttgccatcggagcctcatgaaaataaatagttggcttgtcagggttgactgacgcagcttgctatgggctttgctcttctgggccacttcagagttttctcttcatctgttatttgggagatggggaaaaaaagtttgctccttcagccatgcgagacttctctgtggataattggagaatgaaatattgcaggctgtttgcaggaaaggcacatttcttccttttaattcatcatggctttcttaggaaacctgagaccttgtgtctgtaggggaccacagggcagggtccacgtgctaagtgtgcgttatacgtgatccttaccttggcaatcagcctgcctctctaatgaggcatttccagatacttgaggaaggacttgccttgggacagtgccagtaatgctccctttcacagagaggagggtggttacaaattctatgccaacgatgttatttcctattagattcccagagtccaccttcttatttcatctccccaggtgccttaaaatattgcagtttcatttccttatttttttctgaaaagacaaatttctcagtgtcctgaatgacactagtgtaggcttcccaactgcagaactgaagcagaaggttgcctgtgatttaagaagcaactttgagaaggaggactcgtgtgtgtgtgtgtgtgtgtgtgtgtgtgtgtgtgtgtgtgtgagagagagagagagaaaatgtgtgtgtgtgtctgtgtgtgtgtgtatgtatgcatgtgtttgttttccaccaagaacctgcccagggaggaaactcaaaggaaaactgtattgtatataaggccatcaattgttaggctaggctgggggcctgcaacttttgccttggtgtcaggcagtacagaaagacactgatcctgaaagccagactcagtgatctagataaagtaacccaggtgcaacctgggccaactgtggattctgaaatctattacggttacaaacatcttaactggaaaccatgcttcagataaaccaatagtcacagggatgttccatcatagtcacctaaacctcctgactggctatgacataatttttgcagcataagaggagaggcctgctcggtttgatagtcattttgtatggaacagagaatgcaatttaattttcttctacttgggttttggcttcgagtggctccagtcctgtttgcaaggatgtaacatgtgcttaagtcttggactggttggagaagatgcaggcatatgagaactgcatggggagaaagtcattttgtgtgtgcctattggtgttttgcagagaccccctaaaatgttttaagccactcgctgagggtagccctgcatatagaggtttctgtgtggtatcaaattactgaggactggagtagataagggtgtgtacaggaaattaaagcctctgacacttctagatgattagtttgaggcatacatacaaatacatttgaatttcctcaggttgaaaactgaaaaaaggccagtctagtttcctgggtggggcacaaagggagttcctgtgaacaaggggtaggtatttccctatttagagttatagaaaaataagtttgaggttgtggtgacaaaataatgacatagatgactgagtgtggttaatgaggctctatctcactgctttgtagtcacactttttctttcagcctgagaatagtcaagtgggcttgcaattaatgggtgaggcgaaactgctaggtttgttactccttttttttttctaaagaaacatcatttcgaagatgagtttctgcatattcaacccagaagcagacagctcaggaaactgtctgttgacattttcaacagagagagacatttttaaagtccttgtcaaattactatgatgactaaggtaaccgtattttatttaatcaaattattttatacacttatgcttactcaaagtgacaaaattccttgccatttccataattactatgtagccccaggtagtaagaaataaaattaccttgattttttttttccttannnnnnnnnnnnnnnnnnnnccttatagctagattcaaaatgttaataattattaagggaaaaaggtgtttctgaaaattcttttcagccaggtttgtgtatttatctttgtttgtgagggggtttttgttggtgtatttaacaatagaagaaactgaatgagttgtaaaatgagcgagggctctatcctgcattttgttaactcttcccctcattcaattttagacaccttatgaaaaggatcgccaagaggcctctctgcagtggcaccgccttgctaatcaattgcccagcatttgcagctcatcttgggtgctgctggaatcgtgttttctgttatgctgcatgggctgcttcttgcacgaagtcattggtgaactgctgggcaaaggcagccccaccaacagggtctctgtgaatttattttgcacacctaaaagcaaactttgaggtgctgccttgatcagggactgtattctcttagcagattggcctggatgaacaagggtagtattgcaaaaatgatgaggatacagctgcatttcatgcagaaagagtgaagaataaaactccctactagctgcatttctctggctttagttccaactcgcgcagatttcactacatgcatcatttaataagcatgtttctctaaagtggagtcaaagtacttctcttctgcatatgtactctattctgtacattgccgcatgcattgcatatttacatacgtgtttgtgtacagcgttgcatacaatgaatattgtatgccatactttttgaaggtgcgaagggacatttcaatggtaactttgactgtatggttgacacatggatttggaaccgttctcccctgaagaaaatctcggtattttcttgcctctcggaaatgcctttggtaatctgtaggccagaaagatagcatccttactctttcaattcatttttattttcggtttctatgtctgtatctggaaaacagatataaacaggaaaaacagtggaatcatggaccttggctcataggataaatgaattgatgtgattcaaagacacttgtattttatgtagcctaagtgtttatgtgttagcatgagacaaattattgcttaatggttaaaactccaagttaaatgattacagttccaaggtggagaaaggcaagtgtctgtggcagctgtcgcttattcgatgagtgttagaagactgggattcatgcctatgtcctccccttacctgctctgtgaccttgagctgtttacttaatctctgtgtacctcaatttttcattttataactggggttataatagtacctaccctctgttttgctgtgaggatgaactgagtcagtacatgtaaagcaccttgaacaatatctggcacatagtgagtgcccaggaaatattagctattactattaataataatatggttatgcatatttactgcaaacataataaccgtgtagccccaaccaatgagaaataaaattatttcaattaaactttagttttggtttagtgaattgcatattcaagtagtttcctattctacatggacatttttgtctgggaggtaaaaagtttttaagggcaagtaataagctaaatatcagttgctaattctgtttattcccttataaatatagcaatccatttcatcttaaagatgctataaaaattagtcacatgggagaggagcccactgcaggaatggtgattcatgttgatcatttacagtccatgggtacttgaaggaggttaaagcagggcaggcaggactggctgggcggggcaggtaccctgatgcttcactttgggaggtcctcagtatctcttgctgtggtctgtggccactgggtgctgaaggctgagggtaggtggaaagaatgttggacttggagttggaagacctggatttgaacttagacttgctatttcccagctcctggcaacttcacttactcgagcctcaatagcctcatctgaaaaatggggataatgatcaagcttatcttacagatggttgtgaggtttaaacaaatagtcatgtgatagagtacttctcatagggtacagtattccacagttgctttaacagtaatggtataaccctgctcgttgacattagcaccaacaaaagtccctcccagggagctgaggatttggaatattgtgtgaggccaaggcttctgtttcctaaactggtgatctgggctcctgaagcttgctctgcttcactggctgaaaggctgagtgaccaattcaagggagcccgaggtgtcaggagggcgaggacaaagggacatatgttgtggacatatgctgccctccaggcagccttgtttaaaacgtgccttcgcagagctcagccttggttgcccagaggggctcaggtctcacgtcttgtctgctgccttcacctcgtgttctcttgcagtattaagtggactctggcaagcaggtctgtgggcatttccccacgcttggtctttttttttggtttctcataagcagaacaatggacctgttcctgcaacctggtttcccatcccatggattcatccatctcggcttacggacataccttctgcacaacaccactcccgttccatctgtagtcttagaagcagccttcccgcccccagtctggtcacacctgtccttgcgaaggatagagaaggaattgggcctttctcagtgaatcaggtggcagtgtatgttttaggtgagtttttagattcaccttcaaatgccacaggcttcaggagagagtctgtgctcagaagacctcagagccccaaagccgggtcactctgatgactttgccgagggaggaattgtgtgtaaagcactgaatcttgtgcagccacaggtgtggagtgagcaagccaggggagccttcatccatgagttccagtgacaacacagagactggaaacattcccttggatgtacacagaacctcagcagttggtgactcccaacttctttatttcggttcttctttgtggttttgagtcgagtgcctctgaaaagggaagcccttactgaggacttagcagctcgattgtttagtagaaacggtgttaacagcctcgttatttcccatatgactgggcattcctctttaaacacggaatagttggtcattagtactttcctgaacttagacaatagttgcacttattcctcctaatcaacacacattgaaaatatttaaaagcaaaaagtaacataggctgccataagccccacttttgttgttgttgttattttgagacagggtcttgctctatcatccaggttggagtgcagtggcaggatcacagcttgacgtcccaggctgaaatgatcctcccacctcaacctcccaagtagctgggactaccggcacataccaccaagcctggctagttttcttatttttttttttggtagagatggggtgtggggtggtttcatcatgttgtccaggctggtcttgaactcctggactcaagtgatccacctgccttggcctcccagagtgctgggattacaggtgtgagccacggtgccttgccaagccctacttttttcagtggggtggggcgggtggggcaggaagaagtgtgaactcatctttcccttttgccctcatgatttcctttataaatacccctgccatgacttttcagtactctccttttcatggacgtaatagtccaagtggcattttaagttatctggtaatggactcagagagcccactgactgtaatgatgaagtcttatttttttattttttattttttttttgagacagtctcacactgttgcccagcctggagtgcagtggcatgacctcagctcactgcaacctctgcctcccgggttcaagcaattctcctgcctcagcctccccagtagctgggactacaggcgcgtaccaccactcggctaattttttgtattttttttagtggagacggggtttcaccatgttggccagggtggtctcgaactcctgacctcaagtgatccactcacctcagccttagcattggttttggttaaaatctttgccctctgaaaattctgggaacaggctgtgcccataaacccatcccataggcagtgatgggactaccacatttgttctgccaggttgtcctttgggacaacttttgggtgtctggataatgaacctgttcagataggccttgagactttcttggtagctctaaagtctcttctggctctccgtccattgatacctaaatttctagttgtgcagagcgtgaagaaatgagcaggggctgatgaggcttttaacaaatagttccggagaaaataatagaaggcaaactaaatccctgctcacaaaactacaggaatttgagggagttagaagtgattatttttaccgccatttctgcacttgcaaggttgatgtagggagaagtgtcacaatgatgtttttcatttaaagactactgtaaaatattaatgggaatggctattgtctttcaccccctttgcaagaggcttatgtaaaataggcaggctgtttctaattgttgaatttgtctcccaacttcagctgattagaaggagaaattaccaccttgaatataagcaggttgaaattgggagagctgccctcagctgattatataagctataaaatacagcacctaaagtcttatgtttactctgctaagaattcccttaatgaagatgaaaatttctaagcagcatggacccatatgtgtttattatgtaagattcaattatggtgatccaacctgtaaaataaacagtggggctgattaatctctttgttggcttttgggtcagagaattgtttaaagtagatccacagagccacctagagctgtccccctggaactcagctggctgtggtgtcagcaccagctccccttctctccaggggtacaggaggcttgtcctgggtctgtggtcactgtagctttcagggtggtggagggcagggcccccttaaggttggctttcgaggttgctcgtgcagtgtagtgggatggccgtgagtacaaccactgccggttgtgacagacaccatcctttggccgtttcatttctcagagtgctgctgtgatagcacttggaatttactgtgtcttgtgggatgctttgcataagcagcatgtattccagtgtggcacatcacaccatcctcttcttgaagctatacatgcgtggggtgcacagcacaccacacggtcaagttcagctttccaacctcctcctgaaatgtaggaaaggagcatatttttttggccggagtgatgattgaggagaagaaacttaaagggagccaggcccatgaaatagatgtagaagagcttcagagaagcctctcctgtccttatgcaaaaaactgagggcaagactcctgacttattgtgtggcatgtcgtgtcgcctccccagtgctggtacatactttgtaggttgggaggcttaacatgccagtgacagtttctcagccagccaaagagaggatatcttttggaaacaaaaaccataaattagcaccattcctttacctttgccaagctgtatacatgcatcaaggagatgcatataaatagatcaaaaagccagtgagcagttttgcagctttgcagcttgcacttgatggaagcagatggggaggttctccttgctgcactaggctcagagtggcacgtggagccagcagtgcttgggctaaatccaaatacaaccttgttcgatttctagagatggacatgtgcaatcgactgtccaacaggcatattgtttctgtggcccagggtgggcctgtttttaggtcttcttaagtataacatcgtagaatctctgcattcattgctttcatgttaggcaaaatcagggcacagaattgaggcatttacccaaatgtgcagccccaccctccggagccagctcacattcgctggcaggtataagcaggtgagcagccaggaaggaaagacaactgatagttttaattttgggaatagcaattataaacaagtataaataaaaatattgttttggtgaatactggggaaaaatcacttctcttattctcttttaaaatgttcctcttttttttttttttttttgtctaaataggcttaatgnnnnnnnnnnnnnnnnnnnnatgtcacagtcacatgggtagggactctgggagtcaagacctaggccactcctgagtgggactgtcacggcaggcatttgcccatgggcagtgtcctttctgccccctccgtggttggccacccgctgtccctatccagtggataatggagctgagcgtggtctcttacaagcctttcagatccaattccacctttcaccacagactgtatgtgattcctgccttcctggactaattctgagctcttttgtactttatttgggaacaggaataagtggggacttgacattttatttaaacttttccttttgtagagttcgtaggacagtaggattattccctaacattttcaatatctcagatgctagaccaaaattgggtcatattataagtgagaaagtgactttcacagtttatctgttggtgaggtggacatgggcttggaggggagagggtggatgagatggtaggcatttcagaaggaaaaaaccaggtctattcattaactagggctgctgtaacaaattaccacaaactgggtggcttgaaacaaattttttgtctgacagtcctgcaggccagaagtctgaaatcagggcatcagcagggccgtgctccctcctagaccctgcgtagaacccttccttgcctcttcatggcatgtgggggtggccaagggtccttggattccttggctcgcagctgcatcactcccatctctgcctttgctgtcacatggtgtttcccccgcgtctctctctcttcttcttctaaggacaccggtcacattggattagggctcaccctaatgacctcatgtgactagcttacatctgctaagtcctcgtttccaaattaggtcacattcacaggcactaagagttaggacttcagtttatctttttggggaaaacaaatcaattcataacaccagagaagaaaagagcaaaggatcctaaaacagtctgtgtgtacaaagaaaacaaaggcaaactctgtcttcttaagtgtttgggtgaggtaggaggattgttggatattcgtaagagagtcgttcatacccaaagatatcatttcaatcttcacagaaatgcggacagtccctgtttcctttctgtaagaaggtaaccatgttactctctggggtggtggtgattagacttgcaggaatgaacctagttggatgattcgttagcttcaaacacatcattttctcttcctgggcctagccgaatgctgggattggactgatagtcatgtcatttgattaaggagaatgcatgtaaaaaaaaatcctagacagatatgtgggtgaggaatatgtgtttgtgtatttactgtgtgtatgtacataggtactcatccatgttcccatccctcacacccaggattccttagcaggaatcagggctggtaaaatctgcagctggctctgtctccttcctgaagccctatccgattcagtgagaccaaaagagactttatcactgtgcgctgtgccagccagtctcagatttggccaggtatgtattaagttagcaccagacatctgcattctaatctcatccatctctgtggtttttttggtgggggtaggagtgatatggttcccagaatttctctgcacaggctccttttttaaaaaaaaaaaaaaaaagaaaaaaaaaatgtcagcttgatctctgccaaactaattaacttcgacaacttccttaagtgctgcgagcaatatagagttgagtaaggcatgttcttggccctcatggagttgatttatcgtggggggggagatgacatgtttataattttttcattaatgactcattcattaggacgtttcaggtcctgggccaggtggcagccaagccctctggaagcctcatgtctggtctagttgtattacaatagaccagactaaaaatagaagcaaagcattgggccagggtgggagatgggcctgggtagactggtcggagatataaaataattttctcaaccttggttggggatagatccgagggtagcaagatgtcaagtggaaccgttggtgagaggctggctgcggagagtcattggaggcagcatgtgattggaaacctgggatggagaaggggagggctggaaacccagggccacagccgggctggggcatgtcagggctggcactgtggagtgccactccagttagcagcgcggaggctgtcggcatctctctcggccaagcttggatccctctgcccctgctcccctgctttgaagtggtgtggtgaaatgtggctggaagtcagtctgctagcctgtggagggaccttcatccagggcatgctcagactcagctagaagcaagcacagcttcctcgcatgctgaggccaaggggctgaaggatgcagaatgcttcttgtactggaatgctgtgctcaccagtatgggtgccacatgggaggggggcaaatatagggtcctgggcctgaggacaaaatgacacctctgtattaaacctctcttttgcatatgtacaaattagattcttgcaagatgagctaacattaggaaaggtcctattatatttgactttttttttttttttaaataaaaccacttttgcttggcctcggatgtatcagttctggataactttaaagctggtaacagaacaaactgtgttcacacacaggaaatgtctccaaacaaaaagtgggtgtgcagtttacagtttaaaaattggatgaaggcccttcaaacttcccctcctgttctccttgggaagagcttggcaggctgctgagagaggccactcctccctggaataggtagtcaccggggcctgggaaggaaggtagcctgtgagtggagctgcctggtgactgggcggaggccccgggtgttctgggggctgggaggcctgtggaggtttcctttcagcttcaaggactgtgtgaaaggttgtgtgagtcaggtcaggaagcatttctgcgctgttgctccaagcctgtggccggccgatccaagcgctggctgagctagctggaaagctctgtgagcatcctatgtctgtgtctttatctattcatcgcctggctctagtgctagcttcaacttcaagttcgtgctttttttttaaatttttttttgaggggatggagtctcgctctgtcgcccaggctggagtgcattggtgggatctcggctcgctgcaacctctgcctcctgggttcaagtagttctcccgcctcagcctctctagtagctgggattacaggagtgcactaccacgcccagcagatttttgtatttttagtagagttggggtttcgccatgttggccaggctagtctcgaactcctgacctgaggtgatccacctggctcggcctcacaaagtgctgggattacaggcatgaaccaccacacccagccggcttttttttttttttttttttaatataaagactttactgttttacttattacacaaggaatatatgtggtgttgacaatttggaaaatacaaataaacatagataacataaaaaaaaatccataattcagagaacctggagataaactgtaaacattttggcgtgagtcctttaagtctctctccgtctacctgcattgatgcgtgacttccaggcccacacggtggtaaaggatgtgggctttggggtctttgaagtccatgtctggggctggttagtcttgtgtggctttgggcatttagctttccctctctaattctcaatttcctcatctctaagattgggatgatatttatactttcaatgatcttgtgaataccaaatgagagaatccatccaaagtactcagcccgtgcctctctgcagtatgtgctactgtcgtgatttttaaaaagtaataaaattggatctcactataaattctgtttaggaacctactctttcctctaaatcattctcatggcttttctgtaacatcagatgttcttctctgctgtcatagtttcaaatgaaaaatgaccttattgtttttataaaacaatacatattcatcatgaagaaaagtttatataaaaatgtttttaaaaattcaaaatcccccattcagaaataatcatgactggtggtggggtttgagaagtgaccgttaaccgcaccttcctctctgccctcactctagccccttctaattaagaatccactgggagccgggcatggtagctcgtgcctgtaatcccagtactttggaaggctgaagtgggaggatcacttgagctcaggagtttgagaccagcctgggcaacatagggagaccctgtctctacaaaaaatttaaaaattagctgagcatggtggcttatgtctgtaatcccagcactttgggaggccgaggtgggtggatcagttgatgtcaggagtttgagaacagcctggccaacatggtgaaaccctgtctgtactaaaaataaaaaaattagccaggcatggtggcacatgcctgtaatcccagctactcaggaggctgaggcaggaaaattgcttgaacccaggaggcagaggttgcaatgagccaagatggcgccactgcactccagtctctgtctcaaaggaaaaaaaaaaaaaattaaaaaattagctgggtgtggtgctgcatgccaccacccagtctcccagatatttgggagactgaggtgggaggatcacttgagaccaggagattgaggctgcagtgagccgtaatagtgccactgcactccagcctgagtgacagagtgagacactatttcaacaacaacaacaaagaaaggatcatttgggaagtagacaccccagccagccacaggggtttaaaacatcatcttgggggttgtgtggaaaaaactgcagtttggattggaaaactctgtttgtgtccagattcaggcttcttttcactactttgttctcagaataaaactcttccaaggcagaactgcaggctttgtccctgcagatgctcacctgctcaggtaagcttacctcctggaggagcagagaatatgtgcatcctgagggctgttcacagaattgggggagaagggggtcagggcaagcttgccagcttcctgcttgcaattctgtgaatcgagtaagttgccaatccttccctttggggaggattgagtgaggaagttagaagagcagatgctttttctctgttaatttccagaaggtggacgttcgtctagtctatatcaaggtatgaattctggggaaagggaagaagaatttcttgttattattaggaatatatcattttagagttctttctattcttatacatggaaaaatgactggctgagtagatatacttataaaatgtatgttctaaaaatagcagtaagtttaatttcactgaaacttaacagaagacttcagtaaaactggaaagaagtaactatcttttgctactaaatgttgctgtagaagtgtccaaggccagccttatttttcctcccttagagataatttattattgcctataggttagatatatgaggaatcttttcttaatatttgacagataatttaattctgatgtatattactgctgtgtgatgtgtgtcatagtttttggaactggatgtgtattttcaatcaacagatgcaattctttattagttttgggagaatttctttgtattatctcttcaaacactgggttctatgcagtgaattctctgctgtaaggcaccaattgtctgtatgttacattgtctttgaactccatagttgtctgttttgcttcgattacttgaatccctttttttatctgcattcaccatgtttatttttagctttcctctagtcagaaaattgattttaaaccatctttctttagtcctgtgtagattctgtttcatatctttattttctagggttggctttagttttcaacgtatttctttagatctacaatcttttttttttcccttttttagatgttgtctttgggttcttgatgtattgaactcatattcttattaagttctatggctcaaagatcttttggggggtatctttctctggctgagttacgttttcttttattttgagttctttgtctttgacacctactgttgctttcttgcctttccaggagtctgtgtttaaagataaccatgccttgtggtttttcattttattcttgctgaagtaaatcaggctatatctttctttgatttatttatttgaaggctatcttttttcttcttgctaccaagctgaagtttgaaggctggttttttgtttctgttcatgctttctgtagcctgaagacttatgaaatgtcttgggccagttgagctgtagcaggtcgtatgctgggtgctgagtaggcttggctagatgtggtcttggcagctttcacttgtgggatcttttgaaggcccttttaagtgggttcggtcttcctgtgtggggggcacacactgcacaccctctggcagtattctgtggcctcgggtcagccttgggtttcacgttggactcccagagtcttcattccttgcagcagagatgatcaacaccacggtttatgcatcatctcatccttttctccccagcagatgttttctctcttccctagtcagaagaagagaatatagggataactactcaggtgtttttttctagatgtggtgatattgatgaaaactctcagaatgtttatttattcactgttttgtcttcctgagggtgtttgactcagggctctgagccttgccacactggattctttttcctttattttatttcccaggcaccttttgactttatgacactggggtgtgctcattttgttttttttggttttttttttttttttttttttggctgataagtgttttatttcaggtttaatttttttttaattcaaatttaggaagagtgagattttatacagaggtttaattctaccattttaactgggaaatgtctagcaacatttgaaaagattgtgtaatattccattgtattccatttccctatttctgtatggtaggttgcttatggttttgttttgctgatacaaattctggttgctcatttcttttcattgttttgcttttcagaattacaaaatgggatgatgagttcaagggattggtcacaaaagatgtggggagtcaaatcctctgtggaaaggggaattgccttcgtcgaggatgtgatgtgtgcccgggaggacacaagcagtctgatcgaactctcacacaaatcccatgcagtagatgtcattatttctcttttccgtataaggaaatagggctcacttctagaagttaaagaatgtgctggatgggcacggtggctcacgcctgtaatcccagcactttgggaagccagtgcgggcagatcacgaggtcaggagttcgagaccagcctggccaacgtggtgaaaccccttctctactaaaaatacaaaaaaatagccgggcatggtggcagttgcctgtaatcccagctactcggcgggctgaggtaggagaatcacttgaacccgggaggcggataggttgcagtgagccgagaccatgccaccgcactccagccagggcaacaaaatgagactccgtctcaaaaaaaaaaagaaaagaaaaaagaagaaagaaagaacgtgcccaagnnnnnnnnnnnnnnnnnnnnnnnnnnnnnnnnnnnnnnnnnnnnnnnnnnnnnnnnnnnnnnnnnnnnnnnnnnnnnnnnnnnnnnnnnnnnnnnnnnnnnnnnnnnnnnnnnnnnnnnnnnnnnnnnnnnnnnnnnnnnnnnnnnnnnnnnnnnnnnnnnnnnnnnnnnnnnnnnnnnnnnnnnnnnnnnnnnnnnnnnnnnnnnnnnnnnnnnnnnnnnnnnnnnnnnnnnnnnnnnnnnnnnnnnnnnnnnnnnnnnnnnnnnnnnnnnnnnnnnnnnnnnnnnnnnnnnnnnnnnnnnnnnnnnnnnnnnnnnnnnnnnnnnnnnnnnnnnnnnnnnnnnnnnnnnnnnnnnnnnnnnnnnnnnnnnnnnnnnnnnnnnnnnnnnnnnnnnnnnnnnnnnnnnnnnnnnnnnnnnnnnnnnnnncagcaaccctggggacatctgtggggcaattttgccccacttttgtttttaattctattatgacgaaacaaaaaagtagaaattatagtacagtggacacccatgtactcaccacctaggactgactagttgttaagatttgacacatttgcttcatatatacagctacattcatacacacacacacacacacacacacacacacacacatacatacatacataatttcaggaccattttaaagtaaattatagaaatgatgacacttcacacctaaatacttcagtatacctcttcataaactatggtcatttccctataaaactgcaaccctactatcactcctaacaaaattaagtagtccctaatttcaattaatacttcctacatatcagatttctccaaaatgttcccaaaatatctctatcgcaattgccatttctagctctatacctagctttctctggaactatttatttgtttataaacagccacaaaccaattcaagatcatacatttcatttgttctatgattttgtgtcatttcctttgttttttttctttattgtggaaaattacacataaaatttaccatcttaatcattttgaagtgtacagtgaactcagtggtgtagtagtcccccttgctcttgggggatatgttccaagacccctgatatggatgcctggaaccttggatagtactaaatgctatatatgatatggtttttcctatatgtatatacctatgataaagtttaatttataaattaggcacagtaagattaacaacaataataattcaacataattataacaatatgctgtaataaaagttatgtgaatgtggtctctctcaatacatcttactgttgctcactattttctgactgtagttgacctcaggtaactgaaaacttggaagtgaaactctggataagcggggactcctacattaagtatattcacaacgttgtgcaactatcaccaccatctacctctggaactcttcttcccagagggaaactccatacccattaaagatcactgcccactccccttcccccagccctggccaccactgttcacttcctatctctatgattctgactaccctagggcctcatatacagtgtttgtccttttgcaacgggcttgtttcagtcagcataatgtcctcacaggtcatccaagttgggggctgggtcagaatttccttcctttttaggctgaattttccatagtatgtatagaccacgttttgcttatccagtcgtctgtcgatggacacttccgttgcttccacatgttggctattgtgaataatgccgctccgatcatcgctgtagagctttcatctggaataatttccccactttttccccactaggttaactttttgaaggggttgggtcagttgtcattccacagaacatcttctgtaatgtttcgtattctgaatgtatctgattatttcctcgtggtttcatttaacttgtctcttttctctgtatttcctgtgcaatggaagttagcttttgcttgactagatttaagttttgcttgattagaggagataattggtgaggaattctttcaagtacattgtattaaaacacctggttgacccctgctcatggtgctaaggctgaccatgaggttgagatgggtggttacatccacaccactccacatgaaacagacatttgccgccttgaagttggcagacagtctgtgttggtgcccttttaatagatgagtcagttgctgaaattctgagtaggctctgacttggttaccagtgatctctaccatttactgagcatccgctgtgtgtacctgacacatgtcatctcatttagtcctttaggggcggcagtgttgtcccacattgtagctcattgtaggagatcctagttgcacttctgttatgaagccactcctgcctccctttcctctgaccctcccctcccactgtggatcatggtctcctcccccagctccatggcatgatgttggcactgcctttccagtttactctctccacagggtaaaaactggactctggagcaagagactgcctggattccaatcccagctctgcccgtcacatgtgacgtaaacctaggttggttcctcccccgtcagttggagatgattaaagtacctgccacagagggctctcctgagcgtgaaaggagttactgcctgggaagcacttgtgtgtgataagtcttagcctcattctctgtcattccttccatcggtccctggagacagttgctcagtccgtgttttgctttgaaggttttgccgtaactcacaatagagaaacacaggatgactgaaaatcaggtaataaacatgaagcagtgacagtgattctagagcaggggttggcaaactatagcccatgggccaaacctggcctgctctctacttttgtaagtcaacttttattggaacacagccatgctgatttatgtatatattatcatcatcatgtgacagaaaccatattgcctgcaagtaatatggcctgcaaagcctaaaatagctgctatctggcctttacagaaaaggtttgctacccctgctctagaatcttaaagaattcttagagttgtggtctcagatctctagatcccagagatgccacctcagctgagcgtggtggctcacacctgtaatcccagaaccttgggaggacaaggtggacagatagtttgaacccaggacttctagactagcctgggcaacatggtgaaaccccttctctatttctataaattaatttttaaaagccacctcctgctaaattcttgtcttcagctttcactcccaggagtggcattgcccaaccttcccagttgggaaagttcatttagtctgcctctaaaggaccaaatgagataaagtgtgtcaggtacacatagcggatgctcaataaacgctagtgactgtgatcactggtaaccaagttacagcctagtcaggattttggcaagtgcctcatctgttaaaagggcaccaacgcagactgccaacttcaagggagcaaatgtctgtttcacatggagcggtctggatgttaccacccatctcaatcccgtggtcagccttagcaccatgagcaggggtcaagcaggtgttttaatataaagtacttgaaagaattccttacaggtatctcctataattaagcacaaattaaatctagtcaagctacctagagctggaggctgacttctttatctgagcaggcccctcctgcagatctgaggctggcaagcatgggctctggataagtggtaggttccggaggcctctcaactggaactgttctctttactgtgagtcttttctcccagccagtccactgagtaggcctgcttttgttttgcacagcacctcacaggtgacccagcagggagccctggtgcgctcttctctgctgtccagcatggatgtggcctatggtagagggactgccctgtgggatcacaggccttttctgtattcacattgcctgcccacacacactaaccatcacagctcattacagatatttgacttttgccgatatgtttggggttctgctgtttgacccaaatggatctgattcaaatccattgaatgagaaacctcaataccataagtttcttctgcattttcacagaaacagaacactttcctgaagtcattctctattatgtgcaacttatgtgacttgatttatttcttgatctttaagatagtttttattgatctgaggcattaaattgaattctgatgtgaaagaatcttttcccttatattttatgttgtctcctaaccacttaagtagctgtttaatcttttaattaagttggtgtgaaccttcttcaaacgatgatggctgttctccttgtatatattttaaaattttgatatcagacctccctctctaatctctcttaaccttaaaaattttaagatgttcgtgttctttgaagctactttattaattcaagacctatttattgagcttctgtgacttgtcaggcactcttctagatactggggacccagcatatcaaaacacaagaaatcgctataaagacgcttacgttgtggtacttttgctcatgacatcactgcaaggtttgatattcttcagagagtggtatggtggccgaatgtagaagtccattcaagtcacagaggagaaaattgaagtggatctgcagaaacagaggctccacagcagtgaagaggaagggaggaaattttagggaaggcctttgggaaggggaaggaggtaactaactcccttggctggaaggtccagtcaggtaagggaaggttttgaaggctaggctcaatctagtgggcataaaggagttacaggtttttgcaaaaaggggtgtggtctatagaaggaggcgttttaggaagctagtagctcaatgaacctacaaaaaaatctgagacctgtagtctgatctaagcctgcagccaaaagttagggagtcaggtgtttggatggagccacccttccagctctccatttaccaggtgatggggccacacagggagcatccctgtggaaggactagaatctcagggctttccttaggtgaggctgcaccggaacagagagaactgtnnnnnnnnnnnnnnnnnnnnnnnnnnnnnnnnnnnnnnnnnnnnnnnnnnnnnnnnnnnnnnnnnnnnnnnnnnnnnnnnnnnnnnnnnnnnnnnnnnnnnnnnnnnnnnnnnnnnnnnnnnnnnnnnnnnnnnnnnnnnnnnnnnnnnnnnnnnnnnnnnnnnnnnnnnnnnnnnnnnnnnnnnnnnnnnnnnnnnnnnnnnnnnnnnnnnnnnnnnnnnnnnnnnnnnnnnnnnnnnnnnnnnnnnnnnnnnnnnnnnnnnnnnnnnnnnnnnnnnnnnnnnnnnnnnnnnnnnnnnnnnnnnnnnnnnnnnnnnnnnnnnnnnnnnnnnnnnnnnnnnnnnnnnnnnnnnnnnnnnnnnnnnnnnnnnnnnnnnnnnnnnnnnnnnnnnnnnnnnnnnnnnnnnnnnnnnnnnnaaaccatcatcatgtggcatctgaagtagggatttaggcctttttttttttttttttttttgagacggagttttgctcttgtctcctagcctggagtgcagtggtgctcaactcactgcaacctctgcctcccgggttcaggtgcttctcctgcctcagcctcccggatagctgggattacaggcacgtgccaccacacctggataatttttgtattttagtagggacgaagttcaccctgttggccaggctggtctcaggtgacctcaggtgacccgcccacctcggcttcccaaagtgctgggattacaggcgtgagccactgcgccagggcgatttaggccttttcagtgggctccaggattgcagatgtgttcactgtccttggtagtagccaaatgccatcagaagaaattagctcatggactgtttgcagggcatggtgtcatctcatggtcttctaaatattggcccctacagctcagagactagatgatgggacacttgaagcttccgctcggtatgcagacagtgttaagaatggcatcgtgacagggacagatcagcattcctaccacactctgttatgttttaaaatcagattctcgttttatgtcaaaccatccagaactgtcatctcttagccgtctttctcacaactcaaagcgtagattttcatgcccagaaaaattttcattcacagacatctaaacaatgaaatacttatagtaactgaaaaagtacccatgcttcatcaaaaggaccttatgcttaaagagagaaatgttgcatatcttggagattttataatttttttcttacacttaggaaataagaatttgggctttttttcctccttaccagttttatccatttctctcttgtgaatagttgcagtcattcttcctggcattgaagtatttctgaaatagctcttcttatctaggcataattacaacatatctatgaagtacgtgactctattttgaaaatcagcctgtgatctgcacacttgcttctgaacacacacttctacccacatgcaaattctgaagggtaagcacgctgaattcggcagccacttttccaaaggcaatagagtaatcggataggccatggttatatagaatatctgttggcataagggttctactaaaatatttattgcttgaccctgagtgggtgcctataaagcaggtacgttttgcacaccacttacactgtgatatgcttggtatctgtcacttattttttctgcctttttttttttttaaagccaccatctgcattttctactttgaagtacattagttactatggaaacagtgatgtcattggtgggggtgagggttagtaacatctacaaggacagtataaaatcattttatttaatgggttgaaatttatatgacacttgggagaaatgatgagtatgcttaagagaatggtgtgggtatacaaccgtagctactatgatgcctatacatgtaacaaatcagcatttgtatggtttttaggttgcaacaaaaatatggctgaaaactaagaaaaatacgaagaagagaaaatggaaggtcagggcattcttataattgttctagccgctcagaacatcattttctgaaggtggccttctggttaatacaaatatatagatgtccctatatagatgtaatttatatcagctaatggtccagttttcttctatagagatactgtcatgggacaggtttttggctttctgaatgaaatttgtgttccaggcagtagtggttcaattctgacatgcaaccaagctcttaacgagattcctgaagaggatcccatggtctccgaagctccagacagagattttatgtaaggacagttgtgtgtcgcagcagagatggcacagtgagtcccaggaagggcccttggatctctttaataagatattcagggctctgtgcagaatgtctgaatgaagctggctgtgttcctctttcatttagtctccttggaaagaaaaagtgctccagatagatagatatgctcctcaacctgcttgtatgtgtatccgtccgtccgtccatccatccatccatccatccatccatccatccatccatccatctatctatctatctatctatctatctatctatctatctatcatcctgagatgatggtagattcacatgcaattgtaagaaataatccagagtgatcctgtacacactctacccagtctcccccaatagtaacatattgcaaaactgtagtataacaccacaattaggaaattgacagtgatagggtccaccaacagatttcctcagttttaccagcactcgtgcttctctctctctctctgtgtgtgtgtgtgtgtgtgtgtgtgtgtgtgtgtgtgtagttctctgcagtttcatcacttgtgtggattaatgtgaccaccaccacaatcaggatatagaatctgctgtacatttattgccacagtctctcctgctccctaaccccagggcagcactattctgttctccatctctctaatgttgtcattttacgaatgttacttaaatggcatcatacagcatgcaaccttttgagattgtttttttttttccactaagcacaaatcccttgagatccatccaagttgttgcatatatcaataattcatttctttttattgcagagtgatattgcctagtgtggaggtactcctgttagttaaccgttcacctcttgatggcatttgggttgtgcttatctatttaaacagaagtatctgggagagggcttttggggtcctaaaagcacagaatcaggaagcagtgtaaagtgccccagtctctgtctatggttctcttcttggttttcagcagggatccttccagaagcagtaaggcccaaattatttagagtgatggaatttggtggagagagcagaatgagcccagagagctggctagccaggcgatatgtctcctttcaaaatggggctcaggatggggcttgggtggaggctgtgtgtgccctgagacctgcattcatgtatctgcatttctcttacaagaattgatgggagaaggtaccttttctgcagagcctgtgatcaaaggagatgtaatacaagcagcttggccagcttggtccctccaacccttttggggaagatcaaaacctgaacccttattctaggacaggaagcagagggaattttttccttggtcttactgattgattttcatttcgaaaagtgttcccccaccttttttttttttaaatgctccgggattttctaactggtcatgtgacagaatttaaacaccaaaactgttctctgaataccagccacaggtctgtattcctggtttgaggttgatcaggaagtggcctgagctgaaagacccagtgatttgacattgctctttccttgcataaaatgcacgataaagaaaaatgtttttttctttatcgtgcagtttatggaaccagcagactaacccgcccccttcccttgtcttctgctatttaatatttaagctgttgacctaaagaaagaaagaaagggtttttagccttgagatgaagttaaaagccactcagagaaaccgttggatcagaagcttttaataccaacagctgtcagtcagcgagccagtcagcacatggtctttctgtcggagctcagtggagaatgcaagtcccctgtggtaaataagcaacatgccgagtctaccaggaagggaaacacgaacacatactcccctggcccagactttaggagatggttttcttagcgcaagcagcatgacttctttgcctggcaaactcctggtcatcttttaccactggaatgtcatgcttgagtgaggtaaccctgctccatccctggccaggtctgggtcccctctcttcgggtctcttttacaattgaccctattatcatgcaaaacccttaagatcagtgccttcaagtacaaatgcttttcattggagagtttggttctaaagcagccactgagaccaatgttatatggaggtggaatattactcaaggacatccccttagttgcctagaagggaagcagtgcattccaggatcaggcagtataaacagtgcttacctctgaacactaggatcacgcttagcatggtaatagtgagatctatgcacaggagggggcatgtgaggactgaaactcagtgtgaggatgggaagtttatgtctcccttctcaagcacgcagtcaggatgtgcatttgctgagtggaattgtggacaaaccattcacactccttaaatggtatatattgaacccatgcatttgcttctctttgtgttcatagctcccagtttaaggttggacacttggtagcctttggtaaatatttactaaatgaatcaatgaatgatcaaacagagggacatgaaatttgctaatacggtatagatttgggggcctccacccccaccccacccccactatgtatgacttcttttttttccttgagatggagtttcactctgtcgcccaggcccgagtgcagtggcatgatctcagctcactgcaacctccgcctcccgggttcaagcgattctcttgcttcagcctcccgagtagctgggaccacaggcgtatgcaccaccaccacgtccagctaacttttttgtatttttagtagagacagggtttcaccatgttggccaggctggtctcgaactcctgacctcaggtcatctgcccatctcggccttccaaagtgctgagattacaggtgtgagctaccgcgcccagccatgacttcttaatcccactcggatttcactgaatatgtgcgataagtataacctcatcaagttttccttgcaattaggtatcacctggtgtcccaaagagatgtaatatcaccttgttctttaagaagttggttgggctgctctattaatgcccagtgagtaagggaatgacagatgggacagcagccaccatgcaagccaggcaggcgccatccactgtaaacagagaggagaatggtgaggacttgggaaggagccatgtgctccagccattcagattccagtcctctctgtcagctcctcttaatctccatgttactcagatgctttgaggctggtggataacaaagtatccctccttccccttttttaacagcgggcagtaagtggtctgggtttcacttacatcaggtgcccaggagtcttcctgtgtgaagtcagcttgtttggagagtgaagagagaaacttggcaccgggaccctagaatcccctctttctggtttgctttttcactccatcagctgaggtaccacaggggatgccagagacctgaggcttcttggtagaagcagtgccagtttgggatcagaacgtccaatcgctgactggttctcttgctctgaggctggggctccccggagggatgtacctcgcactgactggctggggcccttcatcctttgcattttcttgcatgcagtagtcttccatagggagttctacctctcaggtatttgtaattattttatgccattatataccctgaaagtggctgtgggttataaattccaagttgtgatttataagccttaatagttactaaggcaatgcattgatacattgttcatacgctcataattagttcatgtgttttgctgggttgtgcatagaaatttcggttccaagtattttttgaagtagaagtgtgtttgtaatatcctacttaccgatagtagtgtagcatcctgatagtacatcacagttgctacactcacttctgtgggtccacaccccgtgccaggcaccgtgttacatgcatttcttctgctgtccttttcatcctcacactgagatgcttgcagaaacatctcacaaagcaggcaactgaagggatccagtttcagaccaaggtctggcctgactggaaagctttatcaccatagcatcatacatacagtcacattaatgatcaaaataatgataataagaatcgtgatcgtatctaacactgttataaggttttcctatggattaaccttttggatctttgcaaaaccttgtgagataggtacacgtattatcttcattttgtaatgaggattccgaggtcctgagagttagagaaattttctccctgtcacatagcttgaaagtggcaacactggacatcaaaaatgggcattctgctgggtgcaatggcttacgcctgtaatccagcattttgggaggctgaggtgggtggatcacctgagattgggagttcaagaccagactggccaacatggggaaacaccgtctctacttaaaaaaatacaaaaattagccagatgtggtgggcaggcctgtgttcccagctacttgggaggctgaagcaggagaatcgcttgaacctgggaggtggaaggttgcagtgagccgagatcgcgtcactgcgctccaccctgggcaacagagtgagattctgtctcaaaaaaaaaaaaaaaaaaaggtggaggggagcattctgacttcagagcctttttctaatattaaattgttttaaaataaaacttattgatttattcagcacagattatgtgaatcactacaatcaaattattatgaaatgtctattttctagtattaaatgaggcttaagtgatttttcacaatctgcattttctggaaagctttgataattatatttcagttctaatggtgacatttctttttttttacatcattggaattatttgtttggattacgcatttttttgtatgcttactctatgccaggccccatgctgcatattttcatatattatctcatttcatctttttttttaagctgattcttttagacctgaggcagctgagcatcacggaaactagtcagtgtctatcctaaaaacagctggacccctgctggcgagctcacctgtattctaggagcatggggtctgattcccttcctcagtgaatcaggaaagctttctggggaaaggagttgtgtgggttctccaattcttgttcctttagaagtaaaaagcctttccgtcccatatagggacacagaaaggaggtgatgggggtggtgctgagcctgcccgcctgctctgcgtcacctggaaggagggtgcagaaggagcagggggcttgtctccctctttgctccctttggcgtcactctccacgcccagtaacgaagccccacccctggctgggccttttctcaccatcttccttctccagggctacctcctgagggctcactccttaaaggcaggatgcagtggcttctccttgagtgagctcagaggtcaggagcttcctaagctcctgtatcaagagacagaggacatctgaagccagaatgcccttcccaaagctgccctagctcctgtgtttcaggaagaagccgggcagatgcctctttgttccagcagccaaactccagcatgtcacaaatcatacattacaggaaaagggagccctttgctgctgggcagcggggcccaagatcctcacagtcttttagggatgcttagaattggcccttggttggtttgtagcatttatacaatatcaacccttaaactgatggcccttgaacaagtgcatcattctctgtccttgatttcattcacagtagacagttttaggtagatccctgctgtgagcagacacatacatgcggtctgacaattcagatcccttcgccttcccctcccctatttttatggctgctaacaaatcggctggacctttctctaaaggcctctctgggcgggtgatatttgagtagatttgaaagaagtgtgagatcaaattatataactatttggagcaagaatgtttcaggcagagggactaggaagtgcaaaggccctggggttgaaatatgcttgatgtggtcggggagtggaaagaccagtgtgtctctagcagagagggtgagagggaggcaggggaagatgaaagcagagaggtgggtggaagaccagacccggcaggcccctgtgagccacagggaggcagagttggtcccttttaaatattggggctggcaaatctgactagtccatttccctagtactcctgcttacctctgcatttttgcctttgattgttccctttcttgagtgtgtcctgcgcttccccttggtctcccttagttgtgcaatggaaagtagtagcagagcacaaaaatccacattggaagcttagaggattgtatctttttctcaccagctaactcttactaattagaaattgacaacagcgcttgtctctcatgcttctcttttaattgagatttccttcaagtcctccttttaggcaagagctgcctcctatgagcccctggcccgctgcacctaccttgggtctgggtggctcctgtttgtgtccacatcagcgtgagttgtgtgaagtcctcagcagtgctccatgcctagaaggccccagtgagcattgacttggacctggtgattttcctctttacgctttgcccttccaaagagagatggaagattcagcctcagcgtcagtgttgtttctacggtgtgaccatatttgatgtgcttactgattcctaagtcacctactggcacacagcacagatgcatccaatgtccttatctctcaggctttgctttcaagacttcacactgactacatcaatctgaataatcgagctcaactccagacaataattcaggggtacgatgtgatggccctctgttgattctctttaaaagttgtgaatgtgagtaatcatgggtatttaatgagctctgcaagatggcaggtgctgacaagtgccttatatattctgtttctagtcttgcaatttgtatattatcattcagaaccccaggctcaggaggttaaaaattctgcttacagctgaagttgcagttgcgtgggagagggagcaggagtttattctcccctctttgtttctgcctgtgtctgtatattggccaagcccatttccagtgggaaatccttagtggcttttatggtgttttgtgggagggcacaggggactgacgtgtgaatgccaggtgtcattatcactgtcaagtgtctaattcagtgctgggtcatagacaggtttagaagtgccttagaattcagagttaatccagagtgggccacaggttgatggcattttgctttattcttcaatgctttccttttctctttagaatattgtcatcccttttaccccttcccccttcctcggccattttccccagagggcagaatggcttgagctatttcctgcctgagttttgatgtcgagacccctgcctgcccaattcctgcaacaatgaccctaaagcactaatttcaggcccctctttgcttgcctgcctgcctgcatgagacattgcggccgctaaccctgcacccttgaggcaccccctccattcagtgacatggtactgcctgtgtgcacaggagccctgcagcagctgacccaaacaatgctcattttcattgtggcatcttggcatggcctggcagctttggccttttagaacccagctggtgccagggttgctggcctgccccgcagaggtgattggccacttcgtagtaataaacagatttcaatcctgggaacttctgaggcctgctgttctctccctgtcttttatgtgtctttttgatgaaagatattcgaggtagccacatggtttaataaaaccaggctggatgcaactacctaggtttaaaatatcattctgctaggctagctgtgtgcccttggacaaattacttaacctctctgaacctctccttctgtttctccaaattgaacttagtaatacctacactacagtttgtgccaggatttaataagatagtgtttgtgaaaagcaccttgttcaggtcttacacactgtatgtgctgagtacataattagttttctcaggcagagtcccaaacagaaggagaagccaaataaaccccatgatgtgctgctttgttctgtgtagtcatctgtgtttggcagatttgagattattttaaaccaaagtaaaagagctttaattatgctcttgtttgtggtttggttggttgcattattaaccgattttggaatactccccgccctctcactgttgcaaagtgaagggctggctgggagtcaggagctggaagtcaatactttctttgcagaacttccaactccctctgtctcagagatggggttggcagtgtcatctgaatggggtgtgggttcagagactggcccgtcgaatcagtatgggctgccggctctcttattacatcctgagcatgtgtgtcttgggcccttacagatatacttgctgttgccctttgctcttcattcacttaatttcagtcatgcaatccagttatacaaatgacatatgcataactatttgattttaacaagcagttagctaaagtgtttagtgtgactctagaattaaactccttggattccagtcccttataccaggttcagaatagtcctaggcatatgaaatctcaattttttttcctacaaagtggcttagtgatagcacttatcttgtaggagattagcaggattaacctgtaaaagtgcttaacatactacctgctatgtaataaatgtttaattaaaattacttgtattaatgttagcagtagctggctgggtacagtggctcatacctgtaatcttagtgctttggaagacagagatggaaagatcatttgaggccagtagttagataccagcttgggcaacatagtgagaccccatctctacaaaaaaacaaaacaaaacaaaacaaaaaaaacaacaccaattagctgggcaatgtggcacacacctgtagctctagctgctcaggaggctggggtgggcggatcgcttgagcccaggagcataaggtttcggggagctgtgatcatgctattgcagtccagcctgggtaacaagagtgagactgtctctaaaaaaaaaaaagaaaagaaaaaccaaaaaaaaaaaacctacaattattactagctaacatatagctaacatttgtgtacttgttattacagaataaatatattccagctaagtggacgtggatggttttctgcataaactcttattgttccttgactgatgtcataacactggagatgcatgctccttagatgaatgtaagttctaaaattgttgccaggaaaggactgtgggtggtcctgctggacctggagtgcatttgcaacactttatgggcttcatagcacctgtaggcctctgctatctcccctaaggctgttactcatcactcagcacttatcctagcccttcaatttccctgggtctctggtccagagctcacactgcctcttcttacatcccaggggtatcttgacctttggtagtgggcagtaagatgtgtacattagtctgaggctctgtgccttataaaacactgtgcttgcttgttctatgaattgactgatctggaagctctgtaaggtaggctcattgcaaatgcaattgctgttcgcttagtgtcatatatagcataattattgcacctagaatatgcttgtattgtctgcataactgtagggtggatctggtcttgctctcttataagaaaagagacaggccttgttctctacatgttcctttaggcagtttgcccaggcaaatcaaccaggccattaaggtgaaagtatgatagctgaattttgctctttttccataggttgtttgaatgatttcattttgcatcattcataactgttgtcattctgtgatgtctagttcataaataccattcgccctgagcgattttctgttacatttaagactaacctactttaagggaaagatagtctttcctagtctagtccgcgtatcctagactgagttatgcagtctgggaagcttgcagcattaatttcttgctagaaacaaaatttgtttacatgtccaatattctgcatatagttgtgtattttactcatttatgactataaatatagaggcatatcagcatgtatattgtgtaaatatgtacacatttaacatgtggaatatagtaggactgagtttgtgttttgccttgtgggcactctcagtagttatttcccctcaatattttattattgaaaaaattaagcataaaacttgaattatatagttaatacacgtatacccactgtcatgattctgcaattaacattttgctatatttgctgtataattgttcatctctccatcaccatactcatccattttcatcttcttgctgtggtggtggttgtatttttaagtaagttgcctggtccctaatcatgactatgtgctcagcttgcaggaaacatatattatatcctgggtcttcctgagcctttcctgaacctctctcttacagagaccttgatacctactcatgactgccagagccctcccagtggcctcacccagagctctatcccctatgcctggcattgacaattctgattcttactgtgcatttcaaagcaaggatgttcgagatgttgtatctatcattttacttcctcccatgaagagacttaactggaattctgagaaaatgctttctgatccccatcccttagcacaagccaaataaaggctctttgtcttttaaggctctgataaataccaactcttaaaggcaggttgatttagcctctggttattttccccagagttttctggtctgggcagcctccctcaccttccagccagccaatccaggttgaccctggaggagaaggagctctctgctggtgtgactcactgatgcctcactactgccctggccagactgcgaggctcagaagaaaggtagacattgctgggtggggactgcccattcatttttaagtaaaggctttctcccttatgataatatcacaataattgccacgtaatgtgtgcattctgtcagaaaataatggtgagaaagttaaaacttggcccttcatgcaattacagagagaaaccgagtcaaatactattttatttaactcattaatgagggaaccagtgagttggtaaagccagctcaaagaagcttttgaggaacttggtatttattggcattttggaaaaaaaaaaaaaaagagtgatagaacagaaccatttttaggtaagtgtgggggaaattgtgatggaccattcaaatcagccacaggtaccgtagcttcaggaatattgccagcagaaagagcccagctgtcagctccatttaggactaccttggctgaagacagccaccttgtctgaagtcaggctttcttccagggcagcctgcacccaatgtctgatccatgagcagataaaaagaccaattctcttaccactgcttgaatctcttgaaggtcacttatcctgtattcagaacctcccatagggtcagctaagccttctgttgcaactgcatcccatccccaattctcactctacccagacctgcttcttttcctccctcttacgtaggggttctaggttagcccctagagtacccttgcataaacttgaggctcactagtgttaattccagggtcagcttcatgggaaattcaatctctacatatacaaaattagtgaatgtcttacagggtaatgtttctttgactttggggtttatcttttctactgtacagcaatctgtaagttaacacgcagcttcacagtgttcgtgcccttaatatatagtaaataggaaaatcaaacccaggtatattcctctgcatcagggtttgggaaacttaccacgtaaagagctgtatagtaaatatttcaggctttgcaggccatactgtctctgttgctctctcacaactcaactctgctatagccgtgatggctacacaaatgggcatggctgtgttccagagacactctacttaacacagacaggtggtgaatgggatttggccttgggccatagtatgtggacccctgtcctagataaataagtaatcctgggttggtctgttaaacaatgttccagtatgacattgaaaggacaggctgccccctccccccagctttgcccttttgacacttgtagaatatgatgtgtaatctccccaacagcctacaaagtgctgatattaccactttgcaaatgaggaaacaggctcaggaaaggtctgtctttactacttaagaagatgatggttcttgaattgaacctggtagatctaaccctgaggcccactctgtccccactcgtatcgtcctaccttcctcattcatgggatgcattggagcagtgtttttcattactatttggagaaaagcgctaacaaacagagctggctgcagattcatagaagaaagaggtacgtgaagagtccctgcccaggccatgtaccctggaattttcccagaatgggcagatttacctgtgaacaaggtaactggaatggaggtaggacttatcctctggctccagaggaatttcccagcctggatagtattttcctgacctgcatttgtgacatgagtaggaggtaagaacagcttattgtccataaaggcatcctggcatggagtggagctcttatctcagctgtgccacacactgactgtgccaagcaagctccttggtcagcctgagactcggttatcacagctaagaaatgtggaggatcttccgtcttactcagctctctttataaatgtcctttaacacggggcctagattccagttctgattccatatctcaccagctgcgtgactactccccagtaagtttctgaaatctctctgtgctgaaatttccttgtacgtaaaatggggataataatagtattcctttaacatagctaatgtcacaataaaatgaattaatatctgttaagctgttagaacaataatctggtgcatagcaggtgctatgacaatgttttgttactgttatttttagcacttagtatgatacttggctagtaataggtgctgaataaggattcttcaatgcataaatgagccacataacaaataagccttagaataatttctagaactcaaatagagctttctgcattatgggaagatgccttatctctgctcttctgcaaggtaggcactaactagccacatgtagctgatgaatacttgacatgtgggtagtatgattaaagagctgcattttacattttatttcattttaattaatttaaacttagccacatgtggccagtggctgtcctgttggacagccctgttccagtgggctcagaggttgagattcacttggtctgtgtcatagttggtttggactgctataacacgataccataaactgggtggcttagaaacaacaaacatttatttctcatagttatgaaggctggaaagtccaagatcaaagtactggctgatctggtatctggtaagggcctgctttctggttgatagatggcaccttctcattgtgtcctcaccaggccaaagggtgtggcaactctttggggcctctgttataagggcactaatcccattcatgagggcctcaccctcatgacttaatcacctcccaaaggcttcacctcctaatactatcacattggtggttaggtttcaatatatgaacatttttaaaaggacacaaacattcagaccgtacagtcttttatcagcatttctcaaacatccgtgggtggttaacatgcagccagaattgagaacagagttagaacttttaggccggtactttttcttctatttatccatctatccatctattcgacaaatgtttgttaagttcctgttatacatcagttactcttctaggaactagcaatcagcaaagataaagtcttggctttcaaagaacttgtacgcaggtagggaacagatgattgaaaagcacacagtgaacaggacacttctggacaaggtacttgaatgccaggaggaccaaaagtgtgttgccatagcgactggattggaagcgaaggtggtgctgatcaaaggaagcctttctcaggaggggacgtttgagctaagacctgcctggggagaaatcagccttgtcatgatctgggataagagtgttccaggcagatgcagtagcacattgtctcaagttgaggatgggtttgatctgtttgcagaacagcaaggcaactggtgtggtttgaatggtaaacatatgggatggtggtaggaaatgaggttggagaggagggcaggggtggggggttttatagcatcttgcaggccaggagggtccggagttaggattttattccaggcccatggggagccattggaaaatactgagtaacttgccatgatgtgactttggtactcaaaatatctaattgccatgtagtgtgcatggacaatggggagaggcatggcaggtgtggtggtatctcaggtgaggggttgatggtcgccaggtcataggtggtagcagtggagacagaggagtggacagattggaatctgccaaggtagggccaagtgatgggtggattagatgtctgaaggcagcagaggcaatggaggagggtccccagcactgtgttgccatggagtggacagtggggctgaagacccgtgtagcccgaggcagcatttttgacttgaatgttcatatgtaccactggggatcttggtaaaatgtagaatttgactctgtgggtctggggcagggtctgagatttttgaatttctaaaaggctctctggtgatgtcagctactcctgctggagccccacttgactgagcaagggcttactcaccctcaccctgcacatgcttctgccacacagaggcacagaacagtgaaacccccggagggacagggagtgcgtagaagcaggttgtagctcgcctgcaagaactctcaagaatcaaggttgagtctgttgttcctaatccatacctgcatcctggacttgtggctgtgagtctccagagactcaaggcatttgctttgtgaggacacagaagtccctgcttttttgtttgtcctttaggaacagagttcctgggcaattatttcacagcctgtagcagtgtaggtacatctcttcaagtccaatctttagaactgctttgaggggatgtattttacatgaaaaagaagcctttaaagcaaaatgagctgtgggcgtgaaggcagtgtgactccctgtgtgtaagaaccctgtgctagtaacacagtgcactttcttggtgtctgggagaaatgagactttatcactagagatattaataatatgatgatcagtttcagcagaaaggaagtttaactccaaagtggttcctctagctgtgggttcatttcttcatgaaacaatgaaccaggaaaggaagtgtcaagtagtttaatgtgatgcatatttgttgctataccaggccataggatttagggctgttttaaaatgagtgtatttcttgtatacaaggggctagctcaaccatagtggtcatccagggcttgcatacaatgttttattgacgcaggacttcatatggaagctttttgtaaatgaaactaacatttgattactgggagaaaattactgtgactagccatctggtttcccagccaatactgttgattcatagtgcttctagtagttcttaataatctgtctcatttcatatgatatgagatattgaagctattttcttgacttcctccagcctaaacacttagggttattgcaccaagcgtgcactctagctttcttctatctaatcttttgagttgccaagtgccatggcatttatcgttacaggttattaaattatgtggtgttttccatttttattatgttcttcacttctaataaatgcaaatcttctcttcagagcccacacagatttttcaaaactaggcagtgtcaaggacaatgaactgtgtagacccagccttactcaaaactaccagtgtcctttcttgttttccagtaggaagctattcagttaaaagcactcaacctgtttgtcattttgctcctctaaagaagcctaaatccttcagttctcaatgtttgtgtctcctatttgtttctcttccattttcgcaattacagctaactccagagataaaacaggcatggtttaagagtccttaatgaaatatctgcagttcataatatggttgtagaattaaagcagggccttttcctgtgttggaagaaatgctcccggcataagcatatgcacctctctatcctctaactctggaaaccagcatgttacatcctggatgaggactcagagtgatggccccatcacaaagctgaaaaaacttttctttatctgccaaaaaaataaaagtcagatccatggtgcagtcacgattgcttctctgaggtaggactccaggtagaaatgacacttggaggttgataggtttggttgtgtccccatccaaatctcatcttgaattgtagctccataatccccagatgttgtgggagggacccagtgggaggtaattgactcatgggggtgggttttcccgtgctgttctcgtgatagtgaataagtctcatgagatctgatggttttataaagggcaaatcttctgtgcacactgtcttgcctgctgccatgtaagacatgcctttgcttctctgccaccttccaccatgattgtgaggcctccccagccatgtggaactgtgagtccattaaacctctttttctttacgaattacccagtctcaggtatgtctttattagcagtgtgagaacagactaatacagaggtgctttttctggagggacactctgattagtgtgaataaaggtgagtcttatgtaagatgtttatcatcaggacatgctgtatcttgtaagaaaataatccaaatggtacttagaatatgtctcattgataccagccttgatgctgaggagaggtattgtgggcttttaggagccagacagtcctgggtgaaacctgtctctgccccttgtagctctgtgattttaggaacgatatgtcacttttgtgatctttagttgcctctagaaaatggagatgataatgccattttagcagctggaaagttgtgagaaatcaaagtaaccgtaagataagttcctaccacactatttgccattgtctatacaattgttgcttttaaaataaagacaggctggatgcggtggtgcacgcctgtaatcccagtactttgagaggctgaggtgggcagatcaggagttcaagaccagcctggccaacatggtggccagtttagtagagatggggatctctactaaaaattagctgggcatggtggcgggcacctataatcccagctactcaggaggctgaggcacgagaattgcttgaacccaggaggcagaggttgcagtgagccaagattgtgccactgcactccagcctgggcaatggagcgagactctgtctaaaaacaaacaaacaaacaaacccccaaaacttataaagctggatgttccaactaatgtcctatcctggtttttaaatttctttggatcaaaataaaaaactcaacaggcttcttctgatttctgacagtttcttttgtgctggtgcctttgactatctcaaaacgtggctgcaggtgttttccctagctgatgaaatgctgggactgtcctcttgataaagttagtctccctggacagtggcggcagagtggattggtgtgctcccatgtgctaggctgagtctaccctgcagcgtgggctccagcagcagtgtgttaagggcagtgttggaacagactgttctctctattttctgacctgctcaggcatcctgcaatggatgacatgtgagcatgaggatgggtgcgggaggcgaaaggcagctgaaactgcagggcagagccaggcgaagttgagaacaagaaggaatcgctgctctacacacacggggtttttaaattagaaagatatcatgagatgcagaaagcaggtgctcatggtttgtttctgttgttcttggcttgcgttaaggtgcctctctcgacacggttttctaagtgtgaagttggagctagtgtgacccagttaacattatagggctctgtcatttctggggatgcatctggtgaccatccatcatgtaccaaacacctgcctaagaacagagccgtgtgcctgtgtcactggtgcacacagcaacatgctctaagcttgtcgatccccagttaggcaataaccactttctcactgaggtaaagaaggccttgtcctgtaactggagagacaatgcctctattctagacgcttgagatcacagtctttccagagagtgcatttccttttacatttgctaatatttctaatactgtattagacttgcttgtctatgcaatttccccaaacaatgtgtctctcttggctttcagcttttattagacacaaacatctcatttctgtaattgttctcctgtcaggcctggctccattattatctggcctccagagcaatttgagtctcttctggagggctgagaaggctgcactcccttcctcatttccagtggatctgggaaaactcagctaaaggaatttaacatttcgatccgcaagatactaacatcatcctcagtgggttgacatcttcttcttcccttaactgtgagactccagagcatgcattttcgatggagttgatatcacttctagtggagggaaaattacttctgggtgggggagggaggcaaaaacttactctttttatgtataaagcaaaatatacatattatgaatatatagagagatttacattttattggtagtattaaaatttcatggggggacaattaggaagaaatgtctaaaaaggttcttggaggtgataatgaagagaggttaaaaaactgctgcgaattttattcttcgtggctcctatcacccagtcacaacaaataatgcgtaaaatgaaactctttagttctgtctttgggatgaagagtggccaagtgccatatgggaaggagggaagggctggtgtgttcccaagtgaagagcaattcaaaactccttggagagagtcatcaatgaggtttaaacagcattggaatctcccagagggtttcaacataccaactcctgggttctgcaaatgtaccccagaaacattctggaactctggacagcacttgagtgattcctaaatatccaggccaacacaatgtctgtaacctctgatgtagaacagggagagagagtgacttagaagggaagctagttcagtgtgggggggatggggctattttgcaggcgtttccctaactagctcccttcacctctgtgctttggtaaactagacagtacctggttagttcaccaactgtccccctgccttttccactttgatgcatttgcttattgagtggtctctacttggagttccctttcttttatcataacctaacaacattctatttactctataagatgtatgtagttccaacgtgactcctcttgcaggaagctttttgtgaacctctcccagttctgccctattttttcattgcatttaccacattccaccttacattttgatcatttctgtgcattgtcttttttccattttattggggtataatttatataccataaaatccgtccatgctaagtatacaagtcaatgatttttaacaaattcataaagttatgcagtcatcaccacactcagttttaaaacattccatccttccagaaagttgctgatgcccagttgtggtaagttcctgccccatctccatcttccagacaacctactttctttctccatagctttccattttctggacatttcatacaaacagaatcatgcaatatatatagtgtttcacatttggcttctttcaattagcatatctttttgaggttaatctacatcatagcatgtattaataatagtttgttccatttcattgccactactattcattggtattggaatttagtagatactgtatttatcagattgtgttggtgttatatttttggttatatcacattttgtttctctgttaaccattcatggatgtttgagttgttcccaatgtgatgttattatgaataattctatttgctgtcaatataaatgtgtgtttttaattctcttaggtagatacctgggagtagaattactgggtcatgtggtaaatttatgcttaactttttaagaagctgttcaactgcttttcaaagtggctataaccattttatcttttatgttcccactagcagtatctgagtgttccagtttcctcagatggacgtgaatactttgtattgtctgttcgtttgtttgtttttgttttttgagatggagtcttgctctgtcacacaggctggagtgcagtggtgtgatctcagctcactgcaacctccacttcctgggttcaagcgattctcctgcctcagcctccccagtagctgggattacaggtgcatgccactgtgcccggctaatttttgtattttcagtagagacgggtttcaccatgttggccaggcttgtctcaaactgctgacctcaggtgatccgcccgccttggcctcccaaagtgctgggattacaggtgtgagccaccgtgcctggcctgtttgtatttttcattatacacattctactgggtgggtagtggtatctcattgtgacattttatttgcatttccctaaagactaataatgctaagcatcttttcaaatgcttattagacatttgtatatcttccttggtgaaatatctcctcaaattacttgcctattttaaattgagttgtttgtcattttactgttgatttgtaaggttggtaggtagttttgttcaaatcatctttatccttactgattttctgtctcattgttttatcaattattgagagggatattaacttctccaaatattattgttgtattgtttatttcgcctttcattttgtcgatttttacttcatgtattatggggctctattcttaggttgatgtagttgcatttacacctgccattttgtgatttgttttatgtctcatcttttttttgttcctttgtttcttctttattgtactcttttgtgttaatattttctcatgtttcatttcaattccttttcctcatgttttgaattattttcttagtgattgcatgtatgatatatgtcttaagttatcacagtgtacttcagatcagtactaaaattctctagaacatggaaactttcctccagtatagctccatttcatccccctcctttgtagttttgttgtcaaacgtattacatctatatcttataaatgaagtgttatggttctatgcaatctaatgccttttaaagaagttaagagaagaagaaaaatacatttatatagctttttgtatttacttacatatttaacttttctgatgttctttattaatgtatatcttagtgtatatttgagttactatatggtatcgtttcctttccatctgaaggaattcctttattatttttgcaaggaagatttgctagcagtgaatcccccaagtctctgtttatctaggaatacctttattttgccttcattttcaaatgaaagctttgccggatgtagaattcttggttgacggtttgttttctttcagaactttaaatacattgtttctaatgaaaagtcagctcttaatcttattgaggaccctgggtatgtgatgagttgccatcttttcttgctgctttcacaattttctgtgggtctttgccttttaacaaactacaatgtgtctaggcggggatctttttgtgtttgttcttctttggggttctttgagcttgttggacctgtagattcttgtatttcactacattttggatgtttgggccattatttcttcaatttttttttctgcctctttctcttttttctttatgggactctattgcatgtatattggtatgctcggtggtgtcctaaaggtctctgaggctctgttcatttttcttctctgtggttcagattgcataattcttagtgattattttccaagtttactgatttactgattctttcttctgacatctcatatctgatatcaagctccttttgtgaattttttgtttcatttattatacttttcaactctagaatttccatttggttcctttttttaagaaaaatattttctgtatctctttttttaagagacaagagtctcactcactgtgtcacccaggctgtagtgcagtgacatgatcatagttcactgaaacctcaaactcctaggctcaagtgattctcccaccccagcctcctgagcagctagggctctctccagtgtgtgctcatggctttctggtcaaccagagataatggggagcgcttaaggatccctatggctgatccctgtcttccgtttaaaattctgtttagtttgccagtcttttgcttgccccaaccagcactactggttgcagcctcagggtagctgagggggatttccttgtttatttgcaatcaatattgctttccctgccactgttctgccaacctacatgggagtaggagggagggcaagaaccagattcccactgatctatccagaagttttaaatgaattagtgctcctcagtttgttgtatgttttgtccagagtcttgaaatggttgtttttgacagttttatcattgtttttgagaggatttgccaggcttctcacactgccattctagccccactgcctttttccttctagagaggaaaactcatggggcagataaagtgtggactctggcaccggattgcctgggcttgaatcctgaccctgccatttgcaagctgcaagaccttcggcaaattactagaccttggacaaatgacttaacttttgtgcttctgtatcttcatctgcaaattcgaaataataatagtacttacgtaacaaggttgttgtaagaatgaaatggattcatctacatagtgatagcagcggtgcttgttactgcaaatgcaatatgttagctcttttacttggtgcagcaagggcagggactgtatcttacttggcactttaaaccttgccccaccatccttggtctggtggctcgcacgtagtcagctcattggattctcagatcatctttcttaagtgatgcttgacatacggaggaaatgaggacagctctcagagtaactgaagatgcgaggaggagggactgcaggggacctgaggaacagatggcctggtgcctcgttgaggccaaaggttggtcagtgtgttttccctcctagctctaggaactgcccaaattgcctggtgctgctcagaagccattgaatttgagatgaggtctgtacacttgcatttccaatccaagaagttaattagcacaattgccaccatttcagaagctctcttgtttcgggcacttcaggaacggacaggacagtgtggcgaggatgctgatttttaggtatttttgcaaaagggagtggttgtgggggagctgtgggagagcagggggtcttatggtgtgtactcaccaacctcagctgtttctcacccacacagagccatcgagcaaatgagagattggtgccttttcctccagtggacacagctagggtgaacaaagtatgggaggcctttgtggagggaggcatatgtcctacgcagctgtatgcagtgatcctggcttagccaccacgtgtccagctctgtgctcaggagcagggcagcatggccataagatggtagccatagatgtgaaatctgcttacatgggtttgactgaggtgtaccgagcaaatggggactttcttatgattcttaacagaaggactgaaggaggatggcagtgacaagaaaggtgattgttgaattgaagttgttgttgtacatggatgaggattgggtgtgcttgtggagagggcaggggtggagccggtggagagggtgagagtgaagaggaggaaacaggacacagtgatggagaaaggtcttcaggagatgggaaggagtgggtcgggtagagggatctgtgttcagcgggagggagggccacgcttttcctgggtggaggtgaggtgccccacagcacatgccctcacttccccttcctctgaagagggtcccacgtttagcttcagcaggaagaggcactgctgttatatcatgcacggatgttcacctctctactcctgtggtcaattacaggtacaccttttggtatttatttgggtacttatcagtatagcatttttagcaccttgaccagatactgtgcatccaacaagtaggaaactgttttactcctgggggagcgagaccaagtagtgatatgtctactcttctcctaacgctgggggagtagaattaaactgggcgtcaggtgtgccatttgcaggtgcgtgatacattgcaaattgcttcattcctctgggcttccggttcctcctagtagactgcaaggaatggactagatcatatcaacatccaattagcagttaatatccattggtcctgtgatcagtcactctgtatctcagatgaagccagtgagggtgttttgtgcctgagatacactaaaataggagtagaaggacacacaggtcaatcagagcagcaagctggcagaggcaggtcggggaaggtgagttcttatggttcgtggttgttttcttcactgctctgaaactaaaattggactttgttattattctggaagctttttaatgctgcatataggaggatgctattttgttctgacctgtgtttattccatacctgcatgcacaagctttggtaatcatattattttattagcgtatttatggaggttcatttccaagagaggatataattaggtggaaattggttatcttgatagttacaatttaaccctacctctctgatggtttgctcttgaggaatttacatacaatgattttgtaccctgacctggtagagatgggttgtaagcagtacagtcctatggaattacaagtagaatttgaaggccaagagaaaaagaaatgagatgcttacgctcatccctaacattccacatcattgctctcacatggctgcaggcttgggtctgagattcctgggaaccaaagcaaacagggaaatacagctataatcacattatttatagactttggttgggtgtagctaaggtgagagaaacagtagaactagttcccaggagaagcagagcttttgctagaccttaattttaaaaatatctcatatctgccttaaaccaatgtttctgatagtatatatagctatcccttgggatctgtgggatatccagagccctctgcagataccaaaatctgaagaagctcaagtcagtcaaagaacatagtatagcattggactttaacttatgcaatcctctcatacactttaaatcttctctagatttcttgtgatacctaatgcagtataaatggttcttatactattggtttttaatttagttattttgattgctgtgttgttattttttttatttttttccggatattttggatccatggtcgatcgaatccctggatggacctgtggaaatggatggcagcctgtatatatgttttcaagggatgcttagttttgttttttttttttaagttacgtggtcaagggagtttcaggaaatgctacataatatatattttgatggatttttgacagtaaatgttaccatttggaaaacttataaaagtcttgtaaagaaaactatttctctttgttcaacccagagttttaaaaatttcatatgacctcagaactctttttcctccttatataacttttaacaataagtaaacttatcgttactttttagggcaagtttggtcaccaatttgcttgtggctgcccctgcttagctgataggcccattagccttcacccccaagtcgggccaccttgctgacgcaggggcacagtgcttggtcacttgggtgctatgggaccagtggggttgggcgtcaatcctggctctgcaccttagctgcgtggcatcaatgggatagttatcttctctgggctcaggttcctcatctgtagaatgggatagtaatatttctgcctcatggaatcatagtggagagtaagtgtgtcagaatacgtaaagcgctccatactggacttggcataagtaataacaaatgttcaatatgattgtatttaatgatacccccattccagagcttgctagacacttgtctcctcagttactaggggctaactaactatgtgctatttctttgggtactgattgtgtgtttttctttattccggtagagagaaactttattcatcctttatgataattccctgttttcatagttgttgtctccatgatactgtgagctggttgagggcagagaccaggtcttatcgaactttgcctatccagcccctggcatggtacagctttgcaataaaggattttcaatgcatttgacaggaagccggggccctagggcatataaagaagcccaattcagtgaaaacagttctgcatatagcagcgtgtgtgtgtgcataaatcaaatgagggccttagactaagatctctgtcttgagaatatgtctggtcctctgtacatttttgttgaatgctgaggaaatcattgaaatcattattcttaaaatttctctaataaaagagccctggcaccacagaagttggtgtgttaaaggtgtgaaacacaaactattaataatagtctgatgcaaaaatatctggaaatgaattgaaagctccgatcctgagtggtagaaaattctattagttgactgtacccaggagggatggagagtctttatttttctatgatggaccaaagagctacagagaaaaatcaatgatgagatttatgagtaggaagcaattaaattgagtgtttttttttttttaaagagacaatcatgaaatgttacataccctcagaatgaatcaatgaacataaaaattcactaaatgtaaggaataataacatttgcctcagttttactttagggccatttagaggaaagagtggaagaaaagggagatgagagaaactaagaaatggagtatagaggaaacagtagcctgaggaaggtgcaaatagtgaagtagagaaaaatgcaggcgatggcagagacggagtcttaaaggacagaccaaggaggcctttctttttctgttgttttctttgagatggagtctcactctgttgcccaggctggagtgcactggtgcgatctcagctcactgcacctctgccactggggttcaagcaattctcctgcctcagcctcccgagtagctgggattacaggcacccgccaccaagcctggctaatttttgtatttttagtagagatggggtttcaccatgttgtccaggctggtcttgaactgctgacctcaggtgattctcccaccttggcctcccaaagtgctaggattacaggcatgagccactgtgcctggcccaaggaggcctttcttttttttctatttttcttttttgagacagagtctcactctgtcacccaggctggagtgcagtggcatgatcttggctcactgcagcctttgcctcccaggcagattctcctgcctcagcctcctgagtagctgggattacaagcatgtgccaccatgcccagctaattttgttttttacacttttagtagagacggggtttcaccatattggtcaggctggtcttgaactcctgacctcaggtgatccacccgtctcggcctcccaaagtgctgggattacaggcgtgagtcaccgtgcccagctccaatgaagcctttctaaggaaagccaggccgactctcactcgcagactaggtgatcagagagaacgatagtgcccctatgaaagacccaggtgtagagagggcagtacagaggcccagagagagagagccagcagctttcatgatcctgctgcaaggacgaggaaagccaccacgcacaaccccaggcataactgtgacgtgcaggtgtgcagagcctttctctccctcatttggaccctgtgacaaaactgtaaggggggattgttatctccatgttatagaagggaaaggagagttgcaggggtgttaagtgccttgtctcatattacccagttaatatgaaactcaaaatctcacacattttccactgtaatccccacccccacaacttgccccctaaaatgatgatgcttttggtgtagactggagtttagagtctgtgtctatgagattctccatatgattcttactctgctttttaaagaaaaatggttttaaaatggcccccatttatatgtgaacatgatccaagctaaatcattccaccagaaataaaacctcattgactaaatgtctcttttccctagtcagcacatgaggtgggtgttctctttgccaccatagccatgacaagaggctgatcctgtgtcgtcttctgttacttggttctgcagatctaggatcctggaattcacaagtgaatgcattttgtgtgccatttccctagaactgtaaatgactcaccccaaggagctgctgtctagatgagaaacaaaacctcacactattgctgctgctgcttcatcatggggaaatgacttctgggcttaggtgattaagtctctttctaccactttactacaggaagacatgtccttggcacatcagacagaacactgaagttatcttgcaaattactttaatggaattaaaaaaaaaaaaaaaaaacttggccgggcacggtggctcacgcctgtaatcccagcactttgggaggccgaggtgggcggatcaccagaggttaggagttcaagaccagcctggccaacatggtgaaaccccatctctactaaaaatacaaaaattagctgggcgtggtggcgggtgcctgtaatcccagctactcaggaggctgaggcaggagaattgcttgaatctgggagacagaggttgcagtgagccgaggtcgcgccattgcactccagcctgcgcaacagagcgcgactctgtctcaaacaaaacaaaacaaaacaaacaaacaaagaaacccaaaaagcttgcattaaaattgtgcctggaatgacttttctgttacagcaacaggagtgcttcatatacttaccaatggccagtgtttgtattgccaggcacgggaatagtgtgatttcccatgctgaatttatagagatcaggggtttggcattctacatgtggcctatggaccaaatgtggcctgctgcctgtttttgtaaataaagttttattgaaacacagccatttccatttgttcatatattgtccatgcatgctgcttttgtgttatggtggtagagttgagtagctgctatgatgaccatatggcctaaatatctactgactggctttttacagagaaagtatgccagaccctgttcaggaacccctgttgggaaaaccacaggtttttgcaggaccacagcgagattgacatctcctgcactgtttttagcatctgctccctgacatgggccctgctgctgagtgtgcagtttgagggtataggttccccgaagctccccaggaagagcctgctcagttctgtcacatctgccactactcagcagaaggactttaaaatgcaggctctccacactgcactcccgggctcctcccagcctcgtagagcatcctgctctcacccttcacaagcgctccagactgagccaggtgagactctcgcagggacctttcggctccaccttgtttgttccatgcctccaatcagctgccgcctctgttgagctggatctctaaggtggctctgccacaggggcctttccttgctgttacaccagcattagcctgctgaagcctcctctctccccagcactgtggaaacagctgccccggccgtctctcctccctgatacctgcacagcagtgccaggttaatactgcagaagagcggctcctgctcaagaacctcccttcgctccccattgacctctaaatcaaagcctcagtctggccttcaaggttgtttttatctcagacgactactcacagttctctgaagccactccatattcctgcctttccccaggggtggtctaaactctccctctgccagcctccttgacgccactgatctttgctcttggaatgttgtggcagcctctcccctcccacagctattaaaatctaattgatctttgttgcatcccaggtatatattcctccacacacagccaaatgaatgttgttgctccctcaaaccctctgccactctgttaccctgttgcaggctgtaccattgttagattgtttctttctgctgtccccagactgtaaactcctacaaggcagcatgctctcttaatcatggttatgtttcttgcatctatcacagagcaggcacttggctgtgtgggactgaatttgaagtgaagtcacagagcatgcacaccagtgatgtggctagctttttagtgtgcacctactgtgggccagctgctctgatgtatgacttcattaatgtccgcagaagcaagtattgttctctccaccacacaggtgtggaaacaggctcaggaagattgacttgaccaaatgctgtcaaagccagatgggaactcgaggctctcctgctccagacttacactgataggaccaggctgctctggtgtaaacatccatgcatgcacaacctctctgccacctgatacacatgcacacgcctctacctgcatgcatgttagagtcacccagggaactctgaaaatacagatgcccagtcttgcaggtgggaggacacgcacaggtgtttttcaaaagctcaggtgatgccagttcaggccaaggccccgccacccagaccagagtgagaagatggacacacctctgggagagcccctgagttgctgctgcctgcccctaagaataagtgtttttttgttaagtgaatgcctgataaccttgcccctggttggcaccttttgaaggtgaggatgggctcatgaatacttggccgtggcctctgaatgtgtcctgtcctatggcaacatagactgaagctctcccttttgggctaagtgctgatagtttcagttggccttagtgtgacttcagcactttccagaaggtgaggctcccagaaatgcatcccaacatttcccacatgaggagacagtgtctctatgaactggaaatgaggaggcgataatttcaatttgtagataacttaaactctttcatcttttgaatgggggaaggctagttgagaagaggaagctgagtaaagcagaggtactcaaagtggggtcctctgatgagcagcatcagtgtcaccaggtagcttgttagaaacgcatagtctagaccccaccccagacctgcaaaatcaaagactctgggcttggggttcagcagtctcacactctctgggggtaattttactgccaatgaaggttgagaaccttggttctagaatgatggtgagtatgtgcctggtgcctgaatggtcagtggtcctcatctccagctgggtatcagacgcatatctatatctatctatatatatacgtatctatatctatatagatatttagattttttttttgagacggagtcttgctttgtcaccaaggctggagtgcagtggcgcagtcttggctcactgcaacctctgcctcccgggttcaagcagttctcctgcctcagcctccagaggagctgggactacaggcatgtgccaccacgtccagctaatttttgtatttttagtagagatggggtttcaccatgttggccaggatagtctcgatctcttgaccttgtgatccgcctgcctcagcctcccaaagtgctgggattacagtcgtgagccactgcgcccggccgggacatctatatttttaacaattgccccaggacattctgaaatgcaagctgattttttttttttgaataatcattgtagaagcctgatacatactgcatactttacataataacttcatatacacttggttcaggataaggacgcttcctctttccttttcctcttgcagttatggctccttcttctctaattatcaagaccttctccattagtcctgttacccattaagtaaaggcagtcattcccttccacatgctcttcctcaggctgggttgttcactgccacataaaggctacaagtgggttttatggcctcatgcatacttagtctgtcttctcaaaattgtgttttaaatgagtgaaaacattagcctctgatctaattgatccacaaagcatcatttcagaatctttgcatgacttcccagactggcattgcagcccagcagaaggccacaggtcaaggagggaaagaccgtactacttcctgtcacccctgtgcgttgctctgcaaagagcaggtgggagccaggacaagagctgcaggcacgggcgttatctgtctctaaaagaactgattattttttgttttgcccacagctgtctctgtcccaatcacccttatctgtcatcaatgtgcacacctgcatgatattttatgacacagcacacctgctgaaatggagcagttgtcatgtttcagatttgttgtcttgtgtgtatgtcatgaggcatcatggcaaaaatgagatacagcttctgttctctcccttccccctactttgttaccctccagcctcatggtgggtcctaaagctgaagacctaccagactgcttcagccacctctccgggggtgactttctaggggaccccacccagacatgttcttttccacttctgcatccagtcccctttggacctctcaagactcacacaaaggcctgggcgaggctccccaaagccccctacctcccaggtctttaggctgccttcctttttgttgccacattgcatcacctattataaacctctggtaaatcatttattccatcatgtatgtatgtttgtttgtgttgcgaaggaaagtagtaaataaatgaatttgtttttacttgcccagacccttcagacagaacttctttggcagtatttaaaagccatttgaatgatgccaggactagctaaacttcgtttctgaacagcggcaaacacctggtgttttaaaagtaacagtctaatcacataactagggctgagtgatctgcaagctggccttgacttgtctagaaagcacaatagaaataggagttgggatcagaatgccagagatagagggtgtcacagatgtcataaccctgctctgcagagcttgccgaaggccagggctgaaagagagacccccaataatgggtgtcatggccttagccccgcgctgctcactgccattagaatcacctgggagctttgaaagcgtcctagggcccccaggccactccccagaccagttcagtcagaacctcccaggtgggaccaggcctctcaaatttttagtgctccccgagtgcctccaatctgcaggtaggattgagaaccactaggctcaaggagtttgtttaaatatgtgggtttgaaaatgaggctaagaggaatcacctggctatagcatttttttggtttgtttttttagtaacgggaaattgaatagaagcatgctaattagcacaggcgtatgtttatatgtgcatagatacacgtatctggacactgcagaggttgtagatgcatggacgtttacaacagtgtccatatttgtagatttggaggaaggttagatccatatgactctcctttttgacctttccttagtagacacacccggttggtcagcagatccagctcattctccctgaaatagaactctgccctaaaatgcttcttacatcttttcctgttcatttccattgccagtgtgttgacgtggccttttcttctcccctctctcaatatggcccagctgtcttcactgctggccttcttccaccctccattcaccacacctggtgtgacccctacactattaaacctttgctgttctccggtgttcacagataaatgataatgataatggttatagctgacccttccctagcatttacatgtatgtgttgttgactcttgacaccagctctatgaggtagcactcttatcccccttttacagatggggaaactaacgcgcaaagtaacttggtcaaggtcagccagagtcaggatggacccaggtggtctggccctagagcctctgttttgctgcctctctccatgcactcctgccatgtaggaagggagaggctgctctgtgctaacagacttttcatccattatttttaatcttcacatccctcctgctgattagatattatgattcctgttttgtagaatccaggctgggagagtttgagtaacatgactgaggacacagagctaaggaaataataacaggggttcaaaccaggttttcttccctccatgatctgtattgtgtctacctaattgctcgggattgtctaaattcacccctgtggcatttgtggctccttacaatttgtcctcaccccacctttccaactattttcttcctttttttttttttttttttggaagcaaggtctcgctctgttgcccaaactggagtgcagtggtgtgatctcagctcactgcaaccgccgcctccagggttcaagcaattctcctgcctcagccttccctgagtagctgggattataggtatgcaccaccacgcctcgctaaattgtgtatttttagtagagaaggggttttgccatgttggccaggctggtctcgaactcctggcctcaagtgacctgcccacctcggcctcccaaagtgttgggattacaggtgtgagccactgctcccggccccagctattttctcttccatgatgaaatcatgccacctatctttggctcatgctgttccttttgcctgaaatgttcttccctactcagcgaggacatcattcagctgtcagatctcccatgacaaggactcttgtcttgctcacagcaccctgcgtggaatttgcacacagcagcagagggtagccatctcattttcttaccactttaagaagccctgtaagaatgcatctcctcatggcccccttggtgtgaggtctgcatcacacatctcacctccagtccctttgtgttattcttaggtacatgtttaccttcttgctagatggcttcttcaggccagatgtcctctctccatcacttttctcttgtgtctagggcattgcctggcaagcagcagatgttcggtatatgtttaacaaacatagggcagacaagaatacaaaaaaacgggggaaatcataatattcagttggagggtacttggcagggtcatagtgcttagaacagtcaggggtgtatttacctgatggcctctggggaaatgtacactggaaatttccagacggaagcaaagagcaaatgattaccccgctgggctgatttagcttgtgcattttgccacttgggttttgttaagtttgtttttattttgaggtgggggataggctttgctaacctcctgcggaaaatctcctggctcctctgtcttcctggcatggactttatccctagtatatatttgggagtgtgtgcaaaccgcgcacttcaggacttttataggttttcatgggctgtctgtggtggaggtctgtgggggtggggaatgcagtgtttccggaagagggtagaagctttcaggatggaaacaggtgccagaaaaaacattgttgctactgggaaagtgaattcgttaactgaattagggttatgatactaaataaacgtctttctgattcgtcaggttaaaaggcatttacacagctgcctttttgcacctggcaccggaggccaggtgggagggtcccgggggggatgggcagagcgcactgtcaggcgggaaggagaggcttcctgggcatcttcttggattggctctgacctttcttcttgcccccctcaggtgagcgtcctgaccaccctggagcgtaggttcaacctgcagagcgctgacgtgggtgtgatcgctagcagcttcgagatcgggaacctggcgctcatcctcttcgtgagctacttcggggcacgcgggcaccggccgcgcctgatcggctgcggcggcatcgtcatggcgctgggcgcgctgctgtcggcgctgcccgagttcctgacccaccagtacaagtacgaggcgggcgagatccgctggggcgccgagggccgcgacgtctgcgcagccaacggctcgggcggcgacgaggggcccgaccccgacctcatctgccgcaaccggacggctaccaacatgatgtacttgctgctcattggggcccaggtgctcctgggcatcggtgctacccctgtgcagcccctgggcgtctcctacatcgacgaccacgtgcggaggaaggactcctcgctctatataggtaggagctgccccagccgtattagcaagagaccagggtgtgttgaccatggataaaaggtggcctggtggactttgattttgccagagtactggttctcagacttggctgcacacctagtgttcttgaaaaatactcatgcctgggggtgcaacctgggcattgagacgtttttaaaagttcccaggtgattcttgtgagcggccgaatttgagctccacggggctagaccactaacaccgcttcagtgggaaaacatgatcgggaggagttgtatgtttatctcttctttttgagtgcgtatgtggactttgggctttctgatattagccaccaaggtatacttggggtctacacattggaaactccagctttgaagaatcagaatgatgtcctggtcattgtcctgttgcagctcaaaaggagaggtgatggctttgccagcatttggcatcattcgaagttggtgacttccggtaattttttcaataatggaagtatgcatgggaattgggtatgtagagagaaataaggtatttgtgttttgaaaagttatttttcacggtcagagtttctgatgttttatactggaaggatggaaaccacttgtgcgtgggggttaagaatcatctgagtggcaagttgtttattacgtggcgggcagtgttttcagtggctgcggtgggctctgttggatggcagcgtgcaaggtgagggctggccagccccgcatctctatcccttgtttacaaagtataattctgtctcctgccagctgctggatttttctgacatccccagtcactgagtgctaagctttgaaaacattacctctacccagggaagctttatgcctcccaaaagcaatgtgccttgaggtagaaagttaattatattatggagttttaagtgaaaatagaatttgaactggatttgacataaaggttcctatctgccaggcttcaagcttgctgagataggatggtttggaagcaggacacaccgaaatgcagatttttctctgtgtctttctggcccagctttggagtagacgcgtttactgaacacggatgttgcacgcggatgttctggctggctgtgagcaggctctgggcaggaaagatggaaggaatgcgcctctccattcagaggatggagcaccagtgagcctagtcaccagctacctatggaacaaaggggaagagaaaacggctcaggccagagatggttaggggtttccattattacctgagagtggttatggtggaggaagggaaactaaggtaatcatttttctttcattgccttaagtcttgagtgaaagccgctccacgtgagttttttgcacaccagatcatggactacagcatgtagccacaaaggtctcctgaggtccaccctctgacttgactgatgtcaccctagggctctgggagagttgttttctggtaggaataacaggaagtagatcaatcagagcacagggaatgaaatggggagtgaaaacctgaattgttgtctctgctgatagaatcaagtagaaaaatttctccccagagtcacccctgaagtcctaacagtgctgtatcacttctgcctggggcttccagccgtagtcactgaaccctcttctggaagtgtctcctgatgagttaagctgtgctgtttccccacactgggtgagggttggtttgaatgtgccaaaagctttatggtgaggaagcactttggtttgggacatgggggtgtgggaggtggaggcgtggacagtagggctgatcatttgaggcagaaggccttcttgaattctgaggccttgtctgtgggatttgcattgagtctttggtaggaagaactattcagccaaatttctatttggtcaccccattcctctgtgataagtctgagttgggggagtgtctctttgcatgacatacgaacatcttggtggctctgttacatatggccagattccaaaacatcgtagcccatgccatggagatgatagttctgggtttctctgcactggtttacatgggtttgtgtttatcgggatcaggagaggacaagtcttttgcatagattggcctcaatagggggccttttattccatatgtggtttattctccaggtataatttaagatcatagcatatgcagagtataactggttcatttatttattgtatgagctataaaaaaagtgtttgtggtagtgagaatatttcagagtttatctcctctaatatggcactagttcctgaagccacttaactttacttcacagtatttggggtagcccactgaacaggattgatataaaattctggcctcttaactccctgaagaggaggaaagtctcaagggactgatgctgggactgtaggtgtaactgtatatccatcggggaggaataacatgtgtacccctggttccagctcctgcagagttggtctagagaggggcccacaaccaattgtctggtcatatgcctaaatcgtgacactatagtggagattgaaaggattctaaatatggcatgtgtaaaacaccagcttgttcttgagctgagccttccctttgggtgtcagcagggaacagaatgatcaacatgcacagctcaggctgcagatcagtggtgatgacacctgccccgggtcacccgcattgtgggtcactagatgggtgctgtttgtacatcggtggccgtgtcgtagcttccactacaacccagggcaaagtgaagcattccatcttgaatcaagccgatattttccactgaaatgacttacttgctttggcctcttgtggctgagccgctgccagattcctggattcctggatgggctattcacaaggggctcctctggctggcaccattcttcagcccgtcctttccagtgtgggagggagccaagggagctcattaccaggggacaaaactggatgaatggggactcggctctgctggcaggctttcactgcggcatcatgcggcacccggactcacagtgcagccagacggtgacccgtgggtggcacgtggcactctttgttcctagagtgactacatgggcgcagtggcagtggagaccactgggcccctactgaggtcggagaatccattctttgggagtctagtcatgcctctagctccatgttgtgatcttccattagcccagttttcttagctgtccttctgtttctctaagttcagaacacaagtcgtatttgctttttatgaaagtgtaagtaggatgatggaatgggcttactgtgccctttcattaggttgccccccttttttttttcaaggaggaaaaggtgaaatgggagtactaaagatttctcaataactttattcctagttaaaaagcattacatgttcaccgtttacaattttgaatatgtagaaaaagaataattagagaatattgtagctttatggtgtacacaattctattctctcttctgcattagcatgcttttctatgaaaatgtgttcaagataaatgatgttttgtgtaatttcatttctcttactatttcatgagcatttgtttgttactattctatgacattgctgcatatataatcccttctgaatatatacgataatatttaatactttctatagttggacatggatttttaaaatatttgctgttttaaacaaagcagataggtaaactgtgattccgagaggttgagtaacttacccaagctcatttacctggatagggctgggctgtgggtctgaaagtgatgcttatttcaggtatgtctgggatctgctcaccaggctgggatgggagctcaagggtggtgcacggtccagggagtcaggtgcaagccagggcattccacgagacagcccgaagcctcctgggcatacaaattgcagcaggagccaggaaggtgggaagacagcagtgtgtctggagtccaaggagagaggtgctgctgaaatggagaatgagtgtcagagccagaatggagtattggaggtaggatggagagagaggaaggtggtcctagctaacggttcaggtctgagttctgtaaagaggttgcacccctgtttcatagtgctttgagctgagatggctgcaaatcagaccttagacatctggggcaggagcaactgatctgttgcatctttcgctcagctctttccagcagtgtgggcgccataccttcacatgccattcattctgttttttgaaccgcagtaaccactaggaggtttttttaagtgttgtgttagaaataggccaccttacaacttcccataccctgggttctggttatgccctctggatctaccatgaataatccctatccctcttccatattttgatggctccccaaatagttgagcactaacctttcatgggtaggcggatggtatctaaagcttagttagctcttcggagctaagacctttgctccatgcttgatggatttcctaccatacttccttcttaagagggatgccaagggctggggagctcattaccagaggacaaaaccagatgaatgggggatgtgggatatggcgttgtattagtttgctagggctgccctaagcaaacaccacagactgggaggcttaaatgacagaaggatattttcttatagttttagaggctggaagtctaagattaaggtgccacagggttggcgtcctctgaggtctcattccttgaatttcagatggttgccttctacctgtgtcctcacgtggtcttccctctgcatacacatccctggtctctctgtgtatccaatttactcctcttacaaggtcgccagtcacattggtttaaacccacccatattagctcatttaaccttaattgcctctttaaaggatctatctccaaatatagtcagtcacatgctgatgtactgggggttagggcttcaatatatgaatctgggggaaggaacactattcagcccataacagacaccaaagagattagtaccaaaccaagactacactcctgcctctttgccaaaagttttcggtaaggagctgtattgtaatttttctctctaagtacttgaggatttgatgatatagttttttttttaaataacttttaaaaattacagaatcacaagttgtggcaaaatacaggaaagtcccctgtatccttcttcctgtttcccctgctgttgatgtcatggtaactatcacacagtagcaaaaccaggaagttaacattgctgtgatccataaaatttattcagatttctcttttttttttttttattcttttttgacatgaagtctcactctgtcacccaggctggagcacagtggcgccatcttggctcactgctgcctctgcctcctgggttcaagtgattctcgtgcctcatcctcccgagtagctgagattataggtgcctgccaccacacccggttacttttttttttgtatttttagtaaagacagggtttcgtcatgttgtccaggctgctctcgaactcctgacctcaagtgctccgcctgcctcggcctcccagagtgctggaattacaggcatgagccactgcacccggccaagatttctccagttttatatgtgctcatttgtgtgtctgtgtatagttctgtgcaattgtatcaaatgtggatgatgcagttttaagaatgcagattgggatcaagatgaaaccagataattttgagttgtgtgtgttaggcagacacacgcgcgtgcacgcacacacacacacacacacacacacggcacagagacaggctggcagattctcctgaggatggatgttctggagagaatgggagctggccagcggaaaggggttctttgagaagggaggctttgctgtttgcctgaatacacagaacaagtgctctaactcaggaggcacacgttttagacacaaaaatgtgtcacgttttctttgtttatcacttatcctgaaccccagtgcagccctctgtgtttccgttaataatgcaaagagaataattctcagatttcatctgccaagtgtttgattagtacgaagggcccccgaatactggccagcaaccaaagagaaccaaatttcctttcagagccctgggagcaaagagttatttgcctctgatgagtttttattttaacttgacattgggtaaaatgtgttttaactctccaaagaacgtggattgggtatggatcaaatatactgtgactgaagttcatctgaaaaaataattaaaaagccatctctcgtgggagcaagcattgctcattatattcttgcaacttcattgatattgaagtttccttcgttaatttctttttctaaaataaatggcactataaaagtggtcagtttgttttggccatattccattccctctccccagctgctggtcacatgccattttcagtgtgtttgtagcagcctgctaggaaacagcctgtggctcttacctggtgcttccatattgcctgggctgataggtgtttctcattcattcgcagccactcataactcatgccctgtggttcatggcatcaccgctgtgcctgctgcctgggtgacctttggacaagactctgtgggctctggagcccaacagtcttgaaattgaaatcctggcccctccacgactcctgggttttggatgagtttccaattgccctgagacttttgccttttcagtaaaatggtctggtctacctggccaggctttccatgaacgtcaggtgtcctgtacacggtggggatcagtaaatgctgcccttttcatccttatggtcatagcatctccatttccagatgtagaaattaaggcacagatggatacatgactgaactgtttaaacgcaggagcagatctttggacaagagcccttggaacctgattttcagcctgggatgtgatccatcttatagagctgagaatagcaacctcttcagtcctgaattaaaccagcagcgctcttcttttcctgaagaccccctccagtggctcatctcaaagtgcatgaagtgctagcattgccccaggcaggaggagagccagtttgtattaatttggaggcagcccagagtatggccattgccccagtgtgatgtatggattggctttctgggttctagcatgtcgcttcttaatttggaagcatattagctcaattttcttttaaataacgtattcttattttagtaacattgagaaaaacagaaatgtaataagaaaacctaaataatatgtaatccagatacctatagaaaattattgtcagtagttaggtatattttattccagccttttttctttgtatatcgttttgcttagttaaaaaccatactataaataaacctgctttttatcagttggcatattataaagtttttcctgggtcataaacaatatacatcattttagataattgcatattattttgtcaatctagaaatgctggaatttgctagttgggcatttaggtgatgaatgtctctgtggctttagccttgtcgacgttggctgaaaactttaaaagctcaggttagttcagatagattcagtgtgagctgaaagccagccccctggccctgcggtgactttttccaaaagataaatgagtgaggccaggagtgtcatgcagacgggctttgggccggctatgggtgttggcattcttgttttgaaacccccttccacatctgctcaggggtcacaatcttaagtgctgaaggggtgcagctgatgaatgagaaaagcagacagtgtggagcctggggagctggtccttgcctcgtccttcaccatttgttgccctgtgggagtgcaaagttagtgtttccagatcttctgattgttaagagaggctggaaatccgtatttttcaagaggattgagttgccaactcattgaaatcttctccaagccctttgcgagtcagcattggttagcatgtctcgaacacatggtagctcaaacacacacggtagcttgccatggtggcaatttcaaattgcattcattgatttcaaaagaccatcaatttcaaattgcattcatcttttgagttgcaaataaataaaacacgaaaaaagaaaagaaaggaaagctgtcgcacattgtgaatgtcacagccagaaaaaaagtgttcttcgctgtggttctgaatgttaggggtattggatttggaggaagaggacaggggatcttgcacgaacagaggacaacctggcaggagtgagggtaacaccactgctgagcggacccactcctactgacaccttgcttactgcctcacaatgatggggattcccaggattggaaagaaatgaaaccattttcctaagccagaggaagaaaagcacggttcaaggttccccgaagagagtattgggatgcagaaaccaaaaccatttgtggctggttggggcctacagatatttactgtgtgtgcaagagcatctttgtgaagaaactttagaacatagcactgaagtgtttgataggcaggaaataggaccagagaggcccaggatgacctgaagaaaggtgaaagtccatgtgagggaattttccttccagaaggatgtcaaagaatactgctagttacttctttactccggcttccttactgcacctgactggggaaggcacacccatcttatttgcttttcaactgtggcacaggtattgttcttaaaaaagattttgagacatttcctctaataacatgcgtattgtttctcttcagttaagactgtttacttttctgagagagaataatcttggcttcattttctttttgtccttttcacctacaagaagcattctgtgagagcagatggcatgaacggtttggtttctgtcgagcattgtgttttgctattgttaacactgggatttgaggttcatggtcttcctccttagtgggaagtaagttcttcattgctagataattttttagtgttaaaatgcctcacagaagagtctcttgtgaatatttgcttttgtctgtctgtccagtaccttgttttttttttttttttttaactaggaaactacctctcccatcttaggtggttgctgtgggttgcagaagtggccatgtggtcagtccgggcatggtcaattgtgacacagagaaggtctacagtagtctacagtgacaggccccagaagtgggccaatcagagtccactgtggggcgagagaagtggactgagagaaatggaccatcttctcttgtaggactgctactgaaagaactctgaatacccagagattccagtgtccatcattgctgccacatgcagagaacttgcctaagaatgaatgaacttgcctacagagaaaagtagaccaaggaaaagggagagcaaaagggcttcctagatccagccgtgcttgaagctagcatctagcccttagaatcctagtcacttgaacacataaattatcctttccaacatctacagctgccaggtttctgcctcatcaggcttgagtgcctgtcatgtcataggagttggtctggattgcttccctcttgaggtataaccaagcatctttgaatagggatagagtccaggggaaactcaagtaaggcatttgttctctgctcaaagtgctagttctttcacagtacaaagattaaccactcatgagactctgaagaacccctgaccctatgcataaaatgaaaggggctagcttgaaagcgttggcttagctcttcatttcgttatttcagaggcattgaagttacaggacttagatgccaaaaggagtatcccctctccacctttctccctacctatcaaaaacaaacaaaagtatttaaaaataacctgttggcaggctttgtgcaggaacagtaagtgtttaatagcacattgcgtatgtgggcaggagcatgttgagcatgctcagtttattcaatggctcgtttattgaatggaaaaaatataaccaatcctggctcttttacttgactgcaattgccaaaggtaccttaactccctcaaatgacttcatattgtcaggaatgaataagctaaataaatgagtatgttccattcccagcgtggctttgccatttcattcctgccaagccgtgtgtgtgtgtgtgtgtgtgtgtgtgtgtgtgtgtgtgcgcgcgcgcacgcccatgcttattttaaaccacataatagacaaatatgaagataccaaagccttgggtggctagtggacactcatcaaaatcgagatgtatttctttagcgctcagattcaagaatctggcttcagaatgtcaggagtcatcgttggctgcttgaagctaaaggttcttggatgtgccttgcgggagtcggggccataaccttttcgaattatgtggagatttacgtgtatatgtaccctgggaggaaagctttgactggattgaatgaggttcatgacccacagaaggttaaaaccatataaagacctaatgttagactttggtgacaggcattttggggtgagataagtctagctagttgaggtgagataggctgtatggagtgacagatggcatttagagactggaatgttgttcactgttcagctcttagcttgttttgctccctggagagccactgtacttacaacaggaagcatataagcatcacttaggcaactgtggtgaaaagtcagaatgcattctcagcggcattggagacacccctcggccctccactcccccgaaaattcctttggggctgaaattttccatcccttctttcagcctaaccgtgggtgttttgggtaatattcagcagattttctgtgctggtttgaactgatgcacagataggaaaatcaaaacttttttttttttagttctaaaagcaaaaacactttaaaatggcacttggatcattaatagaatctgaactctcaaagtcaaaattttccatgtgttcttactaagaaaaagactcactgttggggcaattaaaaacaaaggcagaaagttgtgagggactaaacaattctggggacatgaatgaactggccaaactttttattggcaaaccttttatgggatagttggtgcatttgagaaaccctctattttataccacggcctcctatttcgggtgtcgggggactgagggaggattggcgttgcactcattctgatggctctccaaggagagatacttttctccctttctctctgtaatgttccaagcaagtggggccaatgggtgtgatttctccctgcttccctttctgggcaagatgctattaccataagaacattcacgtttgcccacctgccttgtgggttgttaatggagtttacaaagggaatttggattctcagcaagaggtctcattaacacagcaaggatctaatagattctaaaattgcgtatggacactggaaccttttgaaacctggtggtgtctattattagatctaaatcatttcgccaaccctggcctcaggctgtacatttgtatcatggggcaaagagccttctcttcatcaaggtagatctaccatattgattgaagaacatgttaatacctgtgattctggtgacaagacaaggtaaaaaggctattaggcagtacatagaggaaaatgtctcccacattggtgcttttattttatttttaaatatcggccttgttactggttggtgtgtttaatactaggattcattactatcataaaagagagtttaacagctgtctgcttatttagacaagtgcgttaagcacaggtgagtttggaatagtnnnnnnnnnnnnnnnnnnnnactagctcccatttatggggtcgcagctgttatgacatacagacaaccagtattttgcatatactctctcactccctcctcataaagcccaaggagatagaggctgttattctttctgtgtaggtaaaggagctaaagttcatggggcttaagcagcttgttcagggtcatatggttagtgagtggcacggcccaagctacagtccggtctggtctccattatcccaagggccttatctttcccatcgtatgctacccctccaccatccccaggcatgattacatccacaccaggataatataggaccccaagaatgtcacactaagtatgaaaagtgactcaacccaactacctaaataggtatacagctctttctcagtatagtacccacctgcggtgctttgtcattttagctgtaaagtatgaaatggtgaggcgtttctaggccaggagacgtctgatgggtctggggtattcagggcctagttctgtgggaattttaaaaactctcatcagataaagcattgctcccacaaaaaaatcatgtgagttgttttcaaaatctccttgtagtaaagtgagagaagctcactcaccagacggttttgtttacacttcaggcctggcagcatttaattggtatacattcactgcacttatgcaacttggacttgagtgtttcactcccagacttgatgaagctgacttgcttttctgagcgagtcaggagtgattttaaaacatactagacgccagcggggacaaaaatggtaagaaggtagggcaagaaagacttcatggatcatggatgaatacatgagaaagaacaagaagtagagataatgtaatccccaagacctttcctcatggggaaataatcagcatgagcagttattgagctctgtggtgttctgaagaccctcaggagtggcgtgtccacatacatgaactgtgtttgcagaagaaggtggttacacgatggatggattgggagtggcaaaggcaggcctccttaaggcatcctcaaggatttgacgtccaagtaggtgaactctcttccaactctatgtcctgaagccacattttcccgaagtcattgagatagcgttttggtgaccttcagaaaaaatgacagtctcttactggtccatcttggggagtgaagagagggtctggagattaaattgggtgagggaccacgtgttccatgttggagcattggtgcaaagttgggagactcagctcctccagcttatgatgacaggttcatatttccagtctttttttaattaaaaaagttgtaaattttggtaaaatattcatacaggtcaccatcttaaccattttcagctgtacagtttgatagtgttaagcacattcacattgttgtgcaacagatgtccagaacattttcatcttgcaaaactgaaattacctcttcaacaacaactcccattccaccccctctccaggccctggcaaccaccattctactttctgtctctatgaatttgactactctaagtgcctcagataagatcgtagagtatctgtcttttgtgactggtttatttcacgtagcaggttgctctcaaggttcatccatgttgcagcattgggtcagaatttccttcctatgtatattatataccaaatattccactctatgcttaaaacatattttgtttgtccattcatctatgaatggacatttgggttgtttccacctcttggctattgtgaataatgctgctgtgaacatgggtgtgccatgtattttcagccttataaaagtatatctccatctgggtatcctaaggtgtgttaaactcagtaaatccataattcatctctttaattttctcccaggtttgccttattgaccagccttgtcctcccctctctcttcctgcatttaaaagctccagcctctcatggatcagggttcctgcacctctctgatgtctggtccccagcctcctctactcgtcccctccctgccacaggtcagctctcagcacctctcaactggaccactgcatctacctctgatgagtttcactgtgcccaatccagcctgtctccaagttgtccttcacattgccactgttccaaagcaggctgtgaactttatgaacccagagagatgtgcgttgttctggaacctttgttacaaaggttccaagagctctgcatgggatttaattttattttgttacatgcccaatgagtaataaccatatggttatgtgtattaatataatgcatatggtgagattatagtattgtatttttgagacacttaaaataacctgactccattttaacagaggtgttaaatttaattgtctacattttattcattcattcaacacatattaattgataacttacgatgtgtcagtccccgtacaaggtgctggggatacatggatgaatcagacctagcttctgtctgtaggagtaataataaaatcacccaatgtttattaagcacttattgtgtgccagagactgggctaagttcttgacatatattatctggtgtaattctcaaaacaaccctgagttagtttttatttgccgcgctttatgggaggaaatcctgatgcaaagagcttgagtaaagggacaccttggggattggagtcaagggggttcttgctcctcacaatattctcaactactgtgttttcctgcttcacagcaaagtgtaccagcgagtgtcatgcaaaagccaacagtttgaaacaggaagggcaaaatgaaatgaaacaccaggctgatacatatgcatttatagatgtggagctggaaaatattgaccaaatgtgctcagaaatattttacaattgtgaataatgaccagtcccttgcaaggagacagccttccaaaccgtagttactgttagagaaaagaaacaacattctgcatgtcctcaaagcaagagctcacgtaaactcggtttttcataggtgtcaaatgctgctccctgatgcgatgcattatgcaggcaaagaaataacatgacaaagcctctctcacagcctcagaaaggaaggtgatgtctccgaactggccatctggatatagctaggatgaagcattttcagaatttgccgaggttcacagctgaggagaggggccagtggcatcctctgctgtcaggtagcccctcctcctcttcctctgtgaatgggcaaaccctgcttcttctgctgggttgtatctttttttttttttttgagacagagtctcgctctgtcacccaggctggagtgcaatggtgcgatcttggctcactgcaacctctgcctccctggttcaagcagttcccctgtctcagactcccaagtagctgggactacaggctcacaccactgcgtcgggctaatttttgtatttttggtagagatggggtttcaccatattggtcaggctggtctccagctcttgacctcaggtgatccacctgcctcagcctcccaaagtgctgggattataggagtgagccaccgcgcccggctggtgtcttaagtgtggaaacacacacacacgcacacacacacacacacacactcacacaggagtagatgaagggaaaaaacagagattgctattcatcacacaaaagccaagcatgttcttttaagaaatcactgttgctggagacttttaggcaagtgatgtgagcattgaagagacttttagtgtaaaatcaaggtggaagattaggttcagtagtttgtagtctgcagtggtgactgtcttagaaagctttggctggtaggaagctccattgagagagtgcatatcgtatgcaaggcactgagctcactgttgcctttatgattgttcacttcatcttcataatggctgtttttcctcagtaggaaactgaggctcagcagaattagtaacttgtgcaaagtcatacctcctagtaggtcagtgatgagacttgaatataatgttcactgatcaaatctggcctgaaattgagatttcatagaataattgattttttgtcatcatggaaaacttaaaacatattcaaaattaaaaaggatggttgaatgaatccctgtgtgcccattttccagtaattatcagcatgttgcctttcttgttttatctctacccctacctggcctcccttctccgtgattattttgaagcaaattttagatataccattttattagcagttttttttttttgagacagggtcttgctctattgcccaggctggagtgcaatggcatgatctcggctcacaggaacctccacctcccaggttcaagcaattctgcctcagcctcctgagctgctgggattacaggcatgtgccaccatacccagctaattgttgtaagtttagtagagatgaggtttcaccatgttggccaggctggtctcaaactcctgacctcaggtgatctgcctgcctcggcctcccaaagtgctgagattacaggcgtgagccaccgtgcccggcctatttgcagttatttctgaaagttatttcaaaacataatcacaatcccattctcatggtcgttagatctagagactttatcagcttcaggtttcatttcttaggggcactgatctttaatcggtgacaatgatgatgatgtgtgcttccatcatgggacacatgtagcttttgtggtgttaacagctatgcttggccatggccttgggggtggtgatatttaaattccatcattactcctttgattgcttctactaagagaatcttccccatttcaactattttgttatcctgagttagaattggaatgagaaaaggaggaaaaatcctccccaattactaaaaacaatttaaaatttaagatttttttttcggttatttttctccttaaggtatatcctattagaaatatacagcaaaattactgtgttttacagtaatggaaaatggcttctctctgtgcagttatgactccaatgaacaattaagtttgcttcattttgcttttgatttttatagattgcttttccaaaaatatataattatgtaagctatttacagggcttcaaactcaaatctacaaaccaagaatattctgagaattctagcttctaagcctgtcatttctgttccatttcttaccttggaagtaatcaatttttctttgtttttggattttatctttctgttttaaaaaatgaccaaatacatttatatattattagcttccttttttgtaataaaatgtagtttatacagtttctctactttttcacctaaaaagcatactaaaaaaatcacagaatattgcagtatataaaggatcaggataacaagcagtacatagagacatagaatcattgaatttttagagatgttaataatagcaaacatgtggcactctgtgctacacactgttttcagtgctttacataaagtaactcattcttgtaacaacagtaatcttctgggggtatgtactattattatcctcattctgtaggtgaggcaactgaggcacagagaggttgggtaacttgcccaaggtctcagagctagtaagtagcagaacttgaatacagttgtctgctgttaaatgccacattacactgcttcagaattgccagagtttaattttctgatttttatgagtcaggaaattacaaccctaggatggttatgttaaagatctgaatactcacgtgccctgtccccagggttcttactttttctgatggtactggcttttcttgcagcttagtgttgagtctgggctttgatttttacctaactataagctaaaaacttagactgttatttcatggatgctcagaagacatgagactcctggatcagagacaaagggctttattactcattgacaataatcagtatgtgtgtctgttcttcttaccttgtaagtaccataggggtgatggtgaggaccaggtggatgtctgtacccccagtgagtgttacaggagaggaatactgaattggggaagtacactactttgacgtcaagcagtaagcaagcctaccctttgccccagagacatacctttcctctttcttcaaggttgctcactgggaaatggctaggcagtgaatggtcagggtcttgcattcttggcatacccagcaagacatgtagaagcacagagacccatgggtcactgtctgccaaaatgcttctttgcaccggttttaatgattttagaataaagggaaaagcgggtgccccataccacttctttgccaaatgacttctttttaatacatttgccagtattccctgatgcatttactccaggttttgtcattctcaaattctagccatagcaaaaagagtcaactcttgtttgaagaccacctttaacaaattctaaatactactacattgcaagtctatgggttttctcttttatttgtaatggggaccattttggaattagctagagagattaggttgacaagcattgatgaatttcattaccacataatagacggtttctttttcatttccttttctatttttccggttgaacttcttttcgatgttaagcctagtttttgttgccagtgagttgtataattccgtaagttactgcccttcctaactaaggccctgactataacttcgcctttttatggtaacacatattgagctttgattggtaaaactctttggaggcgtccttcgtgaatttcctgactttttttttgtttttgagacagagtctcgctttgtcgccaggctggagtgcagtggcgccatcttggctcactgcaacctccgcctcctgggttcaagcaattttcctgcctcagcctcctgagtagctggggctacagccgtgtgccaccacgcctggctaatttttgtatttttagtagagacagggtttcaccatgttggccaggatggtctcgatctcttgacttcgtgatctgcccgcctcggcctcccaaagtgctgggattacaggcatgagccaccatgtccagcccagacttcttaggataaataagaaatagtaagggttcaatggtgagaagtggccttttaagttgcaagaaggaaaatggcaacacaagggacttttgtaaatgtggtgtaattctgctccattgaggaagactgggacccgaggatcagaggcatggagggagagaacacaaaaaacaggacctgggctagagaagaaaggtcaagccaaggggtgcaaaagccattcagcactcagcccaccccttaccttaaaacctagcccacccctattagctactaggatgggaattgttgagttcaaccagcctgatgtttgcaagtatgatgtgctagacatggagtaacgcctcagctttttcctctcttctgaattttcatgcaaggtggtagactctggagtggtgagtggatgggagagagaagggcctgccacttccttcctggggaatcctcaagaggtttcacctgcgttgcagagactgagttgctgagcaggtatctgtgcctatatgtggtcactcttttaggagattttacacttctcactgggcctcttcttggagttgtttttttttctgtttaaccaatctcagtggggtctttcaggaccttaaaactgtttcaagggacaccacagttagcctgggaaacataagaggaaatataagacctaattattaaagtttgcacagcttatcatggagagagcactgcttaagcccttcctaacataggcagatcatcgagcaaggagtcacaagtgggttagtgactgagggtgagggctctggagccagatggtcaaggtttgctcctaaccctgactagctctgtagcttagcttcctcccagatacaacgggaatgataatactgtgtctcttattagagatgctgtaacgattataggaagtgacatgaataggtgccatgactggcacatagtaagtgctcaatgcgttgttattaaattgaggattgggcacaagcccaatctactaatttacatgatttctagatttaagctataggaggttttcgtcctatgatctggagctgcactgtccaatatggcatccactaaccacatatggctatttaaattaacaaagccaaatacagtgaaaaactcagttcctcatttgcactagctagattcgaagacccagtagccacatgtgactgttggctagcattttggagactgtagattgttgaacattcctgtcgctgcagaaatttcttatggatagctctggcctggagggtttaaactttgagggatttgatgactgcgtgtttaattttggaacttttttcctgatcccagtttcttttctacaaatagaaaagaatgcatgtcgtgcggcttacaggaatgtacagacttcagtgagtatgggattcacacagatgaggaagcccttgcagatacatagaggagtaggagtttctccaaggtgaaggctgaggctgtcctgagaggtggccaagggtcccttcagtgccttttagtctcagtctcctgtgcagaccctctgggtgaaggaggctgtatttcctccattgctttagcccccaggaggacattcctgagttcgatattctgtcctgtttctctcgtaggcaccatatgtcccaatttgggttccacaaatatggtcactgtgattatggggcacataaggctttccatttaagttgctgagtacagatcattaatcctgttcagcctgtgccccctgaatctgcaaagaggaagaatccatcctgaaaggggccagagagccaggatgcctttgtctccctttcttttgggttttatctccatgagaagtgggtgaagggtgtcagctgtgtatttgtagctaaataaccggctgtcttcccagctgacgatgtaaaaggaaaccacccacttacattaaaatgtgtttctgctttatgagctctgagggttcattagagatggcgttaataaggactcctgtgctcagctgtcagctttctgccttacctagggggcaggtagcacgggcaaagcactctctaggtgccaggccccatggggaacaagtggcgggaggcagaagctttgactgttctgcccgcaaagcatgaagggtctctgggaggcagccaggtgcaaggggatttctgagctgcattttaaaaagtgggagtgggccaggcatggtggctcacacctgtaatcccagtacttccggaggccgaggtgggcagatcatgaggtcaggagtttgagaccagcctggccaacatagtgaaaccccatctctactaaaaatacaaaaaattagctgggtctggtggtgggtgcctgtaatcccagctacttggggggctgaggcaggagaatcacttgaacccaggaggcaaaggttgcagtgagccaagatcatgctactacactccagcccggacgacagtgcaagactccatctcaaaaaaaaaaaaaaaagtgggagtgaggcttataaatctgtggaaagggaagaaggggagggggacattctgggaagcacaggttatgcaaagttttaatttgagacaatgagaacaggatattagaacaactttattgcttcctagttatgcagtcttgcataattgacttaaccttggttttcacatctgtaaattttggaggcggtatctaccttatggggttatgagtacctaccttatcgggctgttctgaggatgaatcagttaatacaggtgaaacattcagattcccacctggctcagaggaagcaatcagggaaaattagctttcgtcattattatttatcttcttcctctgcatattgctcttattattgaaagagaagtagtttttggagatgaattcaaatgccatctctgccagtgaccctgcacaagccacttggagctttctgagcctcagtgtgctcatgattaaaatggggtaatactatctgcgttatgaggattcttgtgaaatttaggtattgtctagaaaatcccagtgcagggcccagtatagagaaggtacttagtaagtgttagtttccttctctcctccttctcccaaatttcctggtagtaatttggcaacccgtttagttaaaaagtgatgagacgaaatggcatttgagcaagattaactcagcagctgtgtgtaggatggattagctcatgtgcaacagtgcaacttggaatactctaaacattggttttttttgttttttttttttttggtatctaggtatttgtgtcagagttacaagatggttccttatatcattacagtagctttttccatgtgtcaggctactctgaatgctttacacgtatttgctgatttgaccctccagacaactataaaaggtagtactgttgttcacattttacagatgaagtaactgaggccagagagattaacttgcccacgatcacccagctagtgtgtggtgatgcgggatttgaacccaggcttcagaatctatgctcttcacctcagtgattgacacttttgaaatttctagacagcagggggctgtttgttgcatttctgagttatggaacatggtaagactaggaaccacagaaggttaatcaggggaaaaagcataggccaccaggaggttttatcctagtccggagaagttgcgtagggaagggcaggcccccaagactttctaaacgtagctgggatgttgtgcccccctctgggctcatctgggcctgtcccctgctctacttgtggaagctgccttgggtgctgtattagattgttcttacattgctataaagaaatacctgagactcagtaatatataagaaaagaggtttaattggcttatggtatggcaggctctacaggaagctagtgccagcatctgcttctggggaggcctctgggaagcttccaatcatggtagaagggaaaggaggagcaggcacgtcaaatggccaaaacaggaacgagagagagaattgggaggtgccacacacttttcaacgatcagatcaagaactcgctcattatcacaagaacagcaccgagaggatggtgctgaaccattcatgagaaatccactcccataatccaatcacctcccgccaggccccacttccaacattgtggattgcaacttaacatgagatttgggtggggacacagatcatataggcgctatagcagaagaatgtggttctgcagcaggagcctccacctcccagctttgcagggctgggcagaccttcccccatggttcgctggctgcagccaggcctggcagaggtgggcagatgctcagccacagatggatgccacgctgctgccagctccggcacctcctaatgaagtgtttcatgggtcctgcatgaaggtcagcaggcagtgacagagggggtgccaggcttcttccctcctcctctgcagcattccagtcatagcttggactctttcccgtcagtctttgcctcctacccgcctcctccattctcctccacacctttgcccaggacctctacgctgctataaagacatcagcagcccccgtagctcacagggtgctgcttcgagccatgccagcccgctgctgatgtgacacagctagcaattactgagttcttcccacgggccagacactggttctatctacttagcacagagaggcctagtcacttgcctggggtcacatagctagaaagtagcagtccaaccttgaaccctggcagtcaggctctggagcctatgtacccagcccctaccatttgcaccgggagctctcaccacatgttcccattgggccctaagctcttccttttgttgcctttcatttccttctctccttgttcctggccctaccacttcaaacttgctttccctcctctcctagcatcacatccaatgacagcagctcctgcctggcattggagccattcaggtctcctgtgtctctgggcctaggttcaggtcagtgtcctgtctgtttctggtgccttcctcggggtcctgacacctgccctttctgatacgcgtgcaatccaatagatgacaatgtttgccaagcctgagtctgtgccagcaccttgctgagcacttcacagcccgtgagactcccccaagcagcttttatggaagaggggatccagactcagggacattggcttaaagaggttgtagccagaccccaggggccactgactccagacccaggtgcatatcacagtgccaaggggcctttctgtgcttacagaaatgaatcagttggcatagtgaatttcaaatcagtgcttaaactgatggccctttttgtggttcaggaaatttgtgacagggtgatccaagagcaccactcatctggcaccctctgtcactcaaaaaacccctgacacacactcacatgctcatgtgagtcgactgtttcctcctggctgtgtttgtaccagtgtgcctgtgagtattgatcagggttcaggggcatcctccacaacccagagaatgaatgccctgtgtaaatccccctttctatggggagatgtgagtgagtgagtggtgaatgagcgaatattctgcttcctgattgctgcctctctgagcaaggtgtctgccccctcctaaccaccccagcatttctggaaacccttgagaacattccacttgggagctgctaaatgttaatgagggatcaggtcaggaggggcccccttgacctttgcccttgggctttgccaccctgccgttttaggagggtgatttattgaagtgaaggtagagggagtgggtggaaaggaaatcaccctttaaaatttatgaccattttctctgacattaacgtgcaagcctctggccgtgcaattagaggttgttaggcagctacaatgggaaattaattctgtaggctcccttgcctggttgtgggcagcactgctccagggcaggtggaaagtaggcttgtttcactggcctggccggaaggttgtagtgttctcctgagaagggaatgtgagctggtttaggtgtgttggggcagggcggggctcggctggggggtgggagagagacactgaatcagtgcatgagtgaccagctaggactgagcccaaagacctgagattccctgggaggctgtggggtctgccacccagcagatctgtgtcacgggagtggcgctgtcactcgttgaggtggtggcctggttcctttggccttagggaaggacaaacttcaactctgagccttgattgagtgaccttggccaagttacctagcttttctgagcctcactttcttggcaattagatgaaccagaggtttatttcactcagtaagtaatcttttctcttccttcgtcttggaggttttgaagcttctaatctcccatgggttttgtactttttcttactcgggatgtttgtttctctttgtctttaaaaaaattatttttcctcctttttaatttttatgtttaaaatatcttctattcattaaccttcatggagcttgtctgtgtgcaacttcatctgagagcgctcaggcttccctctctcctctgcccaatgcagtgctttgcatactgtaggagctgcataaatgccactggcttatgggcatctgcagttctgagagtgagggctgggggctggtcttaggagggcagctctcaggctacaaatgggggcttgcaccagcgtactggctgaggactgcctgcctttgagctaggtcttacccatccacgacaaaaatgagagaacagtacaaggtggagagtttgtcataagcttaatttattcaatttagagtcttgttctttattctagacaatgccaccacctactgttttgctgtttaaatgtacctaattttaggaaatcataattttggatcacggcagcttttcttattaaaattttacttgtagaaataaaaaggtggcacctctgtcatttacccctcaatattttatatttgactcttctgtgaaatccaaaaatgtagcaactgctgaaccccacaatgtctgatctatagcaggcatttcagagcctccaggacttgattagatattgttacacagtggtgatatgagaacacacacctgtccatcgttgagattttgttttatgtatattcctatagctgtgcaggtaaaacatgccatttagcagtgctactatggcacaactgcagggggcaccatgtagagaccgtagttggatgtggcctggagttgtgtgtcagtggccatccctcttagattgacgatgcccaggctcactggttttcaaactttgttttgcaacagaactctgctggaaatgtatgtttgtttgtttgtttgtttgtttcgagaccgagtcttgctctgtcgaccaggctggattgcagtggcccaatctcagctcactgcaacctccacctcctgggtgaaggtaattcccaagaagctggaattacaggcgtgcaccaccacgcccggctaatttttgaaaagagatggggtttctccatgttggccagcctggtctcaaattcctgacctaaagtgatcaggtcactgatcactcctcccaaggagctggaattacaggcatgagccaccacacccagccctttgctggaaatcttaaggggagttcccctattgatcagacagagcagaactgctctgcccgagtgggcgtggggcccagggcccagccgtttgacctcgttctgcctccctttctctcctaaaagcatctcccttgaccttctgtccttgtaattaattcaggtctccacagagcacactgaaaacctcaggtctagtctcatttccattttatagaaattgatggtaaaagacacatagcataaaacgtagcatcttacccatttgtaagtgtgcagcctagtagtgttaaggacactcccagtgttgtgcaatctccagaatgtttcgtgttgcaaaaccgaaactgcactcattaaacaactccccattccccctcccctcagcccttggcaaccaccagtgtgcttccttctgtctctgtgagtcttgctatcctagttacctcctggaagtggaaccctacagtatctgtccttttgtgactggtttacttcacttagtatcatgtcctcaaggttcatccaagttgtagcctgtgtcagaatttccttcctttttaaggcagaatcatatttcattgtaggtgtaaaccatattttgtttatccattcatctgctatggacactaggattgcttgcacctatggctgctgtgaattaatgctgctgtgaaccataggtgtgcaaaatgtcttttgagttcctgcttttaattctcttgcttacacccagaaatggaaatgctggattatatggtaattccatgtttaatttttcgaggaaccgccatactgtttttcatacccagtgcataattttcatgtctcattgttgataaaatagaggtgactaggaggctccaggaagaagccagagccccagaggacacagaatggcctgggaatgtattccctccatctgtgctaggtcatgatttgggcatcgctggcttcctctccccagaggccagctcttgctggattccaatgacctggttccctctttgtgcctcttcagggctaccctctggtgactgcctcccatgttgctcgtcttgggtgccttagcatccctcggtgggtcccttggctctgccttcacttctgtcaatagacctccattagctgctcttcattggaaacttttgagcatgccatttgctacctgcacatcttgtctgataaaattactagcaggatgaccttgggcacattacacaacctcactgtacctcagtttccttcatctataaactgcctccctagggttgctgatgtatgttgatctattacaaaggactgaaaacagccactggcacataggaagccctcacgtaagtgttcaccattatttgtatgattaccatatcctgtgcaaggtccctcctaagatgtaagctgccttaggtctccagggctccccctttggaatgtgagccccttacagattcagtacctgatttctgggcttcgaggcaagacagacatggccaaggggagaaaagcagtattggaaggatgctcccagacctatccaccaaagtgagacaaagcattgggtgaaccctcttctcagtaccagcttcacagaatagtaagcagctgcagcgtggggctcagagtggctttggcttctgtgcttacttagcaagtgatccatcacaagtcctgccagctccctttggaactctgtcaccccgctcagccatggacaagcagacagccacggatattatgacaatgcaagtcctggagggtttgcatctctgatatggaggagtcagagtaatccttcccactctcccccgagatgcttttcaaagaggagcctgctttgagttctgaacatctgagtctttcacgaaggaatgtggagaagtcaagggggcttttcttccctgcagaactgatgatggccatccagagggggaaaggcacgagcaggctccctctctctctctttctctccccctctttttttgggtgcaacagaaaccttgcacttcccttaagctttctgtagtacatgttaagattcctctgccacgcccaaatttcaacttttctccaatattctctttaacttagaatgaggactcaggccctaattgaattgtctttgaacagtttttgttctgagctatgaactgtatattccctttattcacccaacagatatttattaaatatttttggttgggcatggtggctcatgcctgtaatcccagcactttgggaggccgaggcaggcgatcacgaggtcaggagttcgagacaccctgaccaacatggtgaaaccctgtctctactaaaaatacaaaaattagctgggcatggtggcgtgtgcctgtaatctcagctacttgggaggctgaggcaggagaatcacttgaacctgggaggctgaggttgcagtgaacctagattataccattgcacttcaacctgggagacagagtgagactccatctcaaaaaaaaaaaaaaaaattacgtggctggcactggattctgtactgggaatgtgatgaacaaaggagataaggaccctggcctcgtttacattctaatagggaagacagccaaaagtgaatgaataagtgaatacgtaaacagacacaatagcggcaagttgtaatgagtgctgtgaaggggaaacaccgaaggcagcaaggacagcatatgcaaaggtcctgtggcggaaagggagagaaagttactatgccaaaataacaccccaggggcagagggagatggagagttggagaggtggccacagctggccccacagggcctggctggctgcaggaaagtttcagagtgcttttctgagtgtaatgggaatccacttgcagggtttaggtaggaacaatgtgatccgatggtgactggctactgtgctaatgggtctgggtgactgatttggaggcgactgaagataacatgtcaccctgggctaccaaggaggcagagaaggttggagagattttcaaggcagaattgagaggagttcctgatggattgtgatggagagggagggaagagaatttagacaatgagaaaaatcccagataatgcctagagcttttcactttctcaaacactcatcccttttccctcttattttgattaagcactatctgtcattttctttgaacatataaatatcacttggtgatagcgaagtaaaagcatcaggcatgatcctgcactagtttgtgggcatggattcagtatggacttcttacttcagggagtgtgtccccaggtcaccttggttctgtggacgctgagagcaggcctcttgtaatgcaagtgctgagaagacttagagataattagggcagcgtcttctctgcagagaggttgagccactcagctggtgtcacccagctggtcagtggcagggagccaggctgcacgtctttgatttttaacctacactctcaccagtgagatcagccctgggcagcctgtgaatctgatcgtgttaccttccattgattcccagataccctgtgttccaggcagtgccaagaaccagtgaggagcactccgggccctggtagacagaaacatccttcagagtttatggcaaacaggagagatttgaaagtggccagtatgtagggaaatggttcagtcagttatgttatatgaaaatgatggaatatttcccaaatattaggtagtggtcagaagaatattctgtaactttggaatgcatgtggtagagaaccaagtgaaaaaataggacttcgtagtatgggttgagtgtgcaatgcacttaaggagaaggacttgggaggattatactgtttcatttttcctaaatatgtctatgatgcagttacatgaaaaaggaagcatgctgtcagaacccccagttcccagtttagttgtcataatgcttaaaggccaaggggtaagagcaaatgactggagttaccaaaattcccctccgaggaagggcaggtcggcgtccttctgcaaacattcttctagccaacggaacctgccattgtggaatggcaaaggtggggacctgccgtgcgtgctgctggaagaagtttataatcaaatgtgtccatgagtccaagacaggatgagtcaatggtgttcacggaggactcttccatccccagtcataccccttaaagcagcacaaagcaagctcctgtcatcgggtcccgagtgaccacaggatgttattttggcctttggccctgtgtatttccttccctggccttgagagggctgtggagggcagatcaacagggcaaaggaagcttcgctctttgaaatatccatgcttgccccttctgggacctccctcctgggtgcacctctaatcatacgacccctccttgtcgaggaccgtcttttccgaggctctgtggcatatggtgacgatgacataggaaaagcagcttatctttgaaattcagcttgtgaattccaattctgtgaaattgtgggaatcctcaggcctttcccgaacaagctcccgtgctcttggtctggttgccgctggcagagttagtgtcttttagcttctcactcaggtggtgctttgttgcctggacaagctatactccttcttcccttttttctctgctctggagtgtttttgtggggtgaggagagctcttaaatccttctaggtcttgagatgatgacactaggagcctggtcattgtgggcaggaagtagactatagatagggccgacagatcgttgccttcggcctttgtcacttgtttaacccacttgagtgtttattaaaaatgtgagttagttcccgacattcactctggatctaggcttctcctggagcaataatagctgaagccagaagcgtctgtgcagcagctagacggggcaggttgctccgatggccccattgccctcccagactgctttcctcgttagtaccccctgcttggccctagcagccaggtgactttgggaccctgggtcggtctgtacactgcagagtgctgtcttggatcctggggctcttattgacacacagctgctggcaattcccctttggcccccgtgcaggtgaccgaaagtgactgcagcccagttagcaggggcttttccagttccatgtgagaattgtttatcctcccaactaggtgttccagcagggccgtgggagcagaagcagaattcagatgacagatagacgaatggagataaaatagagattgacttctgcattccttgctcagctttccacaccctaataaaagtctgagccagaaagtgggtggaagccctggccctttgttacctgccctttgtttcagtgccatgcggctaatgaatgccgacctccgggaagctttttccactcctgcttggcgcatgagaatacaaccagctggtccctccacagtgggctcaaatgtgaccctgcgtagtgctcctgggaggtgcatttgagctgtcctagaagggcttccagagctcgagctgttgccaagtttagaagtggccgcatgtgtggtgccagccacagcatcctattcctgcagataagcctacaggctctgtaggagtgccggcatgcacacagcaccacctgggtggaaagcagcagtcattggttaggaatttggggattttctaatctaagtgttctcccaaggaagtgcaagtcaggagagggccgaatgtgcacgagactctgcaggaaggctgaaaaactttcaaaacagtacaggcaattaatcagggatgcctgcatgggccactctctggtgccctgtgtttacagacatgagggctgggttttcctgccctgagaagagagggccgtccaaggaataggagagccatggcacaggaagtggaaagtcagtctgggatgtaaagttggaagtcagggtcctttgggtcctgtatcctgactaatgaccccaaagatattctgggtggcatgtgccagcctccttgccaagtgtctcagagcctgcagagcaccatccatcctcaattcctttaataacctgaggaacctgtcatccatttaggaatcaatactttggtttttttttttttactattatttctgcttacctcaccttttgggggaatcattccctccatttttatccctggtgtaaacttccctgccctctggcagatgtcattgttatccttgagtatttatgcagttctgatgtccttactgagtgctgaccctctgcatgcaggtatctaggtgtggttggggtgggtgcatcaaaaaggctagactgtgtgcagctgcttctgcacacagataactctgacacacacccaaattggcatagagactggcgctggggggaaggatgtgaccaataggaccagactgtctacctgggttcaaatcctggctccaccatttcctggctgcatgatccggcactaggtttctcatctgttagtggggataagggtagtacccatgcggagggcagttgtgaggagtaaaagagtaactatactgtaatcccagcactttgggaggctgagacaggcaaatcgcttgaggccaggagtttgagaccagcctggtcaacatggcgaaaccccatccctactaaaaatataaaaattagccaagcgtggtggtatgtacctgtaatcctagctactccggaggctgaggcacaagacacacttcaacccgggaggtggagtttgcaatgagttgagatcgtgccactgcacttcagcctgggcgacagagtgagactctgtccccccaaaagaagagtaactgtaggtgaattgccagcgtggttctgggcagctgtgaagccctatgaaagtgtgttggtggttgcctttaatatagaaggcagatgagcttgtagtcccagctacttgggaggtcaaggcaggaggatcgcttgaggcctggagttcaagaccagcctgaacaatatagtgagaccccggctttaataaataaataaataagcaagcaagcaagctgagcgtggtgctgcacacctgtgtttccagctactcgggaggctgaggcaggaggatcacctgagcctgggagattgaggttgcagtgagccctcatggtgctactgcactccagcctgagcaacagaaccagaccctgtctctaaaaaacaacaacgaaaagaaggcagactgtgatggattctatacggaagagataaatgccctgctgtggaaatgtagaggaggaaaaattagtcctgacaagggaggtttttaggagaaaggcagattgaagctgcccctggggaagaaagttgtaacaggcagaggaagcagctggaatgaggtagggaggcctgatggtatggagtctgcatgctcagggctgcctgctgtggccagagattcgggtgtgtgtattgtggaggggattgcagggggctggggaagcagagatcagtctgcagtggtgggtgaagacagccagtcgtgttgcacgtgggacaggggccctggctgggcaggcagggggagcccagccctgtcactggccattgatcccaggccttgaccaaatggggtctctaatccccaagggtcccggtgggttattaggaagggcagatgagcccctgcaggggaacgttgtgcagtatggcaggcgcaccccacatgggtgtgtgatcctttgtttttttgctgcaggctccataatgtcatccggtctttctagcctcctaagaatgaggttcctagttcttacctaatttctcttcaatttctcatgcactgcatcttcccgctgtttatttaatgtacatgttgtctgacttcatttggttctgtatttcacaaccagtctgattgctcttgtcccaagtcattgctttttggggtgagggctgatgtgttgttgaaagtctttggcaatgcttaattttatggtatgtgcaatgctaattctgcctttagtaatttgatgacagagacttcttgggaaccacagccagggagccaccctttactccaccaacaggtggcttatatccaatctgagaaagaaagaaaaaaaaaaaagtatttctctggctttcacttcatttgacaggtgagctgaagctattgtgtgtattctcttagtaaagtcagttcccacagttccctgggggtgatgtggctttgaggtaagaatgaggtaacagacttaaatgtacatgattttattgagatagaattcacataccacaaaattcacccttttaaattgtaaagtcctgtggtttttagtatattaacaaggcagtacaaccatcaccattatctaattctacaacatttcatcatccccagaagaaactccattagcaatcctctcccatcccctgttcccttaccctctggcaactgcttatccacttcctgtctgtggatttgccttttctggacatttaatatacatggaatcagtgcaatacgtggtgttttgtgtccaattctttcacttagcataatgttttcaaggtttattcacattattggtagtactgcattcctttttatggcttaataataattcattgtatggctgtaacagattttgtttattcatcggtcagtgaacatttggttatttccactttttggctaatatgaataaggctcctccgatcactcgtgtataattttctttgtttttctttcttttttcttttctttttttttttttttgagacagagtctcactttgtcatccaggctggagtgcagtggtacaatctctgctcactgcaacctctgctgcctgggttcaagcaattctcctacctccgcctcccaagtagtagggattaaggcctgcaccaccacgcctggcttatttttgtgtttttagtagagacggggtttcaccatgttggccaggttggtcttgaactcctgacctcaagtgatctgcctgcctcggcctccctaagtattgggattataggcgtgagccaccgcacccggccttgtgtataattttctgtgcgaacgtgcatttttgattctcttttgtatataccgagaattggaactgctgtgtcgtgttgtaactctaggtttaacattttgaggaactgctaaactgtcttccaaagcgactgcaccattttatatttccaccagtaatgtggattcttcacagcctcgccaacacttattattgtctctgatggtaggcatgctaatgggtatgaagtggttttgatttgcatttttctaatgactaatgatgttaagcatcatttcatgtgcttatcggctatttgtacatgatctttttgataaatgcctgttctcatcacatcctttgccgtttttaaattattagttttttaactgttgagttgtaagaggtctttgtattttctggatactaggccagatctgtcatttgcaaatgttttctgtcatcctgtgggttgccttaagtatacattcaaactagtacctttcactagaatattatgctcttggtcagccacaaagggtagtgctctgaaactctaccaaagaacagttgtatctttgcatcaccagcacctgggtgagcacctggcataaagtaggaaccggtgatttgagtaaataaatgaatgtttctgtttgccaccttttgagagtaaaaatgggtgtggtaagatagacagaaatggataatgaattgctgagccaaaccacagaggcaaagatgcaggattgcatgctaaagcaccttgtatctggctatgatgttcaagatcaatgaaagactggagtgcagatcagggattgcacctgtgtttctgatgcagtaaatatacttttccgaaatcaatagggtgactctgcagagccctgtaaacatggtgtaattactgtgctgagaattacagttgtcacatatcgattctgtcttctcagcaggtattcgtacatttcctcctgcccctagtgccactctgccccatctccaaaatctaattcccattgaccgcatcacactgctgtgtccaggagggaagaggggatgtaatgtagtgaggggacttcagctgtaccttcaccttggttgaggaagaggcagctgagtgagtcacagatttagggacaaggtggcacaaagttgctctgaaaattagatcaaagaatcccaagaagtagataggcatcaacctcagtggaagctgcctcgggaaataacctgctcaaagaaggatttctcattcttcagagtagactaggagggaggcttccttaatcctggaaacaaggcccaggtcatccctgcagaggaaacatctatatataaagtggctaacgtaagataaactgtcatcttagaaagcatcattcactgactcgctcattcgctcactcgtttgttctaaccttcactgaatagacacttgtgttcttggtgtgttgcaggagggaactatgctatggctggggcgatgagtgaagtacagcctctgccctcgaggagcttgtgttctcccaggagacacaggcagtgaggctagagtgcagagatgaaccaccagaggtggtgaatgcggtggggggaggaatggtgtcaggcctcttggggaggcttaggagagttacccacaggaagggagagcctgccaggaggagtaggtgtttgtcaggcagaccgggtgtgccaggcagaggggagccgctcatgttggggcctgcactcacagaactacagggcgtggaagggaactgcgcgaagcctggtatgatggaggcagttggctgccacccaggagtggggaaagtgaggttggcagtgggaatttcccacctctgtttacctctgctttgagggggtggggctggcaggagattccagagggagcatcccaggctctgagggctggtctcagtgtgggtgggaacacttcccacactgctgtgactctggggtgattgccgtgctcctgtatccgaacacccgtctccatccaacagtgtcttgtgttgattcgtctttggaactatatcttccttctgaggtggaggatgggaatggattgattggaacagtgaatggttctcagacttttcattctcaggactcttacagatactgaggcactccacagatcttgtttttaaataggggtatgtctatggatatttactgtattagaaattaaaactgaggatacacaggtgtgtgttctgttagccacgggcgatgtcttcacagagcatgtagaaacccccgctcatgagggaaagattgagaaaggcacatacagtctgtgaagatagttttgacctcctagacctctctgctcaagggtgttagagacagacccctaggggtttctgaaccacgcactgagaattccattggattagaagctgtgcgggtgcccctacgttctcacttgtctctgagccctttgtgagtttctcaggataaaccatccacccatggaagtggcagatcctgaatgccatctgcaggacgggcactgtgctgagcctcagccaggcggagatgggcgggtactgcacagagtgaggcagtcagaagtcctgccctctgcagtttccaggggcccaacattcaataaattgttgcagaagcaaatatttacctcaccactgggagagggctgtgtgggagagtgatgaacagcctacctggtcaggtgccccgcaggctttcctgagaagtgaatccaggcgcagaaggaagaggaagtggaagttggtggggaagaggaagtggaagttggcggggaagagtgttgcaggtccaggaagtggcccatatatgatttttatcagggtggagcccctgtggttagagcccaatgagtgaggggggtaaagatggggagaggggttgacctgcgaagcaccctctgcttcctccttccttctccaacagcaaggatccgaggggaaggagtccatcactggcctagacaccataccctgaaccgccccccgtggtctcccgctgctttctgccactgcccaagggctggacagcaccacccctcctaattcctaggaattaggcccttcttggctctgtgccctgagccatgttctcctcttggccttgggctctgatcagatgctcagttgtctcccttctctgcttccctcacttgccagggtcaccttgtcgtcctctgcctcctattgtatatatccctttcataagaataatagcccatcctcacactgtgagccactgttgcaggtgctccacaaacattcccaccttcagtcttcaccgcacccctgtgggcttggtcctgttgtcgttctcagcttccacgtgaagaaactgaagcccagagaagttaaacactgcacacaaggccacatagccaagatgtggtagggttgggatttgaacccaggccaacaggcttccatctagattcttaaccactatgctgggctgcttttcattctatgtcattttctttttctttttttttttttgaaacagagtctcgctctgtcacccaggctagagtgcaatggcgtggtttcagctcactacaacctccacctcccgggttcaaccagttctcctgtctcagcctctctagtagctgggactacaggcgtgtgccgccccacccggccaagttttgtatttttggtagagatggggtttcactatgttggccaggctggtcttgaactcctgacctcaggtaatccaccgcctcagcctaccaaagtgctgggattacaggcacgagccactgcacccagcccattctgtgtcattttctttccagctgtggaccatgtatttgtatccctaggctgaacacatagtaggagctcattagaaatttgacacatgaaatcatctttgtattccctcttcatggccatcatgtcttgtgcatataccattaataaagaaacaagtaattggaccaataagcaaaacaaacagcagtgactgccacgtattagcgtgtttggaatctgtaattaccagctttctttagggcagaggtgtgagttcataatgcctagacaggttctaaaaccatcctggtccctggtgaatatgccaacagaaggtattgtttttactattattactgttattaaaagcaaaagcctcttgggatgtgtacattccaagcccagggctggggctgttagttcccagcaaggacaagatgaggagggagtgattctcaaggaggtgatcagaagacccatcccctgggcgtgcactggggtcagaggccagcttttggaaaaggaaaatgagctaaggtctggctattgtaattcccttatctctgacttcctgctgaggctggttggtttctggcgttctacagaattccctggtggcttctcagcagcaggcctgagacccagaaccagtgatcatgtttgtgagcaaatgactgaggaggatttgatgcgaaatgggctgtgagtgttggggataaagcgtgactctcagttgtgctactttttaccacttctgggcagcctcagttggcccgctctgtgggtttttccctccagctttgcagatctgcaggcatatttatttgtgagtggagtaagcggaatttttcaaagagaagcagtttgcaaaagatgaaaaaacaacttgggataaatggctcatctggcaatgggaaatggcctccggcattgagagatctttagccttgtctgagcaagcagaggggaatttggcttctgtatcatcttagagaaagaacctttctgcctccttgctgaggctaggccctggggagaaacagcctaaaacccccgacaccatttgagaatttaaaagtttccctgtccagtcaacttttgtgcccctccttgtccaagcccccatgatctctgttccctggacttgctgtggccttgccttgccttcttttttttttttttttcttttttttgcgatggattctcgctctgtcacccaggctggagtgcagtgatgtgatctcagctcactgcagcctccacctcctgggttcaagcgaatcttctgcctcagcctcccaaggttgggactacaggcgcgcgccaccatgcctggctaatttatttatatatatatatatagtatatataatatatagtatatattatatatatactatatattataatatatatatatatttttttttttagtaaagacggggttttactgtgtttgccaggctggtctcaaacccctgacttcatatgatccgctggctaggatgacaggcatgaaccaccggacctggctgcctccttgacttctaactgaaaacccttctgtctcttctgtagatttcagccgccaatgtggtctcaaaagtacagggcaaatccattcccatcacacctgcaatcaaagcctccggtgcttcactcagagtgaaagctcatcttcctgtggcccatgaggccctctgtgatggggtcagtctgccttccccaccttctttcctggtggcatcttcttgctttctcagctgcagccacactggctctgttgttcctcacatggatcaagctcagttcccacctcagggcctttacattttgctgttccctctacctggttcactttccccagatatcctcctggctctccttcatttggttcagggctttgctcagatactaccttatcagaaaggcccttcctattggccttatgtaaagttgtatccctgttgtcatgcctgtactctgtcccccatactcagctttatttttctccatagaacttagccccaccagatgtagtattaatacatgcttcattaattagatatatagtttctgtcccactacaccaaaatgtaagcatcataaagacgaggacttcattcagttcagtgctatattcccagtgcataaagcatggcctggcacataacaggtactcaccaggtctttgtcatataaatgaaagggaacgactgagtctccatatacatttgatccatgaacaacatgggtttgaactgcatggacccgcctctatgcagatttttttcaataaatatattggaaaaattgtttggagatttgcaacaatttgagaaaacttgcagatgaattatgtagcctaggaatattgaaaaaattaagaaatttaggtatgtcatgaatgcatagaatatatgttgatactagtctatgtattaattgactgtttatgttattggtgaggcttccaattatcactattagtagttaagtttttggggagtcaaaatttatagtcagtgttttactgtgtgtgttggggtggagggtgaccctgtcgcctgtgttattccaggatcaaccgtacttcattttgtattcatctaccatgtgtctggatcccacactcactcagcatttctgcatttgatgtcatggagcaaagatgggcactggatttgggcagccccgcgtttgaatgccgcctctcccatttcccagtcgggtaatgctgggcaagttaacttcctgtctgatccttcatttcttcacttgcagaatggagagcatatgcctcaccttgagggctgttggaggaatggaggtttgggtgctcagtatttattagcccttatactacattaatttggtgttaggcaaacagaggaaagccttcttaaaaaacagctttaccaagataaaattcatatactataaaatttgccccagtgaaattaaaaccacaatgatatagataccaccttacttctgcaagaatggccataattaaaaagtcaaaaaacaataaatgttggcttggatgtggtgaaaaggggacactttcccactgctagcgggaatgtaagttagtacagccactatggaaaacagtattgagattccttaaagaactaaaaggagaactaccattccatccagcaatcccactgcttggtatctacccaaaggaaaagaagtcattatatgaaaaagacacatgcacacacatgtttatagcagcacagcttacaactgcaaggatatggaaccaacctaactgcccctcaaccaaggagtggataaagaaaatgtggcatatatacaccacggaatactactcaaccataaaaaggaacgaaataatgtattttgcagcaacttggatggagctggaggctgttattctaagggaagtagctcaggagtggaaaaccaaataccatacgttctcacttatgagtgggagggagctaagctatgaggacacaaaggcatatagagagatataatggactctggggacttgggggttggggaggttggaaggcgggtgagggataaaagacaacatattggtacagtgaacactgctcgggtgatgggtgcaccaaaatctcagaactgaccactaaagaactcgttcatgtaatgaaaaaccactggtactccaaaaacgattgaaattttaaaaaagaaaattataggctgggcacggtggctcacacctgtaatcccagcactttgggaagctgaggcgggcagatcgcctgaggtcgggaatttgagacaagcctggccagcatggtgaaaccccatctctcctaaaaatacaaaaaaattcgctgggtgtggtggtgggcacctgtaatcccaggaagctgaggcaggagaatcgcttgaacctgggaggaggaggttgcagtgagctgagatcacgccactgcactccagcctgggcaacagagtgagactccatctcaaaaaaaaaaaaaaaaaaaagaaaagtataaaaaatatacacagttcagttgtttagtgtattcatagagttgtgcaaccattagcacaattcaattttaaaacattttcatcacccctaaaatggaacctcttactcactagcaatcactttcattatgccctccctagcaggtgctgccaaacactaatttactttctgtgtctatttgatttgcccattcttaacatttcacgtaaacagaatcatacaatatgtggcctttttttgtttgttttgagatggagtctcactctgtcatccaggctggaatgcagtggcacaatctcggctcactgcaacctccgcctcctgggttcaaaagattctcctgccttagcctcccgagtagctgggactataggcgcgtgccaccatgctcggctaactttttgtattgttagtagagacggagtttcacgatgttagccaggatgctctcgatctcctgacctcgtgatctgcccacctcggcctcccagagtgctgagattacaggcgtgagccaccacgcccggccttatgtggccttttatgactgccttctttcaccaccatgatgtttgtaaggtccatccatgttgtaatgggtatggagacaccacattttgttcattcaaccattgatggacatttgggttgttaccactttttcactgtgaagaataattctgctctgaaggtttgtatacacatttggtgtggacgaggcaacctcttattggatacatccaagccagttccgggatgccttctctctgtggtgtcccagatcgtcctgtagctcctaaactcgttcctttcaaattaagaacatattttgagagagctattttacttatctcagcagacattcttttgatacaggagtaatttattcttttctcactatttcatatgactagctggttattcacttgattttgccacctgcagtaccccttctttgctcatcctacaggttgtctcttatccaaaatgcttgggatgagaagtgtttcagattttggattttttcagaattttgaatatttgcattatatatagtcacttacaagttgagcaccccaaatccaaaaatccaaaatctgaaatgttccaatgagcatttcctttgagtgtcatgtcagcactcaaaaggatttgtattttggagcattttggatatcagatttttggattagaaatgctccacctgtagcctgatgttccggatgcctctgtcagaccatagtctgctcaaccatgaggctttattttactccgctctcaggacgttactctctcccttgagtggcccttttctgaatgaaatttgccattctgctccgagaggacccttgactttaagcatacttgtctgaaacgtgatttttgaatacttagtttatctcattctagtcaatttatctcctaattgcattatctattatcccagtagaattatgaagcatttgtagaagattcattaatttttggctgcctgctggcaaggatttgataacaaaggcatagtcaggactgccttggcaagtacttgtgtttgaacttttgaggctttctcttcccattttcccaaaggaaggcttgattttcctgattttgcctgaagggcataggcaatagtggcgtgttgtcttgaaggagagggaagaatggtggggcagaagaacagctctctggttctactctgaggaaaggaaaacagggcatatgtcaggcaatgaggttgattaaaaacatctcagtccaaggtgtgtgggattccagagatgagtcatatctcacactcataggcacttttcagtgtattttcccctacagtgtattgcaaatcctacctcagggcctttgcacttgctctctggcttcattcaggcccctgcttgtgggtcttcccatcagagaggccttccctgaatacccttcccctactcatctgccacctttactcttagtcgccttacttggctttgtttttcttcacatattgccatctagcataaaatacatttatttacttattgtcattcctcaccagaatgccagctctatgagagcgacccattcactgttacatgtttaaagcttgagatggttctcagaacatggaagggacccagcacatgtgtactgaatgaatgaatgcatttgattttatgaaaaccctgggacagaggtattataattcccatcatgtgggaggaaacctggactcagaagactggggagaattattcaaggtcacaaagtagtcgctgctgagtcagaagttgagctcagctcttctggtcctgatgcagccatctcaggctcgcagggcccaagaacaaactctggcggtcatacagacaggctcagaagatgccgcagactgcagcgggaggtagcatatgaggcagtgactagagtggacattttaagaattacagagcggccgtgcacagtggctcacacctgtaatcccagcactttgggaggccgaggcagatggatcacctgaggtcgggagttcgagaccaacctgaccaacatggagaaaccctgtctttactaaaaatacaaaattagccaggcatggtggcacatgcctgtgatcccagctactctggaggctgaggcaggaaaatcacttgaacccaggagacagaggttgcggtgaactgagatcgcgccattgcactccagcctgggcaacaagagcgaaactccgtctcaaaaaaaaaaaaaaaaaaaaagagcaaggatttcctgtggcctgagaaagaaaacaggaaacaactgaaagctggccaaacagcaatgggagagacttggtgctgaggagggaagtggagccggggaaggaggagagaatgagaggtggaaatggctgtggaaggtcctaagcccaacggagagcccagcagtgatgtttaggagcctcttggtgatctcaggctgtccagtgcaccccatccccagcagcacaccagatgctttgttcctggaccaaactgagggtcctcgggctgcttactttcacaacccaataacgagatgcagatgagctgggaaaggagagagtttatttctggagccgggtacagggagaaggcctggaaaacatcgccagaccaactcaaaattacaaagttttccagagcttatatactttctaagctgtatgtctgtgtgtaagtgtgcattcatctgaagacataagtgattaacttcttccaatctgtaactaagatctgattcctgaagaccttcctctggagcctcagtaaatttacttaatctaaatgggtccgggtgctgggggtgattacccttgtctcctgctaaatcatggaggtttggggagttccttcagacccccaatacacctgtttaatcctaaataggtcctgttaagaattcctttgttatcttgtcgtgcttcgaggcccgggaaagtcctaggcaagatgcttggtgggcttttgttgcattccagcctttgtatatgggcactggctctttcagctttcagcttttaatatttaacttcaccagtcagtcagtgctgagacagttattatggaggctaccctgttcagctgttagggagaccaggcctgccacagtttctctctcgtgagggtttaactcggggagggtggggggggggggcggcagcagcctggggctgattaactcctgaatgttgtgctaatgagaaagtggtgtgggtagtgagaaccaatgccccaaataacatttcatctgattggatcacaccgtgggattttattgcagtagatattaattgtattctgtccagaactggttccttctggtgggttcttggttttgctgacttcaagaatgaagccgtggaccttcgcggtgagtgttacagttcttaaagatgatgcgtctggagttgttccttccgaggttcagatgtgtcaggagtttcttccttttggtgggttcgtggtctcgctgacttcaggagtcatgccacagaccttcgcagtgagtattacagatcataaaggtagtgcagaaccagactgagcagcagcaagatttattgtgaagagcgaaagaacaaagcttccacggcgtggaaggggacccaagcaggttgccgctgctatttcgggtggccagcttttattcccttatttggccccgcccacatcctgctgattggtccattttacagagtgctgattggtccattttacaaagtgctgattggtgtgttcaccatcttttaactagacccagagcactgattggtgcatttacagtcctttagctagacacaaaagttctccaagtccccacctgacccagaagctcagctggcttcacctctcagtatgggtggggaacctacttgttttcagtttatgaaagtaggttttcaggaaaagcaaacctgtggtagaaacttgttggaaatgtaatggaacctggaatgttccattaatcacaagacttctgtgtgattgctcagagctctaaaagtagatacaacggccttgtcatctgtaattttttttttgtttttggtcatttttaggtgaaatatttgatagtgctttatactttctaccctttttagggcatggtaaatgtatttgttggactgacagctactgcaagaagcaaaccctcacatgcatcattgctttttttttttatgctcaggtgactccagaacaggttttactaatatgtgggcagctctgtgtagtagctcttgccatgttagtgttgctatatttagttcctcctattcaaggttgctatgcttgtcggcatcaagcaggaggagaaaagaccctggtggaaggggcatgggaagtcttgtggaccaggccggaagtggcacctcattggccacagctccgtcccatctctggtagagaaagagagttgagcagtgtgttgggaagaagcagaagcaagctgggtactaacatcctttaaaattagatagtttttttttttttaatgtacttcgagtatgttctagaaagctatttccttggatacctcccttttgcgatgaagaagtggcagctcacagaattgagtgacttgctcagggtcacagagcgtcaggtgacagtgtgtggtctggaatccaggccttatccattaccttgtcccgtactttgtctttccacgagtttttgagtgtggccagcagtcctacctctagacttttctgcgtgtgccatgccagcttttgggaggattacagtcatcaccaccatctgaagaggtactggggacctcagctcccccatgacagcaaacatacccagggagagggggctgtggggatactcagtggatgattagggtttttagaatctgttgggaaggggaagaggtatacattaaaattgagtgccctagagaacaggagaattggagagaagacacatgattaaagagaaacgcatatgcagacccctctcccaccaccagcatcccagtgcttgggaaacccaaagccaagccctggctcctcagggatccccaaaggaaacatttatccccctggatgtttggatgtcccgtaatgatttagaggcctgagatcctgctcaaatccctggattctatgtggtattgaagaaggacttttaaaactagacctgacaggtccaaataaatatcctccattgtgaggaacaatctcatttgggcctctgaggctctctaaaaatatccttcattgactgttcactttagaatccaggattgagactcccaccccaccccctaacttcccttcccttttgtttttctatgttgcctgctcatccttcctcctctcaccagcctggccttgcctagggagtgggagttggcagggcttgcctaccaggagggttttgttgagaggcaccaagtccaaaggaatcttttgtctacaggtgcacttgaattgtgggcagccagcagggtgtgtgtgtgtgtgtgtgtgtgtgtgtgtgtggagggaaattcgtaggagtgagtgtgggtgtgcacacctgctctaaattgcttctactgccagaatgtactcctggagggatcaggaaggagtaagcccttagtcgattgagccagtccagccctgaggacattgattccagctccttgctttcattgaagggaggagagaaactcaaataggagccctcaaggagattgtgtgaagctttctgaattcggtgtcattttcatgcaattttgttaagaactggtgtatttcatcccctcctggttcattccgtgagtcatccagaaggcatcagagcctcgtcattttggcagccgcagggcatttgtgcccagcgaattatgggcagctctgatctgaagtaacaaggttgagtcgagataggttgagaaatgacccagacagaaacaggggcctcggctggcagccccagccacaccataactgcacccgtagctcagatgaggtcaggacatttttgctttgtgacagatttgggacgcagagaaaagagttcaggctttgtactgaccgaggccagcactgacaccagtgcagacaaagaggtttgtagccaggggagtggagggacggacagctcagattttagctgacgatgattctcatggcctgtgtacaagttcccactaatgtatcatcagtaccagcatctctgaggaagatgtttttcccactgtgcacaatgcaacatcactgtccccagggtacatgggacagaaaaatccctgttagaactgggcacaaaactgcgcttctgaacatttcaggatatgatcctttcaggatactgtgtctagcacccaaattttgaggactcaagttttcattaaagcaacaggcagtgatgatgatgtgctttccaaatgcaaattgtaggaacatttaattaaatgggacccttaggagcagtaaccattctcagatcccagttaacctggtgtattagaatgtctcagcagtggaaggaattcatgcctgggctttggtgatgcttctcaaacagagcatctggcactgttcgtggaaaaaggtgatttcaacttgaagcagaaagataaggtggcgctttgtagaatgtaaaaaagtctaaccctagcttctgcagagagctgggctgctgcaccaattatgttgtgtggcattttacttccaaagggcagctttggtcatggaggagaagacaaaagcgtggtgcagttttttggggatttttttttttgacagcaagagagatgagatacaatttgtatttttgaactctgctttcagataactttataaagggctttaaaactgtctttgtaaatgatccagaagagttaggctctaaagaagttttgaaatacctcattctatttgtgctgctttttatcctttctaaaaaaacaaaaagattattagatggtaggaaactatgtctaaataaacccagtgagttgttacatttttattcatttaaaatattaaaatgacaataagagaggtttttagttatcagagcatgttgcagaggtataagaggaagcagagagtactgttttctagattaactgctctacacagaaatgaacagcagtatagattaacccataagagtccaaataactccccctgcttgaagctttatatggtgatctgtggtagaatgtccctcctctggttatgcttttctttggctaatagtatcatttgtctccccacctctcctgtaggactgaggtgccgttgtggggacataacgcagaagcgttgccacaggataaagacagcactcgacatataataaaaatcaatatggataagacacctattacacagataatcccatatgaaataaattaaacccgttttacagatggattaattgttttgtccttgttctgttgacttccagaccttgttatctctcctgttttcctggatcatattgtctctcaaatatcaatagcacagtttttggctgtgttgttttcaaacagcctacttttggggaaccacgaggacgtagtggcaggactaaaggtcaaggtcacttcagtgttctcccaaatcccgctggcataggctctttccttgtctgctttgtctgcaggattcagcaccaagagctctcaagagcaaatccacaggcagctaaatcaagaaggtggctctcttccctcctctttgctcccctcttcctgcagagatgcaagatggctttgaaatgtccctatcttccttcccttctgattgccttacttgttcagatgcttccatcctgaacattttctagagtcccctgcctagtcgccctggaaagtacccagggaagccacttacggcctatccatcaaagcacagtgcgtgtctcctttctcagacagaggacgtaatcatccatgcccacagaggagagcgtgtgccctgagtttcagtgccggatcagagactggaaaagtctgtatgccccctccctaccttacagtcttttacttctccacctggggaaaacagcagatggaggagaggaaagagaagtttagctggcatcattaaaatgactttctagtctcctgcgagctttctctcaagtagattctgctgagttctgcttggactggtaagcacagagagtgagtcatagagtggccctctagaatcctccagcctgtgcttattatgcagcatggaggtgtcctggctagaacagggcctctaatttatcatgtcttctcactaggtgaggtgaatagggctccacaaaccaccgtggggaccagtggcatcaaattctggtgccaaaaaaggaagttccatcacagacaaggagtgagaagaagccagggtagaaacaagcgacccctgcttccatgtgaagcttcattccccaacccattcttcagacagagaaagggtgcacacgcagacccgcaagcacagccttcgcacgtgtgctcacacagccgcagtatttacggcactcacgacgtgtccagcttctttgtgcgctcacagcaggcactgcactgtccgtggttacccttagggtggcgctgtttattggcgcctttttgcttggcacattctggttcctctgcatggagtctcctttctctttcccctacccaggggatctggcaaactcgtgttgctccatgtagagtcagctcagaggtcccttcctctcagaagccatctctgcctccacctacctccaacacaagagtttgctaacaggtccacactgtgtttagcactgtcaccttgcatcattttttggtgtgattgtatctgttgcacatacacctgtgtccccgctacacactttgagaggtaaagctcatcttttcgttgtatacagcacatgtacagaaatatgtgcctggcacataaaggcaattagtagatatttgttgaatgaatgagtgaataaatcattttttggggtagaagtggtgtagaatatctgactactacatgtggatactaagaactaattgttgttgtggagtaaaatttcttgtgtttgtctgtatatatataattttttttttttttgagatgaattctcactctgttgcccaggctggattgcagtggcacaatcttggctcactgcaacctccacctcctaggttcaagtgattctcctgcctcagtctcccaaatagcttgggttacaggtacgtgccaccatgcctggctaatttttgtatttttagtaaagtagggggtttctccatgttggccaggctggtctcaaactcctcacctcaggtggtccacccaccttggcctcccaaagtgctgggattacagacatgagccacagtgcctggcctcttgttacaattattgttgtctttctatcaaaaacattaccaaaatctccttttacttcataacactcataagactccatctatagaattccttttctggtagaagtgctcccttgttgggcctggcatcttatgggctcacccttatattctcccaagagaagtccccatttttcagtggaagagatctagctatgtctatggtttcctggtggcgggggctggtccacagacctagaatgagttgctggggaattgggtagggtgagccctttgcattgctgggtagaagaaaatttgacctgggcgcagtcatcagtttggactctaacttcctagctagttctgtgtgtgtcaaaatcctccagcataacatttgccatgatgagcaaggaagtgtagtgttttttcccctcagcgaaatgttaaaaggcaaaaaggctatttctgctcacccagaaaaacattttggctctagcagaaaacaaaacaaaaaaaacttacagccttaaaactaaaaagaggcattgaaatacagtaccttctccccacgctgttcaaaacacttcgtgagcaagcacatgtagcacatgtaggagagaggccgagtatgttctgaactaatattttagtgtattatttaaaatctggccagagcacagcatatttgcatgcctgtctttgggctctgtttctaaaacaaggagagtggtgatgaaatccgcagctggtgtgctggccccaagcctgggcagtttgggctccatcacaccctggagcagccagcaaagttgctggagccgctgatgggaggtgcctttggggtgggcagagttgtggagtcctctcctttctctgtagtcaacacacgagagtcaacatggaacttgaggtctgtgagcgtttgctgagcctgtgaccaggaggtgctcctggagaatgaaagcgggtaggtaggagacaagtggtatccagctcccagggactcacaaggagccctaatgaaacaacatggttctttcttaagtggacccatttctcccattactccttcaaacctctgggtttcccctgaccaaaaaacaggcatccagggtgtatcctgccactgtgcagtgccctgctttggttagacagtgcccatgtgaacatgaagttttccttctgacaggcggcagtcttctcaggctagaagagtagacagagcttccacctgtgtacaaggggcgtctgccgtcctcatgctactaatgcccaaccagatgaagggtgtgtgtgtttgtgtgtgtgtgtgtgcatgtgtgcaaatccttaaataggtataggcatatgtagtcagtcttcattatttgtggtttctgtatttgggaatttgcctatttgctaaaatgtatttgtagcccccaaatcaatactcacggcacctttgaagacatgtgcagggtggggaaacatttgagttgcctgaagtgcctgttcccagctgaggtcaaacaaggtgaccttggccgggcgcggtggctcacacctgtaatcttagcacttcgggaggccgaggcgggcggatcatgggatcaggagatcgaaaccatcctggctaacacagtgaaactccatctctactaaaaatacaaaaaattagccgagcatggtggcaggtgcctgtagtcccagctactcgggaggctgaggcaggacaatggggtgaacccgggaggcggagcttgcagtgagccgaggtcgtgccactgcactccagcctgggtgacagagcgagactccatctcaaaaaaaaaaaaaaaaaaaaaaaaaaaagcaacctcttccttcttgtttcagctctcatgctgtaaacaagtatcctttttgttgtctatttgatgtcatattcttccatgtttttgtgcttttgttgatgattttactgtttgaaaaggccccaagcacagtgctgaagagctgtctagtgttcctaagcacaggacacctgtgatttgccttacagagaaaatatgtgtgttaaagaagcttcatgcaggcatgagttacagcattgtttgccatgagctccatgttaatgaatcaaagatatacattaaataaggtttgtttaaacagaaacacacttaacacaaggttatgtggtgatgagttgatgaaaatgttgtgaacagaggctcgcaggaacctaaccctgtatttcccctagcagcagtggctccgtattcagcagtggctccgtattcaacagttcagtgtttgtggagactttctagaacataactgcagtttgagtatccctgatcagaaatgcttgggaccagaagtgttttggatcttggatttttttttatgagtttggaatatttgcattatattccttaccaatgagcatttcctttgagcgtcatgttggcgctcaaaaaactaaggattttggagcatttcagattttggatttttggatgagggatgctcaacctatatcttggataatgagaattgactatataaaggggtgagggagagggttttatgtagagctctatacctatgataccatattggaaaacgtctaccatatttgaagtcgtatggagaagtctccattaagagattataccttcagacaggtggctgcgctgggttgggaggtggatatgggagatgagggtgctgacatgaaccaaggtggtatggtctgaatgtttgtgtgaatcctaacccaaggtgggttagatttcaacagaactcgaataggtcatgatggaggagcccccatgatggggttagtacccttataaaagaggccccagagaggtgcctcgccctctccatgacgtgagggtacacctaggacatgccatctgtgaaccagaaagtggccttccaacagacaccaaatcttctggtggcaccttcttttggacttctagactccagaactgtgagaagtaaatttctgttgtttataagccacccaggctgttgtattgttacaggacctcaaacagactgaggctcaaggcaccagggaaacgtgctgaccgatcgatcttcagtacggtggatttattagaaagggtgctgcagtgatgagcccttgtcctccaggtcaggacagaggcccagggaatgcccttgcgtggcctctggtgtggttcctggtgctgcctcggtcctccaggtttgactgtggatgaactgcccctctgtccacacatacatagaaaaggacagtggggccgggcatggtggctcatgcctgtaatcccagcactttgggaggccgaggcaggcggatcacctgaggtcaggggttcgagaccatcctggccaatatagtgaagccccgtctctactaaatatacaaaaatcagctaagcatggtggcatgcacttgtagtcccagctactagggaggcaggagaatcgcttgaacccgggaggcagaggttgcagtgagccgagatcacgccattgcactccagtctggcaacagagcaagactccgtctcaaaaagaaaagaaaagggcaacgggcagtgccctggggcaggggaactgaggcaaaagggtggggattgcaacccctctgctctctcatttcccagagaagaagtggtcttggatatccaaggaacgaatgaattctcaggtgcctgctcctcccaggcacttcacactggatgtctttgaacttgacggcagccctctgagataccattatctccattctgctgatgaagagcaggcacagcgaggttacctgcattgtcagaggacacacagctagtaaggggtggaatttaaattcaaacctgtgacaagtcaagatacaattatctttagttggtggctgactggaaaaacagatgcaacagcaggaagaaggggggctgaagctggtgtattgtctgagtgtctaaaatcatggtgcgtttgaagggaatgaagttgagtgagcgattgcaggattcgagggcgagttagggcagagcttctcaacctgggtgcttttgcacctcatgacgtttggcagtgtctggattcatttttggttgctgtcataacagggttggaacacaggggaagtgctactggcatctagtggggagaggctgcggatgctgtcaagcctccatcggtgcacaggaccggcatccacaacaaagaattatccaaccccaaatgtcaataatgccaagcctgagaatacctgattaaggggaaagcaggctctcgaagtggtttgagttgggagcatgttatgggctgaaaagttacaaactatatccagaaacttctataaaggtatttccttctgatgtgccatcattcctggctcaaaattcacttttctttctacattttctatattcagtaagatatgacctgtctgtgagccaggcctattggtacctgttctgtggtgagcaggcaccagtaggtgacaaggcaggcaagagagagtgtccctggacctaagaaaccaggctgtggacccaaagccatctggaaaagactcacgggatgtgggacatcactcaaggctcaaggtcagcctggggtccaacagtaaggataagaaccaggacagcaggttccagaaagccaggtcccttcataggaggtcagcctgacctaaacggacaccattttcattattgttattattattattattattattattattattatttctctaagccttcttagcatttgcagtgtatcctgggggaacttgcagttttcagagacagactcatgaataaaaatgagttgtgtaaattcctgtattgagagtatttgccaagtgctgcagggctccagaggaggcaacgggcaccttggcctggagaaacagaggagggtgaaggtttctgggtgagtcactgctggaaactagaaggtgaagggagagtccaggcagagggaagagcgtggtgggaggtaaaaggtgccagcgggcagagccaggcagggtaggcgtgtgctgtgggcagggcagggaggcgggaggtggggtgaggggaagaccacagggaactccccagggagcagagaattgggtgcctcctgcaagtgtccactgtggcttctagggaaaatctctccgaaagaggaaagatgtgctgtgctggcaggaaggcggagacattcatttccagtccctctgtgatagggtaggggtgaccctgtcttcaagaggtgtgatgaagccagtgtccccatttagcatcaaaatagacaagacagttccttcattaagaaagcaaatcttgctggcactagataccctttacagagggccaggctctgggagcctccctgtctgggttcccatcccagcttctggggttcctctgtgtgcagtctggggtagttaacttaatttctctgtactgcagttcctatctgtaaaatgagtagaataagtgttcctgcatcataggtgttttatgagattaaatgatttagtgcaaataaagtgcctggaatggtgcctagaatatagtaaattctcagagttaaccagtgttattctctttttaccatttagggaaggcagaggaaagggctttaagagtgtcatgttctagagctgaacttgtgaactggtacctaggtgtgctgcaattggctgacaggtgcgcattttaaaaaattgaatttgaatcctttgcctggagctggcatgatccatgattcatcatagtccatcctccaccccacccccttgtcccaagcctgtccagcaacacacatgcagtgtcccctgcagttggctccctaaacatgagagcagaggacactggcgattgcattaagcggacagaagttacaggaggaaccattggcaggattagccacagactgagtcagctgtcatgccacacacttggtgagagccctgcttatgaagcagctgtgtatttcaaatgttgggttcagcctaggagcttgttgatgatcactttctgtggcagcaggttctagggccaggggggcaccctgccagcttctgtctccagcagacaagctgcatccaggtacaaccttcctctcagcctgtcagacgtgcgtctgcactgctagcacagcctcctccttcctacgcctccacctgacctgttcctataactatgagattgccccttacagccacccagtggtggacgctccaaggcaggcaagaggagcagcctactttccctagcacacaccagcctgaagagctgtgctagtggtggagtgaggaaagaaccctggccccagaggtaaaagacctcactgaagtgtgaccttggtcagatcactgagccctgcagtcctctttgttgtctataacccctggggtactgtattgcttgcagcacctcacttgattattgggttgttagagagaggcagtgtgtgtagaggtgccttattattattatttttaatgttagatactctgcaaatgatggacattcaaaataattagcaatgctgcattatttcttgaagtgtggccaaccatccacagcctgggctagaaagcagaaatggggatgttgattgtgatgagggtcccaaactgtactggggagaagatagatggaagcaaagaaactctatacacagagaatttcaaagagttagtaccaaaaaaagactgtaaaatatcttaataacttttgtattgaccatgcattgaaatgacacttcagatattttggattaaatattaaatattattaaaattaattttgcatgtttctacttttaaatgtagctactttattttttttaacatagtagaaaatgtacagcgtattttactttagaccagctacattgcaagtgctcactagtcacatgtggctgtcattggacaacacagctgtagccatgtaccaattgcattctgtacgtgccattgggcttcgagactttttcctccttctccttggagtagcctcaactctatcggggaatccacgttgggcaccagatatcggggaatctgccccgatattcacgtaggttcttttctattttccttaagtgccggccagcttgagaaataaagggacagagtacaaaagagagaaattttaaagttgggcgtccgggggagacatcacatgttggtaggttccgtgatgccccacaagccgcaaaaaccagcaagtttttattagggagtttcaaaaggggagggagtgtgcaaataggtgtgggtcacagacatcaagtactttacaaggtaatagaatatcacaaggcaaagggaggcagggcgagatcacaggaccacaggaccggggcgaaattaaaattgctactgaagtttcaggcaccactgtcattgagaacatcttatcaggagacagggttttgagatcaaccagtctgaccaaaatttattaggtgggaatttcctcttcctgataatcctgacagtgttctggaactagataggggtgatagttgtgaaacactgtgaaagtaccacagtgtcactagtggtaaatttttgctacatgtcatgaatgattggatggatggatacatggattgtgcaaaaacgtactgcctgaggttttgtcagtgcaatgagaccagcaatcaattcctcattgccacctggggggtgacatgcactggtcttccctacattatgatgacccaagagcttcagcctcatgttgctgaccctcctttctgtatcctcatggctcattgagagaagcgaaggagctgtctgaggatgttgtgatacgttccaagttgtcggtaacacacttagaggtgatatctcctggcagctgcagagaaagccagttcagtcagtttggggttattagggaggaaggggaaaaatggtgagaatgtgctctaggaaagtggggttctcagacatggaaaaccaaatatgtcatgttctcacttctaagtaggagctaagctatgaggacataaaggcatagagtgatataacgaactttggcaactggagtgtggggacattgggaggtgggtgagggataaaggactacatattgggtagaatgtacactgcttgggtgatgggtgcactaaaatctcagacaccaccactaaagagctaatccaaaaaacacctgtaccccaaaaactatcaaaagtttttattttggacaatagcgtcctaagatacctcgacaaagaaaaatcagagaaggtcttttgcaagcaaaccttattagaaatactttttaatggttgagattaaaaacatatttcctaaatgatcctcccaggaaactctgaagttcttgaggacaaagaccttggctatcttgctaatgttgtctccctgaaccttgcatgggtccaggcactgagtaggcactcagtaaacacagagtattgactcagatcctgaatattgaaataattgattattgaatcagataattttccaaacaaaatgaataccaccctgtgcttcttgtttgttttctcccatcacccatttctggggagtttttcaggtttcgcaggtagacctaggactaggaacattgctaaaggtcattgaccaaagacagaacttcagtcagttactggaggtcttttcccccctgtaaatgataggccatcctgcggtaccctcccttctcactgctgtttaggaaaatggattatttctgattcagacatttccagtcctttaattctttctttctcagtgaactaagctcttttactcttcagtgaaaatggcactgtgcacaagtgtctggcatccacgcaaggaaaaagctttctgtgaacatgtggccttttagattgaaggcagtgatctttagagttcttaattacccaagccaccaactcatctaagccctggtccatactgcaaagaggagggaaggatttggatgtcagtttaagccttggcgtctgttctgtattcagggctcatagtacaaatgtgttacttttttcccccctcagtggaatgtatttttcttacttttccctctctaaaacatgcatgtgccttagaattttcccattggagtttatttattaacccaggtttacctttttattatatgttaatgattttactaagtagatagattaaactaaacttataaattattaatggattcatatatgaatactactgttaggaacaggagtctcacaaaggttcaaactttccacgtatcagtatcatctagttcaagggtcagcgaactatggcccacgggccaaatcctattgaccatatctggccctttacagaaaaagtttgccaacctctggtctagttcaacacttagcataagctactgctcatacctaccctattttggcctgtgttctggcactgattgattactaaaattggtttgccattctcaattctcttcacttgtactaactatcatttatgacttcagacctgctagttaacttctctgagatacaggtacctcatttgcaaaaaggggacataatgcagttttcatcattaagcatcaagcgagtttacatatacgggtttagtaccccttagccccaaaaagcttgggaccagaagtgtttctaatttttttttttaattttggaatatgtgcatgtgcatgatgagatatttgggggataggacccaagcctcaacatgaagttcttttgtttcatatacaccttatgcacatagcttgaaggtaatttgatacaatagtctaactaattttgtgcatggaacaaagtgctgactgcagtttgactgcaactcatcacgtgaggtgaagtgtggaattctccacttggcagtactcaaaaagtttcagattttggagcattttggatttcagactggggatgctcaacctgtataaataaccttagcgtgttgtctggcagttagcagaacctttcttctttctacctcttccctaaagggtatgaccatttatccacggaaaaaaaaattgaatggcactgccgtgtagaagtaaatttgctgtcacttatcctgggtttaaatcactgttctgccacttactagctatgtgaccttgagcaagaggctttatctcattaaacctcctctaaaaccagagataataatagtatctatgtcctaagtacaactgtgactcttcggtatacaatgcatgtcaagtgcttagcgtaatgccttgcacccagtatatactaattaaatggtagcatctattattgtcatcagtgttattagtaatttcttagggtgtacaaactattggtgaggatcatggcattcatcagctctacccacatttgccaacatcaactctcctagtcagccaaaacttttgccactgagcttcacttaagcaagcaaagaaaacatgttttcctggggaaaatgaatctagagcttcaccatccgcatttggtgcattagaaatattccaaaaggaaaagcaacagagaggctggatttgcacatttctttcaaactgctgcctgattcccttcactcttcctgactgcattgttaacaagtcctctcggcctcagctgtccctgtgtgactacagtagtgccactcacatttctcaggggttggtgtggggagaggcctcgctgccccggtggagctgcccaagggacatccattcattggtttgcttctttattcattcgcttcaaatttattttactgtgctgggtgtagaggtaacacaggatattaatacctagccttttcgttaaggggctcaccatcttggaccccagttttgaagatactggagaggcaagagtttgggggctgggaaatctgagagtttaaaaaaaaaaatccaagcaaagatggtgaatggattcgtagggtgatagaggggagaagggggtactcagctggccagggatgaagctttagttggtatgaagtttctaagctcattcctgttctgagtgggtcctttctaaacataactcctcgactataaatcccttttactccagggatcattccataagaagcgtagccctggctggctttgcagttttctccctcacaccatgcagctattattgggcacggagcaggctgtatgcactaggaagtgagtgtgtctcttggtgccctggtgccccttgaacaaacacagtcccaggaacaactggacttctgtgcaagctgaacttctgtttctacttctgtgcaagctgaacaaaggcaccagcctacttttcccaggtccgggaaagactccagtgcaccgtgatgctgaagacggaggtgcttcccttggccttgggtccaggtgaccataattcatgtgcagaaactggcatgaccctttatagaacagtagattccactggggcgaaattactggcagctgtgcttttcttgtcaaacactggcttgggagagccaaaaatagatggtcctgggaccagtctgggttcaggaagtggcatgagcaagttgcctcccccttagggagagtgtgccacattcctcagagtgacaggcagcctgggagggcaaagagcagggcagtggccaggctggggtgggatgattcggatgcctggccttccggctgccatggtccttctcccaccagccagaccctccttgctctgccagccaggggctcccatttctccctgctcctttgtgccatggctcacctctgactatgacacttcttgctcagaaagctccatgggacatcatcgctgggcaaagaaagtgtaaactcgtcctgtgaggcccctcggaatccgcgcgtatctcatctcatctctctttagactccgcttcatgccctttatgctccagccactccagactccagcttgacattcccccaaaatgcccacgttttcccacctcatggctttttcctctagttcttcccatcctgcagagtgcttcctacctgtgcgcattccataagtccttcaaggaccagctcacattatgtatggtgatcgtaacatttatcatctaaacaaggattttttcggaaaaaatttcacaaactacccctccctttgggccgtgaggtcatgcagtcacccaatccgaaaaccctttacaaagaggactgtatccctccttgtctggctctctcaattttttcttgttggaaaggttgtcacagatccccctgccacagagtgtggacatcagggtagacacttagtttctgctccaggttctaagctccctgagaacagacacagtgcccagtgagtcttgtccccttaccagtggcatgtacaacccgttgcccaaagttgatgcccatggaccctcaaagcagctgcttgctggtgagcacgctttgatgctgcatggctgcatgcttacatgccttcttctgtccccagcaccacttgttgaagttatgcacatcattgcaggagaggggcgtgcccacagctgcaaagtccttggcgtgcaaggtgaggactctgcttcagccagcatgccagattctggccctcaggcagctgcccaaagagctcttgccaatgccgtggctcttgctaatatttgatgattgtcagagagggaccacctatgggtcatgccggccacacattcctttaggcaagaaacccagagtgtggcttcttattttgcatcaagttaagtcacttagcaatcagggcagggccctagttttaagatggcttagcccacactggagtgtctagttaagtaacaggttcacagtccagccttggctctggggagggcttgtaggcgaaagagttgtagtttctttcgacaaatctgcatttgctataagagctaattaaagattcctttaagggttcataagattgatctccagttaagcagtattttcaactctttttcttccttagctggagaatccttggttcaaacaacatcttgggtggacattccaaaatgagaaacaaccaagtcaagcttttctgggcaaaagcagtgttagggcttgaagttctgtgcccttgccacgggctccctctatagagtttctgagaaaacaccttgaaaatcactgctctagagtttaataaggaagatgcgtgtcctggaatcacaagtgatttgagttgctgacaagtgatttgagtgaagcacaggctaagatgggtgggaggacaggtgttgcacaccagccctacaggaggtgtttaatggatgctggtgggtggggagctgcacgggcttgcccaaggccactcagctccattataagtctcccaagcccaggcctgtgaattacacccagcaaggggatcaggaccctctccagggatgccttccctgcatcacctccaccccaaactcccaggaactgagggagtctgtccctttacggaatggcagcccctgcttgggctatgggagcagcagtaagagactgacctcatccaaagtggatgatcctctccaggtatcccttggtcttatttccattaagctggagatgggagtagtcagaagtagcagtcacattttaacaagctatgttttacaagatacacttgacctttgctgtagtgatcaataactgagcatgtaccctatgccaggcatggccctatatgctgtgcacacacacattatctcatttcatttttacagcgttcccactttataaaggctgttccaattaagaattttaacaagaaggcttggtgcatttcttgcatctttttgttaaagtatgaccctgagaattacccgagtgggaggctatttatttctagagaagttctctctggcatccccaggaggagagccaggtccatatcctttatccccatcccttgtttggcctgatggagggtgtctggccctacctaaacgagccttggaaggtttcacttcaattccaacttaatctttaattgactgtcccggacagattgagaactgaaatccatcagaacgaagcatgaggctgaatttctcctgagagctcagctcacttttacaagtaaattacttacatcttccttgaggcagtaaaagcgcatttgtttggttgtggtgtggggaggccacggggactgtaactctgtgaaaatcagtgtttaaaatgtgtgacaaaaagcaataaaatcatgttgatcggcatacaagagatcaacgtggaatgtgccctggtagcagaaacagggtggaggaaagttggaattcacaaacatgtttatagatctctggttttctaagtccagttagaagatattcaacccatgtcacattcctggaccataacattgctctgatgttgatctagaagctgccatctattgtacagttgaatccgtctatggtaactaggctaatcaatcaaggaggaaaatcaagacagggagcttgtgagagtggatgtggtttctggtcacaaggcttccaggtcagcgctgtacctctgaccctccccaaccaaacaagggttctgtttatccagaccagggggccaccaggtcagatttgcagtcggttattcccactgaggagaggggtttgtgctttcctgtttaattgcttgtctggccaagccatgagttgcagggtccacctctttgttggccttttccaggaggcggtagtgggaactcagtgcgatgacataaatcctctttccagactattactcaaggtttgaagggagataaagttaaatttaacctcccgcttcagctattttcacaagaaaaataaaaatttaaagcagatttcctggtgattccatcatctttcttatcggagatttacaaataattctaaaagttgagaatttctgcaaagtctggatacccttgaacctttttcctgagagataagatgatgtatttatgcacatacattcagataagaggttccaaatgtttctgcttaaacctcatcggtaaaggttgtgataagtaccaacaatactttatcaattttatacttgtattctttgataacatagaaggcatattataaaataatcaaacgtacataaaaagaggagataaaggtgaaataaacagtattgtaaaatgtcttactagccctgatggctttatactgtcatcggctgatatctcaagacatagagatatttagagtcacttagagtgacatttattattaatgattttgagtataaatccatatttccagttattttatccatcatttcacatttgtttgctgaattgtcattgcttttcaactttatggtagggctgacaaaagcttttactaggggaatgagaggccctgccattttttggtgttgtgtttgtattattatcttcaactcacacttttttttgcagtaatctttttttaagtgaaattttttcttaagtagatcatacatagagagaagcacataagtgcttcatctcagatcataagtgaacaacatgaattttcacaaaatttacacactcatatgaccaccacccagatcaagggatagaacattcccaaagcccccatcgtggctctccaagtcactcccaccctcttctttcccaaagtaacgcccaaagtaacctctcttttgatatctgttaccttttattacttttgcctgtgtttgagctttatgtgaatgaaatgatggcatctattctctggtgtctggctgcttttgcagtacattctctttgttggattgatccatgttgtcacatgtagttgtagtttattctgtttaagtgcagcactccattctgtgacagccccgtttcattattccttctactattgagggcatttgtgtagtgtccagtttgtggctatcatgaatagtgtctctgtgagcattactgtccctgggttttggtgaacatatgcccacatttatgtgggatgcgcacctaggagtggaattgctgagtcatgaggtatgttcattgttagtaatactgcccaaaagtgtcagtgtacgtttcctaatgagcacgggttgaggagcagttccacgctcaccaacacttggtattagtgtcgtctttttagctttagctgttctggtggatactgtcagcatggtccttacgtcagacaatggggtccctcaggccctgtgtcacagagggccctgcactagtgctcctcaggagtgtgccagttctggagggtggttgcttgcaaagggccacaggaccacttccagggcctgcttgtcctgcagaaggtggcctgaaggggtggccaagagatgcttctcatcagagacaggacggaaggaggaatgagtgcacggagctggttcctgtgggcttcctagtctacgtgtaggtgggggaggccttcgaggagcaggatggagccctgggttgggggaagagggtgccatgaccagggtatggctctcccccttgtaacaggcttccagtgccaaggaggctgggaattccacatttggatctggtcctctgagtttacattcccttgaggagcgtgacaaggtgaaaccagtggaggtgggctctgggagcacctggtgggcagaggctgagtggcatggctttttgagagatgagggagtacctgctagccaccatgctcggcctatatttgccctttcctcggctactgtccaggtaggggtgtgatggtgggcaagcagctgagcctgggtcagggggtaaagagcctccctggcttcctggggaagaggacaaaaggtgggtgttcaccccatgggattccggggagataagattagggagatggggaagtggctgtgggtgcctattggcagcaggatcctttccttccatccttgcctgcctcctagagctcactgtcccaaagaaaggtagtatgagtgacaggtgtcattttaattctctagtagccatttttttttaaagtatgcagaaagaagtaaaattcattttatgttgacctaatagagccaaaatataatttcagtaagtgatcaatgtgaacattactagtgagacgtttacattcttttaaaaaaaaaaaaaaactaggtttcaaaatcagatgtgggttgacacttccagcgcacctcagttcagaccagctgcattggttaacctcctggacagggcagccccagaggggatcatggcctttggtgcgaaatgaagttaatttgggtttgtactctccatagctatttaatatgaactgttgctttttcatagttttgattttgttatgaagatatatttgtaaaaataggaagatagaacatattttaagtttgttaggttgaatttaaacttttaatgtcaaggcatatggggagaagggtatctccatttgtacctttgcccataaattctggtagctgtcagcggtcaagagagaggaaggttggtggtggccatggtcagatgctgtccatctcagtgtatccaggcagggacacaggcaaggaccatttcttactcatctttggggcttcacagccccaaagattctttgcaacctgagcagaagttgctttttatcgcttacagatttgacattttctaggaaggtgatgcaggttttaaaaaccgtatagttgagaagagtggcagcaataatcagataataagggaacaaaacccagttctttgcgttgtgtcggtaggtgccacatgaagggggagcatacatctgcctttttttcccccatattcctagagcctagtgttcagtaggtgctaatgaattaacttgtttattcaacacgtatttactgaacacctatcatgtgtcaggtgtcaagtgatgtattatgctctggggatacaacggtgaacaagacaaagttcttgctctcttggaatttatgtattattgatgagaagcctgttttgttaataataaagtcaggcacagtggctcatgcctgtaatcccagcactttgggagcctgaggcaggtggatcacctgaggtcaggagttcgagaccagcctagccaacatcatgaaactccgtctctactagaagctacaaaaattagccgggtgtggtggcgggcacctgtaaccccagctgctagggaggctgaggcagggggagttgcttgaacccaggaggcggaggttgcagtgagctgagatggcgccactgcactccagcctgggcgacagagcgagactttgtctaaaaaaaaaaaaaaaaagataataataattaattgtggtcgcagctcaaatgacattctgacatttgatggattctcaaagagctcagaagaaaaatagcagttttcctgagtcttaaaagatataatcagtcagcaggcacaagggatatttaaatacctaaaggaggggtcctcgtggccacgtggaggatgtgggatttgccggcaaaggattaagggaatccattcaagaacacttgtgtcaaatttattttgacttacaaacccatgtctgtaccattctttgtcacctgacagataattgtgttttatcacttacagatgcaggcttttctaggggctgatagcaaggagatatacttttgaaaaatggcgtagggttgggtgcggtggtgcacgcctataattctagcacttgggcaggccaaggcggctggatcgcttgagctcaggagtttaagaccagcctgggcaatgtggcgaaacctcgtctctacaaaaaaaataagccgggcatggtggggggaggaggaggctgcagtgagccgtgattgcaccactgcactccagcctgggtgacagagtgaggccctgtcgcaatcaatcaataaagacatagatgagaagtgtagcatcattaatgaaataacaagtgaacgtaataaattaacatttaaaaataaaactaattttatttttaaatgttattttattttatttaaagaaattaaaaattcagtgagcccaaggaaaacttgattacatgggatggttcagcatgagacacgataaaaaggaaacgtgcagatcaattagtaaaataatcaaaatcctgtgggtccttttcagtggtttttgaacttgaggggaataagaatcacctggagggcttgttccaccacagattgctggtcactgtgcttatagtttgtaataactctaaggtggagcctgaaaatttgcagtcctaacaagttcccaggtgatgctgatgctgctggtccaggaaccaggctttgaaaattcacaggtttatttcattgcatcactcatatatgcacacaacagctttatgcttcagtttcatacagttaacgcaaggacagaccataaatcctactaatgcagagcgaggtaggatacagtccaatcatggctgcaaaaagaatgaggggaaaagcacatcaactatgtgtacagttttcatctctctctcatacttaacttggtgtccttgactagtttggccagtctcttgtgtctccttgtggggatatcaaaattaggctctccgtaacctgactcttcttgaattggttcatctcctgacactgcccttttcctgcagaaactacagggaccatcactcgcagataagcccattgctgtttattccactgtgccttcgcataagtgtcctctattaacctgccgcaaatgtgtgttcttgcttaggaccccactcagctgccacctcctctttaggctcttgtcttctctatcttccctgttccatcttctttctgtaccttatatggactcctgctgcagcccttaacgtactgtattataatctgtaacatacatagtccccttcctatcgtgtgagcaactctggggcatcagccttaccttctgcagttttgtggcccccgtttccagcccacatgtgagcagatacttatggattgtatgtccgtagtaaatatggattgcgtgattgaatgatttagtaaaaaacattccagatctctcagtctataaaaatgaataggatgcaatcacaaccaataacaagaacatagagggctcaaataactgatatttggaaaagagttgcagagtcatggtacaaataagaccataatgagaagtcctgagctttccattacctcgttgctctgcatcacaggcaagtccacatttggctctacttagattaatcatttcgtggaagaaccaaagtattatttagctactaataaaaagcaatttgctgataccaactcagggacatgaatatcacaaaatagttatccataagcatctgtcatctccattatattttagtcacagtgatagattatcaaatgaattagaggacagaattagtctgaatcctcagttctaacataatcacttggggaaatatttgccaagagagtagaaagattatgagaatgaaaacttcttccatttgccttgaaaagattagctgtagaatcctaatcatctagaatatttcaaaatccactgtcagatgacccatgagctcagtccatgtagtgtattttcaaatgcattgcttaccacttctatccttcgcataccatagatttttaaaatgatggcgggagggcggaagagatggtgctttaagatgagggaaatgggcagtttttttctttggaggcagtcactgaatagtgggactatttacaatgtagggcacggaaaggcagcatttattttgaagaaatgtcagagctagagttttgtgaaattgcttttaatagatttttgttcttctttctcatgcaactttgccagaattaaagcaatgctcttatgacaagaggagcaccagggccactgtgggttctagcaaagaactggtgttacttagtgcctgctgttggctgcttctctgggaagcctggtttcctacatttcactctctcagcacacctccctcttgactctgaccatccttctcagactcctgaactggtttcatttcatctctcttcctcttgcctctgggtgtccttaaggcactgttcttaaccctcttgcctctgggtgttcctagggcactgttcttaacctccaacttcttccagtatatactcagttgtgtattaccaaatgcccctgggacgtttccacttagatgttcagcctcaagaaaaaaaaaaaaatccctatgttgagcacatctgcttgaaaccctcctgcctttccagatattttctctaatttggacataccatgatcagacccttcctgacgcatttgctgttgcctagaatgccccctgccatcccccattctagaatacagctcttaaactcaaatgcctccagaagcgaggagaggaatttgcatgtgtgttgctggctgggaatagggtgcaaaatggcagctgaccttggcctcagtgttgaggagcagtagagcccgtggggacagtgaagagctggggagctggtgcagcagcaaagcgggcacttcctactaagcaccaggccatccttgccatgtaggtgtgtgggcccagtgttaccagatttctttatttttaaaaagaatgcagggtatgtttgtttttaattgcctgattttggccaagtgcaatggctcacgcctgtaatcccaatactttgggaggctgaggtgggaggattgtttgagcccagaagttcgagaccagcctgggtagcatagtaagattctgtgtctacaaaaaaatcaaaaaattaggcagggtggtgtgcacctatggtcctagctactcaggaggctgaggtgggggatcacttgaacccaggagatctgcagtgagccatgatggcactactgcactctagtgtgggcaacagaacgaaaccatgtctcaaaaaaaaaaattgcccaattttatatgtgttaacagttgtttgaaattaaaatcaccttttaggctaacattgtgcagatcatacaaactgtgtctgttagtcctgtgtgggcctcagctgccagtgtacaatttctgatttagaacatctggctcagtgccatccagtagacatacgcaagacatttgagtgatctaaaattttctagtagccatgtttcaaaagttaaaagagaacagatgaaattaattttaatatttttaatttagtcaagatttcccaaatatcatttcaacatgtgtaaccaataagaaaaatcactaatgagagatttcacattctgtttttgcatgtaagtctttatgctttacaaaactaaacgcacatctcaatttagactagccgcatatgactagtggctgctgtcccgcgcagcccagctctggatgaggaacaagaattaattacatgcacatataatgaagtgggattttattcattatgcttgtgtagagctagataagttgaattgggggtaatccaaagtcaaagatagtaaatctgagaatggtgagtccaaatatgacaaaaagaaatagatagaaaagaattgctgggatggcaccagagtgataattgatagactttcataagtccatcgtgcatggcttccaataatcccttaagggacttttctctctggagctctaccctgtgccacaggagttcacagtttaagttctaatccatacttcaaggttagcttccattttggatttatcatgctgttgcccttctaaaaggcaaatgtcaaggtgagtgttttgtctataagcatttaaaacaaaatgagcatcaaggaagccactgtaaaatggggaggagtgttctgaactcattgaccacttcatcattcaatcaagacttagcaaatgcactacgctgctaacgatgagcacttccacccaatatttaccggctttcactgcacattcatactgggaagcagcgttctagagttattatcagctctgacctcgtgaaggttatgaccgccagtgactcctttcttgaccctgactacatgatttgtgtgtttccttactactgcatcgttgatatgctcaaggatctgttgagggttaaaacgggaagccagtgatccttctaaaccatgttagcatctccccgtagtaagatgtcaaccatctggcatgcagtattgtgtacatggatcattgtgctgtcgctaggcctctctttgcccagtaacagtcaagatgtggtcatttatgctcccttgctaccagaagggacacagcttctcaggactgtcagtcatacctgtttaactcctgtctaatgttctcagtgacagctttagcatcttggaagatacataccattagtgctctccaggagccaagggtcccaactctggtgagttaaggcaatggcacaattataatcctgggttgaactgtcaacattattggaaaggtcatcctagggctattgcagtggcatttccccatatctgaactctctggcatggatctgttgtgaaaaaagctgccaagtatgatgattttgagaaacaagagtctaaggaaccttgaagggaatccagggccccttataaagatggtcatttcttaagtcattaggtacaacctttctggcgtgtgtctagactcactggcttcagtaagcagcctccacttggtttcagccagtcttatctcctaagtacagcactgattgggagaagaggaagcagaaattctgcctttgtgcaagaaggagcttgcccacaattgtctctggatgcatactagtctttgtacgaattgcattagtacaaacatttcaaccaacacataaaatttcagttgtctttgttttgagccttccgaattcagaggaagtatttcatgctgatatatttagatgaaagagaaagttacagagcacttttggtttgaagttaccactccagacaccttaaatgaagatgaaatttgagaactaatttatagagataatgacttagagtagaaattgagagcaaatacttccttccttggaaatggctcagaaagtagatagtaaaacaaaggagagccaaatggaacttggttgggatgacatgggcatttcctcttttcatccacacatccattcttcagataaatatttattgattttatcatgatattccagacacttagaatgcaggcatagtgaagatccatttttgtttttaatttaatagacttggtccatggtagccagcctgcaagactagctcccagtaatcctcatttcctggtgtgcatacccctgtttggtcctctcccataatgaataaggctgacctgtataaccaataagataatatggaattaatgatttgtaactccaaggctagatcgtaaaagatgttgctgtttctaccctgctctcttggatcgcttgctctggagggaagctggtcaccatgttgtgaggacacctaagcaggctgtggaaaggaccgcatggagagctgagccttcctgccaacaaccagccccaactttccagccatgaaaagaagcccccttggaagcaggtcttccagccccaggcaagcctccggatgactgtggccctggctgatgtcttggttgcaacttcatcagagaccacagctagaaccacttaaattcctgacctataaaatttgcgtgacatgataaatgtttattgtattaagcctccgtgttttaagataatctattatgtagcaatacataactaatacatagtctttatgtgtgccaggctttgttttaaggcctttgcaaataataacccatgaatcctcataacaactcttcaaagtaggtactgttgttactctcattttatacatgtggaaactgaggcccagagattatatttactttttaaaattttgtctttttttttgtaaaaatgttttacttttaatttttatggatatatagagatgtttaaattactagcccaaagtcacagttggtaaaatgttgagctggaatttgaattgagcaagcagtctaccccttagcagaatctgctttttttaaatgaactaagcagcctggccagagtccatgccctcagcagctacgttgtgttgtccttaaggaggagcatgttttagaaaatcagttataaaatcaggtgattgatgaagtgcagggttaagttaagagaagagtgaactgccttcagaatccagtgctgttaccactcaagtggagatctcagataaatcacttattggagcttctgtacaatcatctgtaaaaccattacttcccacttggagagatttttgaggattaaatgagataatgcatgaaagccctctagcttgggcatcagtacacctgagttcccttcccttgctctgcacagcctgctcatcaccactgatggggaactctgtcctctgtagggcccctgcagacatgggccttgcctggatgctgctgctgtcggagcctaggagagttgtgcctggcatcgcagcacaggtactcacagctctcagaaggagactcctgtctgggaccctgccctcattcccacgtaggaaaaatcctttacatgagcatctcctggccttcattgttaggttgtagactacaatgaatgatattctgtgtttaattacattatgcacaacactctacagagtgggtggttttgaatcccaaccactaatttacgaagtggagcggctctgctggctctgtgaagtatgtgttgtggagccagaggtgatgctgttggatgtgggtggtgatttacgggagagcagcataagcagaggaaggcacagagacctgggttcaaatcccactgccagtgctatctgacgtgagacttcggacaagttatttaaccttaaggcttagtgtccttgcatgtaaaatacaaataatgctgacctcattgattccttgtgaggagcccatgggataatgtggggtaccatgcatcagtatcatttccctttcccttgataatgattatattggacagctagtgtcataggaagctaatggttaggaattcagactcacacaagaatagattttgttttgcagtggaaacttagtgataactttggactaagacaatgtgaagacattttggcagacaatcatagagtagttatattcttgtgaggtctgcagaagtccctagtggggagagcagacagagccttggatgctcagacctagtttggctgtgaaactgaagctttagtccttttaagtctgtgtttctgaccctggaggaaaaaagttatacataccttgaaagattttcttgaaaaaaaaaaaaaaaaaaacttgtacatgtctgtatacacaagatggaaaaaaaaaagttcataaagtataatatgaattcatgattaaaaacaagaaaatattacaaagcaatactcatagaaatttagacatagaaggtaacttccttattctgataaagaatgtctacaaaaatattcaagaaccaaacacatggttaatatcatacttaattgtgaacctttataataggaatgatttaaggatgctctcttttacctttttcatttactattacactggatgttctagctatacttaggcaggaaacaaaataagattagaaaagaacaaacaaaattgcccatatttgcagataagattatcaatgttaaaaaagagataattttaaaactatcagtattcagatttaacagctacaacatcagtgtacaaaaatcttagcatttctatagataagcaaaaataagtggcaaatgaaaattgtttaagaaagtaaatatttatgctagtaatcaaaaccataaggtatctaaggaaaaaatatgacaaagataagatctttatcaagaatattatacagctctattgaaaagcataaaataagatatttaaacaaagggtaaaatataccatattcatggatgggatgattcagtatcataaacatttttttttgcccaaatatacctgtaatttcacttccattgcaataaaaacaaaatagggattttcatgggggttggggactatataagataactctaaaagttcatgtggcaaagtagatgaccaagaataattaacataatttcgtgtaaggggatcatacaggagggaacttatcctgatagttatcaggattaaaaattatagtaattaatacatgtggtattggcacagggatatagaaatagatgttatttgaactgcctaatgtgctcaaaaaccaacccatacatatacagacagctaaatgagagcaacaacactacaattaatgaggaaaaatgattcatttaatgaatggtgcttaaactgttagcaaatgaaagggacaaaaagaatcagatccctactgcataccacagtataaatatatctagatggttaacatcctgagtatgaaaagccaaaaatttaaaatgtatagtgaaaaaacacaaaaaccctaagggaaactcttaatgtaatctaactggattgcattaaaattataaaaggacaccataaactaagttaaaagacaagagaggaagtcctagccagagcaattaggcaggagaaagaaataaaagtcttccaaatggaaaagaagtccagctgtctctcttcactcgtgatgtgactctacacctagaaaaccctaaagattccacccgaaggtccctggaaatgataaatgacttctgtaaagtttcaggatgcaaaatcaatgtacaaaaatcagtagcatttctatacacaaataacattcaagccaaaagccaaatcaagaatgcaataacatttacaatagctacatccacacccacacaaaatacccaggaatgcctctaaccgtggaggtgaaagatctctagaaggaaaactacaaaacactgctgaatgatgtcatagatgacacaaacaaatggaaaaacatcccatgctcatgaattggaagaatcaatattgttaaaatggtcatactgccaaaagcaatctgcagatccagcactattcctgtcaaactaccaacgtcatttttcacagaagtagaaaaacctattctaaaatttatatggaaccaataaagagcctgaatagccaaagcaatcctaagcaaaaagaccaaagctacagaggcatcacattacctgaatttaaactatgctataaagacataataaccaaaatgacatggtacttatacaaaaacagactacatagaccagtggagcagaatagagaaccaataaataaagctccacacctacagctctctgatcttcaacaaagttgacaaaaataagcaatgggtaaaggactccttattcaataaatggtgctgagatagctgatgagccatatgcggaagactgaaactggacccctatctttcaacatatacaaaaattaactcaagatggattaaatatttaaatgtaggagctcaaactataagaatcctagggaaagaaacctaggaaacaccactcagaatatcagccttgggaaataatttatggcaaagtcatcaaaagcaattgaaacaaaaacaaattaactaaagagcttctacataacaaaagaaactatcaatagagtaaacagccaacctacagaatgggagaaaatattttcaaactatgcattcgacaaaggtctgttatccaaaattaataagaaacttaattcattaagcaaaaaacaacctcattaaaaagtgggcaaggtcaggtgtggtggctcatgcctgtaatcccagcactttgggaggccaaggcaggcagatcacctgaggtcaggggttcgagaccaacgtagcccacatggtgaaatcccatctgtactaaaaatacaaaagtttgctggatgtggtggcgcacccctgtaatcccagctactcaggaggctgaggcacgagaatcacttgaccctgggaggctgaggttgcagcgtgccgagatcgagccattgcattctagcctgggtgacagagtgagactctgcctcaaaaataaaaaaaaaagtgggcaaaagacatgaacagacacttctcaaaagaatatgtacaagcaaccaacaaatatatgaaaaaatgctcagcatcactaattatcagaaaaatgcaaatcagaaccacaacgagataccatctcataccagtcagaatggctgttaccaaaagtcaaaaaacagcagacgctggcaaggctatggagaaaagggaatgcttatacactgttgctgggaatgtaaattagttcagccactgtggaaagcagtttgaagatttctcaaagaacttaagacagaactaccattcaactcaccaatcccattactgggtacatatccaaaagaaaagaaattgctctactaaaaagacacatgtacgtgtatattcattgtagcacgattcacaatagcaaagacatggactcagcctaggtgcccatcagcagtggattaggtaaagaaaatgtgcatatacatcatagaataccgagcagccgttagaaggaatgaagtcatgtcctttgtaggaacatggatgcagcgggaggccattatcctaagcaaattatgcaggaacagaaaatcaaataccacatgttcttttcttgtaagtacaagctaaacattgggtactcgtggacgtaaagtcggcaataatagacactggggactacagtgggggtagggtgtggggaaaagggtgaaaggctcttgggtactatgctctccacctgggtgatgggatcgttcataacccaaacctcagcatcacacaatagacctgtgtaacaaacatgcacatgtatatcctgaatctaaaataaaaattgaaattattttaaaaattaaaaaataaaaagacacatatggacagaagatttgtgctacacataaccaatcaacgattaatattcagaatatttaagaattcctaaaaattagaaaaaaggctatgccatagaaaaatgggtataaaataggaagagggagaaatcagaggtgaggaaactgaatgggtaatgagcataaaaaacatgcgcaacctcactagtagtcaagaaagtgcaattaaaacaatacaaagagatactgtcctacacctttcagattgggaagaattaaaatctgagaacaccaaggggtggcaaaaatacagggaagtgaggattttcacacagtgctgctagccaggggcagtggtgcatgcctgtagtcccaggtactcgggaggccgaggcaggaggattgcttgagcccagagttgaaggctgcagtgagctatgattactccactgcactctagctgggcaacagagcgagagaccctgtctctgagaaaaaaaattgtaagatcactttggaaaataagtggcattttctattacaagtcagcaaatctacaaatacaaatatactctcgaaaaccatagatacaggaggaaacctaagaatgttcactggggcattgtttgtcagagttaaaaactgagaccagtctaaatgtccatcaggaagagagtagatttaaaaagtatttgatatgtataagatagaatactatatggcaattaaatgaatggattagatacatttgaataacttaatgttgagtcagataaaagtctcagctaagtaatgttccttttgtgtaacattttttaaaaccacaaaatggcaccttaaattatctttggacatatatatgattttatatatgattttataattgtgggcatgtgtgtatagatatacaaaacatgtatatttacatataaacattcatgtatacatacaagcacacccacagttatgaaatcatgcctgtgaaagacatctagaagttccagagaacaatatcctctgggaagggaagtgggggcaagttaaattgagctggagcgaaaaggaggctttaactctgtaatgtttttttcctttttttttaaaaaaaaaaaaagaatctggggagtgactgcttaatgagtatgtgttttctttgtggtcatgcaaatgttttggaacaatatatctataggtggtggttgcataaggtgaatgtattaaatgctgttgaatgcagaaaaaaaaggaatcaaaataataagagacctaaaggcaatgtcacagaatttgttaaagttgagagttgattatgctaattaaagttgagggtcagttatactaatttaattattttctgtatttttgtgtttaaaaggcttcgttgaagcaacagccatcagcacttttgagatgtacccagagaaactgttagaaatctgtctcttagcagagaacgttctctttaggtctgtccctgtgtaccggaaggtgtttgtgcatgagtgctggtaccttgcctgtgtgcacacacgcttgtacgcttgtattcatctcatgctcagctgctgttgccttggcaacttgggatgctctgtctcctgctgagtctggggtagttggagggctttgtacattggctgttcatttcccttcgaggactgtcatcgagagcaaggctgatcagtctgtctgtctttgtctctgcctcctaaatatgcaatttaccttgtcatgagcatcttctagctactctccccagcttgcatacctcattttcagccattcatttctaagacataactgtgaatgcctaatcaaaaaagaaaaaaagaaaaatttacaaccttaaaccattttctctaaataagcagttaagaaccaggaaatgctttaaggaccaggtgggggggcgggggggagggggcgaacaaaagaaaacatgctgtatttgcattgtttctacagatcctcttttccaaccactgggaatgcctcaatgggcaaggcatccagcttaggacctggcaccagcacatattatgggatgctgcttccttggtgcttgtggaataaattcctactttttggtcactgtggtccattaggaaccttctggcttgaacctccttgttcagactggtctacagggttgagcttgacagtgcctcctgtcccagcctcctgtgcccgctggcctgctgtgccagtctttctagctgtcacttggagtgcttgagccagaaactgatatgataaggacacttaaatgctggttcagctctgggtctcacatgcccccccacccagggagattgtttagtggattgaggctgcatgaaaagatataaaacaaacatgtgctgtttatcaacacagtagggtttccattcttagaatgttaaagtggtcatgtattaaagatctctatcccaaccaaccagctagccaatatttactgagttcttgcactttgccgggcattttagaaacgtgacgactgaaatccatggaagttgtgtgagttctttttttttttttttttttttttttgagacggagtctcgctctgtcacccaggctggagtgcagtggcgtgatctctgctgtgtgagttctttttattagctcagttggcacctttgcctagagagatacctgctcaatgcaggtccctccatcctgcttaaaaggatcattagagcctcctcttttcatattgctcttctaagatcactacatacggaagaccacgacatagggactcttgggtaagtgctgaatccatattgagcccttagctgctggaactgagggtcttagcccagtgaggatgtgagatttttaacctatggagtggatgtgtggttttcccatttagcctcagtccagatgtacattcgcaaggaaagaaggcacctacctgctattaccccaggtgttaattgtccctgataagcagccagggccctgttccaaggcaggcaacgtctagacacagtccttggcctgagagagcaagaagaagaaaccgtccagtggaaactcactctggaaaggcccttgaacaatgtactcctcattcaggacctgtctggacaaagtgatgtgtttttatcagtctggcaacatttcttacaagtccataaggcccaggtgatgaaaacagcatggtgtgaatgtatttagtgctttttctcttctgttttaagaaaaaaaattattaacatggaatgcaagtgtgttcctacttgtcattctgagaatttttcttcttcttgactccagcctttccaaataattaattttatttgcctgatgcacacatagtggattaagagttttatggtaaagatattctccgaaattagtggtagcaattatctctcaggaagggcctgcgatgggcaggagactcactttttattgaatattctataatatttgaattaaattttcccaaatgcatctctttttcaattaaataaacttaattaaaacatcttttctagtagaacacaagggatacctatgctgataatattacatgcactgtgctgactcagtataggatcatttagattaccataccccagttctacttaatagctgtatgatgccgccaattagttcaacatcccaagcctcaattctcaaatctgaacagtagagatgaggttgattgcttatctcacggagtattataaaggtgaagtgaggcaaggatatcactcttccctgcattaaaattacattgcccgcctcccctgtgaaccctgtgtacctccatagcaggaaattcatcttatgtatctttacgtgcccaagtcccccagctctgctctgaaacattctgataggaagggccattctgtcatattatttattgctatatctctctagtgcctggaaccgtgctgagcatagtatacgtgctgtgtaaatgtttgtcgagtgcacttatgcgtggtaggaggtagttaattgatggttgaacactgacttgctgaaatgacttacacatgtcctgtctcacccctagtggttagtgctaacaaatgtctcggcttcagagaagatacactatggagtatacattccttttgcttattagtactttattagtttttcatcagctagcctgtcatgcattggcctcagcatctatcaacagatcttgtcattctgcctcccccttcccatcagaggatgtctcatcagtggacatcttgttagtgaatacctcgttattccttcatcagaccttctgtcattttctcagctgcgttgatgagaaatcccagacttcatgggaaaggtcaggagttggcaaatgagagctagacaagattcagtagtgacatgcagtggttgtcctgtgggatgaagggctttcgtgagtgatacagtaggtatacacaacagttagttccccatggaattcatggatacggggccaggattacatgcaccaccagccagaagatgacaccaggtcagcctggccaggctgtgggtcggatcacagcccttggcagtaggtttgaatgaggtggcactggagtaggcattgcctggcagtgctccccatcagcactgcgcagctggggacctgctgcagaagggccatgctcacactgctcagcagctgtagctgtcagcctctatcatggattctgataatcgtccagattaactgaaatgtgcaaaataggttggtgccttatggtatgtggtacgtggaccgtctcaggcactggttataggggcagattcctggatcccacccagaccttctgggagaggctctctggggtagggcttcgtaagtatcagctttaacatgctccagtctgtgctaaatcacaggaaaggtggagagccatgctggactagctgggagtctggtttttggagctgacagacctggacaggttctaggctgtgccacctgctagctgtgtgattgtggcatgcagccctgctcagcctctgcatcctcctatacggtgaagaccatgacgatggtgtccgtctcatggaactgttaggattaagtgagataatgtatgcagggcatcatagcacagcatatggcctaacacaggcagctaagagtatagctggtgaggcagtgatgacaatgatgatgactatccgtggagaggggagtggttttagtaattctgctccacgcagcattagaagagtagatgcttgagtagtgttgaagagatgatgaattattggccattttattgacaaacagaacaccaaacaccaaagatactcactccctggattagatgtcaccgtagtctgtgtatcaacaaaatctccaaagtgatttggaaggacactttgagtttggcaggggatagatgctggtgagtgagttggagaactaatgcaggtgcatcccagaagcaatagttggagcttctcccaattgtccctcaaatgcattagtcccgactgaaatctggtggtttgtgtaatgttaaaaacattcttttacttttcatcctggatgcatctatggcctgcatttgagctcctacctaaagtagttctgtctggcagagagcagaagaacactccaagtgtggtctatggctctaagctctgaaagcctcatcatttccttatggggataattaaaaactcttttaaagcctctgaaactctcttattgaaccctaataaatatcagtggctttatttgccacaacttactaaaaagcagagcagtggttaaatgaaaagatttatgatatttgcattgtttattttgaagcatctaattaaataattagttcagtcttctagctgtttttagaaacaagtctttagaaccctacagagagattttctgggcccaggaactcatttggggaagtgattggcctttgaacagtaagtagaaagtcatcaaggtagctctgcccacctggtgtttgcttatggaaaccatctgctggttaaagttcctggctcagaacagccctagccaggcagtcacagcctgcacagaggtgcagtgatggccatagtgtgccgaaggggctgatcgcttcaagagcgtctggaaagttgatggtctatctgtcactgcgatcttgacatcctgtgtggttcagtctggttgcagttggactcatgctgggtctggcgggtaggtgagaatctctaccttgctgttgctgtccaggtttcaaggcaagcgtgagagtagtcctacacagaggaaaacacacattaggctcaagcacctgcctgtgctttgctgctgcttgtttaaaggagtgcttggaaatgccagctgcccagcctctagagagctggggggatggacccctatcctgtgagaagttgagtttgaggatacacctgaccgctgagggatgcagagcacacctacgctagctcacttttacacaacccgatagatttcttgatgttatgcactggataattcccttgtggcccagtcaccttcccttttgtagggatggcctgtctatgtgatagaaagtactcaagccatggaatcaagtggatgtgaattccactgctgaacctgccacacactgactttgggactgagcgaaagcgtttctgagactcagcccttctaactctcacaggaggaatggaatagctaattgcacccagtgagggttaaaaacgtcttgtatgtgaaaggagataatgccacaccaggtgtgctcaggctgtgtctgttagcagctgagttgctctgtcgtctcatgcttgggcgtgctgttaggtaatttgctaatctgttttttataaagcctagaaagcaacaatcagaaaatattaaattcagaggttaattaggtctctcacataagccaggttgtgctggagttgcctaaaaattttgcatcctttctaacttctgcacttcgagaaagagcagggcctgttcgccatcctggttctaagagcagatggtctgcctgaccaagagctcagaggtgacattagttaaagatccatgacataagctacagcttctatgagcgccagattgacctttgttagaatgaatgagttttactggactttggtacagctactgagttagttcaagagcacaggtgctttttggttagaggcatattaggtcatgagcttgctagaagtcaatctctgtgagtctttttcccacaaataatgagtgctggggttcatgctggtgactgtttcctactttgatctggcatatgtctgcctgatccagccctttctgtgcccaacactccttgtgtctttaagatgagctgagtaaaaaattccagcaggaaaaaaacgacaacaatttcctattcatttaaatgactgccgttattgttaaagactcaactctttttcaaaactagatttccagtgccccaaaagacaaaacatagtgagcgtaataaacaggatagatgtgtctagtgcagagagaatcatcagaattactaatgaagcttcttcattaagctaccactccagtccagaaagggagttcccctctagggaaagcccccaaatgtatccttttagcaatgtctccctttatttgatctctgttttagagaaccagagtcctttacttcaacaaaataatttctaaaggaagtagcagaaaggctcgttaattgatagtttgggaattgtgctgcattgaattatataacctggaatgtcatattataccgatttagcactcacatgcattgcacaacagtttaaaaacgaactaagcaacatttccactgacacgcaggaggactacaatatgtctgtggtgtaacatttaggacaatacctttatatatatgttctcaatgagataaaggtcagtttcatggtaggtgctgctaagaataaggaagagagattgttctcttaacacctgtctagttaatgtggaacttggttggagaacccataaacacaaaatattcaggcattgttccatagtgaaaagacgacagctttctaccatggcagactcggagcttgagttgaagggacattggatggatatatggctggagtattgaggctgggaagtcctctcttacgttgaatcggggaagactgcaaagaaaaggtcggggagagaacaagatggggtggatgtcagatgttgttttgggggagaacagaggaagaggagtcactgaatagggatagtgtggaaggaggcttgcctcatggtgagtggcagaagggcttgggttgtatgtactagaatggccttgcataggaagggaggagcaagggaagtggatgatttaattgacgctaagaacctctcgcagatttttagaggccttagaattagtaggcttttctgaaaattagaagaactggagagggcgtggaggaaggaaagtagtatacttctttttcctgttctgtaagttttggggcatcatgcattaaattattaaaataatccccaaagcataaaattagggtattttgggattaccatgagtattttacccaaggaagagcgatccaagctctactagtttatagggtagtacctcaaagactgtaagtttatttattttctaaatttttggaagcatctcttttcagaagaaagactttagaaagagccatactgacagccttgaggacttggtgatttcgaacctacaggtcaaatgtctccgatgggtccagaaaggttgccttttctaaagaagtcggctcggtaaacaggaggacccaatcacaggtgccattgcttgaatgaacttgagagcaaccccatacttggtccctaaatgacccactagcaaaactgaaagacctttttttcttcctgcaaacacatacacacataacacataattcagattgctatatttcttgaaatggcttccactggggttgacatgggtctgatttgatcaaaacctggacccagcaagtgagacctccctggagctcaggctttatggtaacacagactggggttcgtatccccctttcgccgccaggttgtgcagtgccccaaaggcaagtcacctattctttctgaactccagtttgccctgctgtaaaaacagaatcataacacttgttccatgtgggttttgtgaacatgaagtaatgtttatgaagtatctagctgagttgcacattcaatgagctaaaaaaataaattgcagttaagatgttttcgttttaaattccttgacttgtgacctcctttctaaactggcatactacaatcatctagattcatttttacaggttttggggagtcaacattgacactgaaatcataaatcaggtttaaaattgtgtgttcaacttggtagaacataagggttttatacacacacgcacagagataggtataagttgttttctcaatgatgtttttcagtgatattggcaaatgtgattattacgcctagaaaacaataactgggaccataatcgtttatatgatatatgtgaatgtaaaactgaaactaaaagcaaatcctttcaaaaagcaaatctgctttggatagcatcagtcatggtcaaaaaggcagatcaacgccctgtctaccaagaagagcaatatttcagctaggaaactctatttgaagagattttatggatttctgatgtgtaaaatgattttgtatcatattgtagatggagtcatttgtagagagaatgaaaaatatattacttctgacatgttctttttaattgaaatgacatttgtacactctgatatttctctgtgccaatgtgtttttcttctcactgaccgcagccatcatccaagtcaaggtcaagggctgcatgctgtcccaaatgttatgctctgccgagccgtcccctgagttacagttgggaagtctgcaaacctctgcctcactcaccatcagaatattttctggaggaacaactctaggattgaaataagcaagagccagttctgctggggtcatagtccagggcccacagctcaaccacgagagaacagatacaaagtgtcctgggctccttcacatctctgtcattctgtcactcaggagcctggttaggtgactcaggttctgagcagtaccctgggttaactcctgccagcccactcagtttctgagctgcaaaagccaactcgagaatgtctccagcacggcctgatgcttgttgtacagcctgtgcaataagtaaaccagggattcgtgtgtcaggaagacagcaggctttgacaccatggtgccatttggatttggctctaccactatgatctgtgtgatcttaggcaggtcatcaaaggtcaacaagtctcagtttccttccaacattttgaatgacagtacccacatccttcaaaggtctgtctaaatgggatggtgcatggacagaacttacctccttctaaaagcttccttaatgttagctactatcagtgtggagttgtaatgaggaccaaagagaagtaacatgaagcaatacaaagcttgtcccacagatgtttctttcctgaagtcctttctgtttagttcagatgggcaggcgatgtgcaatgagggaaaggtgtgcattcatccaatagaggcattttccaaagccccgtgctcatggagagggacagtggcacatggaagtcttatggagaagtgccatgtgggctggactcccccagacttcattgtgtagctcctccctgcaatttcacagcactcttgacagcccagagtcaagcaaatgggagatggcggagcaggtaccttgagcccctctaggataaactaccacatgacacttaggatctttacttttcattatatctgcaacactcagcacaggaccctggaaagtttttgttgaaatatgggatgctagactgcagagtagatactcaggtgatctatgtaacctattcagtgtttctctaaagtgtttcaaataactttactcttggaaggggctccattaaaacaacaccaataaaatatatggtcttgataaagctcccttttggagaatggtgatgcacgttaacatattaaagcccctaggcagttctgcacaaagaaaccagtttaactgcattcagtccagcgtttctcagtttcatttggtctagggaccctttttcacttcttcctaggacacttattaacagctcatgcatattagaacccatcaatcaatggcatattgattggtgttagtatataataataaatccttgtgcatttttatgtaattattagacttctgtgtaggcatttgcttcctgttacagtgccattgtccttacctgtctgcaaaacaaaattcatttaaatttttctcctgtaactctgttgttgatgtcagtggggatcaaatgttcggctggacttaattttttatgagccctgttgatctttctgcatgatgacccctctgccgcatgaagccccaagcccagtaataaatgatgggctgagactcactgggcagtctcagggggccctgattgttttcacaactgtctctatgatccaatcaactttgttctgaaaaaatagctgggattccccctactcctcaccacctccatcaccagctggctgttccagtccaagccatcattgtgtcttacatggatcttcacagtagccatctaaacagactgttcccagcacagcagccagtgcgatcctgctaaaacccaagtcagatcaagtcagtccaatgcctggaaaataccagaatcctcacaatagccttcaaggctctacatgaccagggcccctgccacactcctcttctctcactggctatagcaaccccggacatcttggtcttctggaatgctccgggcagggtcctatcccatgaccattgcatttcctctcctttctacctgggacgctttctctcagatatccaaatggctctcttcctcacttatttcccacatctgtcaaatgccatcttaccttatgatcaaatcagggtaattagcatagctcttacctcaaacattcatcatttctttgttgtgggagcacacaaaatcctcttctcatgctattttgagattacaatgccttattgttgactgtagtcaccttactgtcacatgtatggaaacatcacattgtactccataaatatgtacaattattatatatcagttttaaaaaaagataaaaatttaaacacatgcttcttaaaaaaaaaattccatcttatcagagaggcttacctgggtcaccctatgtaaaatgcaagaatcccccacttccttgacagttattctctctctcattccttgctttttaacccccttggcgccatcagtgcctgccctgtgatgtatttatattgttatttactgactcaccttctcaaaggaatgttagctgtgctagggcaagggctcagctttgccaagggcagcatcgctggctcctagcgtggtgcttggcctgcagtcacagcccaggacctgaccattgaatgggtgagtaacggcagtggctagcagccctctagtgatgtgaacagagcgagttatacgcaagaggttgtgaacatcagggaacctctcaatttgctgtgttatttggaatggctcagcctggcagctgtccccagggtcacagactgctgcttctgagtaaacttgtcacagctgaaggtgagagccagcgaatcaccagcacatgagcggggactgaagcctcagaggagaaggagggtggtgcaaagacagcccagagaggaagagacagaaggcggagccctgcagagcctcgggcagcaatgcaagcaacccactgtcactgaggttgcctttatgtaataatcagtgccgtttattgcatgagtgcatcttctgctgtccttgttgcctcttacaaagaccattgtattttcatcttctcagttacaagcctttgagattggagcagcttgcacgtgagcaaacagctcgccattaggaatcagtctggataagagcaggaaagggctcagctttcttgggcttttcttgccgtgaaatgagcaaattgaaagtgaaggttttcaaggtcccttcccagcccacagttctgggaatttagtcaccttgaagccaagggagcatgtgtgtcactcatttcatgactcagaatagcaggcacttcagaaatacataaagccagacccagaggtggtgttggccttgtggaaagtgtccccttcccatcgctgaccacattgctctagaaattgttttccttggagttgatgtagactgtgatgaagaaccttgtacaggtacatggttttcccctgtgagagcactggctcacacccggaatcccagcactttgagaggctgaggtgggcagatcccttgaacccatgagttcaaggtcagcctgggcaacatgatgaaatgctgtctctaatttaaaaaaaaaaaaaaaaaaggctcagacgaggcttaactctaggccctgctcgactgaggtagaaacatcctcagagcatccccaaggagctagagaaagaacaaataaatcaccaatgaatacaaagatgaataacttcagagaagtacttcatgaaaaagaaaatggcatttgttgaatgtaaaagaacaactgcggtagcaggttatggatcaaagctctcacagcctgaaaattaaaagaccctgcgtcacacggtcctccagggaaaatagccagtggccccacagttctggctacgaggcttcagcttccagagagagggagactgacatctccactggactagaagaaaggaagcctgtgtgcagatgggtggctttgcatgtggcagaccttgaagctagggggagagagccatctttctagacttgtcaaagggcaagaccgggcccttctcagcatagagggaatgtgaacttggactctaattactcatcagttctctcggcagcatggattgatattggtatctcatttcgtggatgaatagagaggctcatagatgttgaggcttggtttgagtcacacaggtgctgcggccaaacgcctctgatgttcctgcagtacgtggcctattctttgggccaggtgctgtgttggctgccatggtgatctgacctcaaccctaccagccgttttggatagtggtgacccctttgtggcagaaggtgacatgagatttgttcctgtggtctgatgtgcccgaggagcacagcacagggagccttgaaacaaggtgccccagccacccgccgagttaggttacacttctcagctgatgacttaaagtattaagaagagacaaacaggcattcttcagtgatacagaaaatgtcactcacaatcaaacattctttcttgtttttaaatccagctgagctatagacctgtcataaaatcatggcatctaaaaggccctttagaggtcctgctggcaggggatgttgaggaaggatttggactttgagtcagacctgtggggtttaattcctggacctgcgccatgcagttcagtgactggacaagatgctgaacctctctgagcctcagtttctcaccttgtgagattgctcaagaatatgctgtcctaataggtgacagaggtcaggcaggaattaagcaggtttttctatgtaaaaggctgagcgtacagtaggttttcaccaaaaataggtgacctcccctcgcgtggtcactcccacccccatcttttctggaccaggagggcacaatcttacccccagtgagcaatgctaaggcctctttatctccccagatccaggctaaagcttaaacctgagcccattttcctttgtctcggctggcaccttggcaggggagaaatatatggaggaaaatcagtacctttgtttcctcccaaggaaaagaaaatgcagaagcctgatgggcgtctcacctagatcacagttcactgggccacgggggcagtggaccacctgcggctcttttaagtgcaactccggttcaagccaaatacctgggcacagatgtgaagcgtgggtggcagagaggcaaagaaagagctggaaagaaaactggcactcttcggagggctgcaggagtgagaatgccccgtgattagggtttccttctaggcccgtattttcaattacagtcataatttattgctattatgggcaccaaactatacttgccatgggctttgcatacacaggaaatgagccagcatttaaacactactcagaaaaaggggcctaatggctaaaaagcagtgggaaaatgcaaacctgccctctcctccttgtcacaaaacacccacctcttcctcctccacttgtccactaaaacacttgcctttaaaaatcaaattaacaacatttattgcttatacaacatttattgggtgcctagtctgccaggctatatggtggaagtggtgaggaaaatggggcactttgaggatattgtccttctctgtggagggagaagggtgggaggttttcaggtcccaagcattctgggaactcagcgtcatggcttggcaaggagacagagtaggcattgagggaggtggaggaggagggtaaggaggatcaggcctggatctgatgtggagggaactgagctagctgtgagtgtaagtccttcctaaggggaaaagctccactgtttggtttgcagtcccccaaaaggctgatgcattctttcttggtgccatggctaagcttaaggcatggctttcagaagccttggacagcagagaaatactgggaagcaggggcaccaccatttctagtttcaggtgggagagctctttggagtgatgtcctactgatgagcaaggtccatccttgggggcttgggcaggcaagagctaggcataggagtgagcaacttggtacatttaatgccaggagctttccgtaggtcctgttggcgggtgtattcatccattttcatactgctgtgaagatactacctcagactgggtaatttataaaggaaagaggtttaattgactcacagttccacatggctggggaggcttcaggaaacttacaatcatgtcagaaggcgaagaagaagcaagtaccttcttcgcaaggcagcagaaagagagaaaagcccagggggaactgccacttctaaactatgagatctcgtgagaactccctcactatcacgagaacagcatgggggaaaccgcccccatgatccaatcacctcctacccaggtctctcccttgacacatggggattacatttcaagatgagatttgggtgaggacacagccaaaccatattgggtttaggacagctttcactcccaagggagaggcagaacagtaagcaagcaggaagatggccagaacctagagtttacacatggcagtgagcgtggggtgtgaacaggctgctaagggtaactgttgtgggcattgcccaagcattgctgatgataagactggtccagtccctgcttgctggtggggcccaggctctgaccccatttgctcaatcaggaaggcccgagcttataggaacatggcttcagaaacaggggccaagaagaactggtgaaggcaggagctgatagctggaaaagtaagacataagaaaaatacgaaatggaaatttaaaataaggtacaaatgatttggcatgtggttggtcaccaaatgaattgcagagacactcctcagaggattaaagtagtgggcagaaaggatttcaggatagggcactccaaggaggagatgaaatttctgctagacattatagggttttatcaaaccccaagaagagagttagacattctggacaggaagatgatgtgcaaaaagcccaaagatgtaaggctgggagatagcaaaccaggtcttgatgttgcagatttgttgtatatatatttatatagatagatagatagatagatagatagatagatagatagatagatagatagatagattagatagatagatagatagatatagatagatagattagatagatagatagatgttatagatatatatattatgtatttgatataaactaatgcatatcaaacattgtttttttggtagagatgagatctcactgtgtttcctaggttggtcttgaactcctagcctcaaacaatccccccaactcagctgggattatagacttgagccactgagcccagcctgaagaaggctttgaaggctaaaggaaggaatgtcgtcctgatcccttgggatctaggcagtggcaatctctatggcctttgtaagttgacatggaggtaggtagtgtgcagcacgggacaaagagatgggacgcagagagactagtgtgaaagactattgcatggcttaaagaatgaattaataaggggctgcatcaggatactgactgtgaaatggaggagagagaatgaattccagagagttatcaaagcaaggatggatgggacatgaggaagaagaccacaaagacagggggagtgagtgacagatggtcacagtcataaaaggaggaggaggagggaaagattgggggaggatggaagatgaacttcgggcctgtggatttgaggtggcaatgagaatccaaatgcttacatctcaaagtgagttatgtgggattaagataaagactagggcttgatcgcacatttgaaaattttctctgtagtgtggatctctctagaagtcacaagggagaccacttccttcaaagagaggagaagaaaaggatacagaggatcagctactcaacacccacttttgatgggctgaagaaggagagtgaacagataaaggaggactccaaggttaagaggcaccataaaaagcgactagataccatttgcaaaggagaaagagcccaaagaagacaacatcaaacattagcagcttcagctgctgcagggagattagggagaatgagggttaagatctggttattggaactgatccctcaaaggtgcggatgatctttaagaatgttgtttccattgagttggaggagctgggattgggggggggtagggaaagagcaggtggcattgaaaacatctaagtagcaaaaggaagcagggatccttatataaacttaaaaagctgtaagtgaaaccaaattatgttccctgacagggaaggacctagtgttgaacacatggcaaagagaagaagcggtgtgtgaagcatgttctggaaaaggcggggaagggctggacacgatggcgctccccttctcaaatccaggggtggaagaaaatgggtgtagaggtggatatttaggggaacagaggactggagcagggttgctgacacaaaatagccactgcttcttagggatgttcaatgagagggtgatggctgtgggtggtaggggagggtgggagaaggcctgtgtggacatttggggaggagaaattctggaatgattcttgtggaggattggctcaggagttcacagggatgagcgaaaagggaaggtgaagctaccaggggcacatgacacctcccaggatgctcagacagccagggatcttgtttgggtggtgggggttgctccagcagaccagggtggaggcttggagacataggcagaggtgagtgagataggggcccatcacactagcacactagcccaccacatactcctggaagggcaggaggctcagaacagttggaggtttggagaggtcggagggaaacttcttgatgaagcaggcaagctgctgatgagtggaggaggatggatgggaggtgccagcgatgagatgacagagatggaacgcagaaggtgatgatgtggttgagggctgggctgtggctgatgcgtacccgagtacaagggactgagatggatgggctgaagaagacagatgtgaggccaggccttggggcggtgacggggctggcatagctggaagggaactgggtgggagtcagggacttaggttttaacaaacctgttgctaagtctttgtttggccttggccaggtcacttgggtttccctggtgaggggctgctgtcagcaccatccttgcattactgtgcacagtagtccttgagagccagcaggggccctggtgatggttcagagcagtgaccttgggtgcttcagcctcacgtggtcacacctccacagaacatgatgctccctccctcctaaccagtgttacatccacgaccccaccagcatctctcatggcatcagaagtggcagcaggcagccatcaccttgtgatactgccacttctcttccgcagggattggaagctctgcatttcagagccaggtttcattcagtcccctcaccagcctcctggcagcctgacctcaggtctggcagataaggtggggctgctgtggtaatccaggagaagtgaggcaggagggaggactggcgtccgtcgggccaccaggagtggggagcctgtctcacctgtgggctgcacctgagtgggtgagcatggcatcagaggggatcacggggtgggttggagtgcagggatgtcccccagtgtgttccccatttcagtcgccctcccagtctgtgaatctaagagcctggccactgaggcatccaggtgcaagctgggtgaccctcagttacgataatgtgactgcagcatctgatgccgctaccatcactcccctggtgctgggcctgggacaaggtgccatatggggaatttttttccccccaggaggctatttttagagtgctccagctgaactgttgctgtgaactctatgtcttaactaggagtgtgtgcgtcattaacgaggcaggtgtgtgcgtcctgggaggggctgatgcgcggttcctaatggtagcatgtgtgggctggccggttgctgctttcagcctgccagggtgactttgctcattgcctctcacttgtgcaggcagaggttgtgtgtgagatttagggtgccctggagtcaaactatctgcctgactcttggctctaccacttaccagctctgtgaccctgggcaagctatggattatgtttgatgtgtttctcaaagcctcagcttgctcctctgtgacttggggtagtgagagcactgatttcatgaaagtcatagggaaatcaaatcaggtaaaggcaaagcatgtagctcttcaatgctaagtgttcagtaaatattactttcttccccttcacccccagaggcttcctcctatttataagcttcgttaatcactgccatggccaagccctgccctaggcccaggagagctggtggtgtttaaggtacgacacacgctggaagcactccttgtacagcaggaaacttgaactgcatcttgagggatggtcaagagtttgctgggtagaaatctagggttgtggggaatgattgtcctatgacagaaccctcctcttgaagcctatctactttctagattttagctgatcgcccagtttcatgggcaggcaggaaagggaggcctttgtcccttttcccgaggatgaactccagccggtgtgtgtgttagatatgtacagagcccagcagccttgccacttgtggggtggctcctttctacttgggtgccttattgtctgtcgggtgccccacagcagagacctcagggttttggtggcaacctgcccagatacggaagaggagaagggagtcagagtggccttcatgtcagggcagtgaggactgtatcaaagcccaaggctcgtggaaccatgtgggggaagcgacatggatacagagccctgagagagggcgcttccaaagaactgctgcctgttgaccattctcttcccctgaatgtgatccatttacaaggtggggacagacttttttcagttgttatatatctgggatatgagcctctctctgagtacctcaagttttttaccagccaagtagacttgtagcttcagtgtatatgcgatgtgtgcatgtgtatatatacacacacacactatatatacacacacacacactatatatatatgtacagtatatctgtactctatccatccatccatccatccatctatattttcccccatagcgcacatttttgtaaagtcccgaagcctctagtttgaagcaatgctgaaatctgtcaactcaatggattaatagtctaatctcagccaatttgtttggcagaaacactaaattcctgaaaccatgtgggctggcccacttgacccctgtcctgggaaagtgaaaaaatacatcccaggtttttgggctaactagcattgaaaatcaatccatttttattttcattttcctacagtttcatggtggccactcttgactcccatttgtattctgtgtgggtcatgttgattaaggaagtgaggaggatggatagacagtaagagggatggcaccgtgcatgcaccacccagcactcccctacagagagaaagctggctctgagggtcaggccagtgccatgaggctagctggcttcttttgacattagtgctcagaagagacctgtttccatagcttatccatgtgggcagtggtggagaatttacccaatccagaaggtagtatagtgcatggtacagcattttccaaaaacagatattcttccaagccgacttagaaatatttttaatcattacattgtttctgtggtatttgataaagaagtgaatttagtaatagtgtaaaattcctggcttcattgttgtgtgatctcatgtaagttgcatcttctctccaaaccacagttcttgcctaatgaggagatgctgataataatacctacctctgagggttgtagtgaggagtaagtaatatgtcacacgggttttcccagacatgtctaagtactcaacaaatggcagccactatccctatcatcacctgtatggttgtgcttgttgtcatcatcgcatcctcacatttttgggtggcccagacttagtatgcccttgatagtgcagcagaaggcctgctgaatccctgatgcagatgtcacttactcttttaagaaagcattccctagccaaccatgcagttagcctctcccattctgtatacatttctcatgtacctatcataccatttatcaaaccatcttttaactgtatgtttgcaggcctgctgtgccccatgagggcaagagactgtttcagagagagacaaaatgagtaaatagctgatgggtgaattcataaacaaaataatttattttgctttctgtcttctctcacagacattttgcaagaaggcagacacaatgcattttgagaaaacaaccactcctacaaggcaagagggttttcctccatccgagaacttcctacacttaaagcaagtaggcgaaggtcatagatttccgtaatagttttattggagacttggtcttcatttatcattcatgagaggcttacttagctcttattacatgctaagcattaaggtcacaaaaatgaataagacacagccctaccctcaagaagcttccactgtggtgagagatgttcacatacatagtcgaggtacttttattgttaacgatgactctgtgcaaagcaagcaccaggggcaccgagaacccagggctagggacgcccgagggaggctgtgggaggcagaggagtgtcagagcctcctgtgccgttccacccagcctaatacagtggcagccctggtttcagaaagcaaaggccaaagctgacttgtggtcagattgtcacacctgcctggagtggcaggaaggcaaagccaatacattttattgctttggctctagattcagccagaaggtgtagtgatgaggcaggaaatcctgtctgaaaccagagttcccatctgttggcataaaatcctgatgagccttttaggggagataaaacatcagtaatattcaagtgataccaggaaattcccggctttaaaaggacaagattttagcagaggaagttggatatttagagttgcatttttttccaaaattatttttagcctccagctatatataacttttcttgctgacttaggtacagtatgtggattcgactgattgtatttaggaacaaaaacagacattttaacacctgtgcgtgtgaacattctacataggacctgctgagtgataccttgtaaggactaagggtaatagtcacccataaggagtcaccaatagaactattaaggaaatctatgaccttagcccacttgccttaaagtgtaggaagctctcagatggaggaagaagctcttgccttgtaggagtggtcattttctcaaaatgcattgtttctgccttattacaaaacgctcgtgagagaagacagaaagctaaataaatttgttattttgttttcgaattcacccatcagctgtttactcattttgcctctctgaaacaggtctcttgccctcacagggtacagcaagtctgcaaacatacagctgaaagatgctttggtaaatggtataataggtagttgagaaaggtttacagaatgggagagactaactgcatggttggttagggaatgctttcttaaaacagtaggtaacatctgcaccagggcttcaagagttgacaggaggcttcccaggaagaagaagggcagaaaaggcaggggcactgggaagcctgcagtgctacctgcagtcagggagtcgtgggattctgggaagcctgcagtgctacctgcagtcagggagtcgtgggattctgggtgtcagagtagagtggctttgtagccagaagtcatcgaatcaactgagtggatggttatgccagcaaaaccgttcactttacaggagaggaagcacagagaaattgaggggcttgtccaaggttacacaagtctagggaagactcacagccagaacttgggtcttagcttcttcaagtgtggcagaagggcttggcactaagtacgctaaagccacctcgaggattccttgatatttccctgcagccttacatgcagccttacaaggataaacttcagcttaaactgaatccacctttctttacagaacatacaaggaaaagtctagtagctgtttgcatcctaaatgtccacatttgtgccaaacagctagcctggtcatattttcaagactatgggattgaaatttattgcattttttaaattattctttttcattgtttggtactctatatgagaagaaaactggagctttcagaaagtattgctattaaaaggtgaggttgaattttttttcttttttttttttaagacagtgtcactcattctgtcaccaggctggagtgcagtggtgggatctcagctcactgcagcctctgcctcccgggttcaggcgattatcctgcctcagcctcccaagtagctgggattacaggcatgcaccaccacacccaggaaatttttgtatttttagtagagacgggatttcactttgttgcccaggctgatcttgaactcctggcctcaagtgatccagccgcctcggcctcccaaagttctgggattataggcatgagccactgtgcccagccaagactgatttttcataaacaaacttaactttaaaagttgagacagatcttaccctcctacagaaactcattctgaagagctggatccttatcccattgatccttaccctagagggcttttgagctccgtctcaaggggctaagatacctttttttccagctcatagtggtggcagaaggtcaggtttcctgaatatcctggtgtcatatccagagccaagtccagtgaatctgttgggccatgtggtccctggttcctctgtcttttgtgcttccagaacacccaccatgcctgggtggcacttagcatttaaatcgtcttttccctattgtggattcactaggttgcaaaactgtggacatagcacagacttgttccctagtgagtgaaaaacatgaatgaaaaaagcaaaagaaactgatgcaatccccacttccatacatatcatgggcagagttcatctcagtgttttttttcttttagtggagtctgtgtgttcatttctagatacagtttggtaaatagaagtgactggacaaacagtaaaaagggagagggcttccctcactttcattcccactcccaggctttaatcttcagaggaaaatgagccttgggtccagtgggaagtgtatggacatactgtgctgtctaacttgcttttatagtgagttagacagttttggaattcatgattagtctgtatttaagtggaatttatgctaccatgtattgacgtgtttgtgtgacgttcgtgtgtatgtattcatccacccactcatgtctgcctaacaaatgtttgttgtgcctactatgtgccaggtgctctctcagtcatggggatacagctttcaaaaggcaaagtcaaaatcttcatgctgcttacatcctagtataagagagacaaaaatttaacatctacacaaagcaaaacaggattagaggctagagaattagtgggaatgaagtgtaatgttttacaaaagtaggccacggaaaacctctctgagaaggtgacatttgaacagacttgaatgaagtgaaggaatgccccagaaaatattaggaaacctacaaatacaaaggccttcccattcatcaacccacctacccacccatccatctacctacccatccatcctcccatccatccctccatctgtcctgccactcatccctccatctgttcatccattcatccatccatccagccaaccagccagccagccttccatccatctgttcatccatccatctgtctatccatccatgcatctatccatctatccatccttccatcctcttaatggcatgtcctcatggtgtggcatattgagagagaatgattactgttccttaatagcagtttagtagacgttatttttcttaggttgtcctttttttttttttttgcttttaaaaaatttttttcttgggttttttgttttgtgttagaagagtggtattttcacttgcaagagatttttaaattcaagaagccaagaagcacttaaggatacaggctcaaaggtaagccaagccaatccctcctaaattttaagttcttattttaaggctgtggatgatacttcatagggttcttgagagaaatgtatgggggacaccataggcacaaaagctaattgcagcaacagcgatgacactaatgctgctgctcttgctgctgctgctgctaccactactactactgctgctgctgctactgtggctagcaaacatatcagtggcatccacttgttgttttggagaatgctaggctctgggccaggcactttccattcttgctttctgatttgtgacaactctacaaggcaggtatatcctattccacatgtgagcaaactgaggctggacatgaggctatgatcaattcttttccttccccaaccattcccgtagctgtctctatgagtttagtgttaaactgggatgatctgggactctcttctcagtcagcaaaggcagaaggaagtgttttgaattctcccggccgtgagtggctgccatctaccttgctgatgccgcgtgatgcatggcagtaagagttaatgtttcccaagggtcctttagcagtggagatgctggaagagtggtacacgggtttataagttacttaacagattttatgaactgctaattaccttgtaaagacattttattgagctagagtgatctgctgttggcactgattgtttacatatctcagtcctttggcctgtttcttttgccccaggtcagcgcatccctgagagctctgctctgtgtgcagcagggaggctttggtgcagttctttaccctgcacgtgtccaagcccgtgtccatgcccttgtccaccaccagtcaccaagtgtagggatgggtctctgtttctccatccggtaactccttaactgtcgttaggaaaggcaagcagaggaactgcagtcttgggtgtgacctcccaatttgactactagatttggcaagaaacaagagccttggctttcctatctgcaaagtgaaggaaagaatggagaaggcaggtgtgtgttccttgtctaatggactgttcctccacagcctataagaagtttctcactaaggagacagaagtgacgagagcaggtggtggtatgtttaacaaatacctgagagcaagtagaactcatcagcttctgttttatttttatttttcctactgagtagaatgccttaaaatggaaagtgtgggacaaacaggtttacaaagcagctagagtccacagtaattaaaaagaaaaaaaatagtctaggggtccctaagggttctatgatttctgctttccgttttcttcagagaatttgatgtgagttcataggtctgtaaccagttatttattttaaaaagctatgcaggacaaggaaagagacatgtacaaaggaggtggccatgaccgtcatggttttcattacactggtaaagatggattctgaaaacaatggacaattcatgagagagtgtaacaacattcccaccaaatgtctagcatagattatggccgggcacagtggctcacacctgtaatcccagcattttcggaggccaaggcaggtggatcacttgaggtcaggagttcaagaccagcctggccaacatggtgaaaccccatctctactaaaaatacaataaactagcttggtgtggtggtgcacgcctgtaatcccagctacttgggaggctgagacaggagaatcacttgaacccaggaggtggaggttgcagtgagccaagatcgtgccattgcacttcagcctgggtgacagagtgagactttgtctccaaaaaaaaaaagggggggtacattattaaacagatggtgagctttgatagaagatctctgggagttgtcatgagctctctaaaaagaagcaaagccaaataatgcattacatttttgatagggtcagtattgtgacaataaatgctaaatacgtgatttcctggagatgtagaacaaacgttcttttaatatccttgtgaactttctaaacaacaccacattgctttatttgttgagagataaactttgtgtaagacacaggctaatgcctttacatacgttgtcccacataaatctcaaattcaccatttgacgaaggtaccgtcatcgtttttttcgatattgtggatgagcaaataggctcagagatttagcaacttgcccaaggtcacacagccagcagcagcaaagaggagtctcatcctggtttctctgtcgtcttcacccgtgctttggccacagcaccgcagtgctctctaaggacttctgtaagctgcacagtttgctcccgacgcatgcattaaaggattgacattggtctggaaagacccctggtgtggagtgccacaagactgtgccctttgctttgtgccgttcaacatttttatccatgtccctaacgaaaacacaaagacacacttaccacataaacgaagcagtttgcacaggctggaggaatagatcatgaaaacaggaccgcgtaaaataatctgtcacacccgtggacagaaacctcgactgccattgcaaagtgcacaagtctgcagcttggtttttagtttattttagttttcaggtaaggcacgaatgtgcaagaggaagcttaggagcagagtttgagacaaggatgtgggcagttaagagcctgcactgactcctctgatcacagcgttcggctcaatctgcacaaaccatgttgagaatcttccctagaatttctgccgagacttagcagtgggcacaaaacccatcactctgcttatgtgctgctgtttatactgggtgcctctgagcaccatgtgggaaacaaagaccagagtctcttgtggaggaagagagggcagcacacagtgggggaggctggtcggtcgtatgtcaggtgatgatggtaccagaatggctgggggcctcctgggaatttccacaagtcccttgaagtccccagccaggggatggttgagtccaaatccgaggcctccaggttcccattagcatcctcgggaagccacagcaccaaaatctgccccccaccctggcctttgctgaccccaggaatagctccggctcctgcccctcaacatttgcaggatgttcgccaccatgcttcactcagcaaaagtattttttctacagatgtttattgaacgccgacagcactagacagccagtgttctaggccctggggatacatttttaatgaaatacagagagaaaagatgaggagagaaaagacacaaattccagccctcagatctgagagacagtctaacccagagcccagccaatccaatcaggatttgggacctaatgcaatattcagacagcccaaatataatcgttttaagctagaatgatcaggacttgggtttaaaaagcaaagtagattttgttccacaataaaatcactgcttctgatttttgtggagaagatgctgcaattaggggtttttccattagatccgaagccaagtggagaatgccagaagtttggcattcccaagaatttttgtaggatctggaaatgagagtgttttgctttttgctggcgtatcagttaggagatcttgacgttcttgtttcagctgcaggcacaagtgtgtgtgtgtgtgtgtgtgtgtgtgtgtgtgtgtgtgtgtgtgtgtgtgtgtacgtacatgagaaaacccctgacccatggtcaaacaacccccaaaactgccagttgattagaaaaatgtcctgtttccttcaggccccagaggacatacatttaagtaaatactttaattaaattacatcctgttgccaagtaatttcttaaaagagaggcggtaaatggaatctcttctgggaaagtttgctataattactggatggctttcttggggaggaaaatgtttatttaaaaactccgcagcctcttatacttctatgccaggtctctgaccctgggggaaaaaaaggaaacttgttcacttcctgaggttgccaaatttaggatttgtccctggcgatgggaacagctatcagggattgttttgccttcccagccaggctcctgccctggagtgggcatgagcggcaggacccctttgctctggggattaaagatgtttgcactggacccaaccagagactattcccaggcttggtaggtgtccatatataaactctccgttccgcatcttttacctacttaaacgtagtcagtgcctgggcaaagactcatgtgaacatttgtttttgaaaaatgtttgttttctcataaagaaatacatattctctgtagaaaatttggaaacacaataaaggctaagcaggaaaataagaatcattttcctacaacccagggaaaaagtacatttttgactgttttttttcccctccttgtattttttttttcccaaacacatatatgtagtcgcgctgacactgtgtaaatgaattatttcataagattttgtcaaaaggaaaggtgaatggcctctggccccaggatctgggctcccagtgcagctgaggcctgctcacttggcttcatacatttttaatagaactcttccgtctcacgttatgagagataaaagatctatgattcaatcaggcaccttcttggctcaggtgaagagtctgtgaaccaaaaggccacaggtcaattacctcggagctgctaagaattgcagcctgccggctcagtctggcttcaaccgttgcattattactctaataaaatgtcctcggctacattttcgtaacagttggtgataggagtcccaaaggggattgggcatttatcttgaacacgggctctgcccacgttcctaccatagcatagcaaagtttggcttaaaattgaatgcgatcctcctgttgattctttctgtgtgttttatcccacaaaatgccccaaagggttagttggttttcaaaagctacgtgttagacacagtttggtctttttttaccctcctttcatggccttgagattatgaattgatgcttttcttagatgaataccaagagaaaagaactttacaaaataacaaaatttcatcctgggaatccacagtggactcttcttgctttgcggggagcttctggcagaagctctgcagtggggaaggatggtggtggtgggctggcacaggcctgtatgattatatttcgtgctagagccgcagtcagtaacacagccattactatgccgtctaagacagattaaaaacctggtgtcttttctgctgattgaactctggaaacttaacatgaactttgaagaactctgccctaaatccagctcactgaagggataaaatacttgggacacattaaatctaaaagaatcttcaggtcatcttttcttggacctcggatttacagatgaggaaagtgaggctctttgagggttgagcaacatgctctaggtcccaccccaccatggcagagaggaaagtggtgcccacctctccatagcctaagccatgcctcacctgtgcttcctggtacctcttagcgctcgcattctaagtacaccggtgagtacactactgaactacgtgttgagatgggtaccatggaaacgagagatgcccacccttgactcagcagttggattactttaaaaacagatgccaacctatggagttcccattttgttcttaactggaatgagtgtgctgtagaattacataaatgcacctgtagctgcagcatcttgtctgggcttgggctgtaccctgtgagggagggagggacgctttgagggagggaaggggaggatgtttcatcaatgttgccaatgtctgctatgcttttaaagaaatgttctgcacgcatttctggtatccgctaaggctttatttagtggttccagagacccacaggaaagccaggggtaaggaagagaaaagacaaaagacatcaatagagctatgaatgagaaaaaaaataaaggagttgaacaggaggagttttttcaaagagatgactcagtagaaaaacaatagcagtataaaaagacttggaaaagcatgaagagaaagaaagagtgttaataatgttaacctttcggaacttatccagtgcacagcaggaatgggagcctgttttgtttggttgaaaacatccacctgacagtaaagacttcctaaaagcccaaataagagggctgagtttgcagctcaattgctccactgataactcctcatgctccttggggctgcaaaggttttgggagcatcatttcgtggatccctgaccttgactgtcttcctcttgggaatttcactgtacactctgtagaagtgtggtatgtctgaggttagcacctagggatgccttcatcaccttcactcttgggaggggcatagagctgggccaaggacacagtcttttgcgggtacatagtaggtgaatatatttatggggtacatgagatattttgaaacaggcatacaatgcataataatcacatcagggtcaacagggcatccatcacctcaagcatttatcctttctttgtattataaatgattcaattgcactattttagttatttttaaatatacagtaaattactgtttactgtagttgccttgttgaagagcacagtcttttgagcaagactgagcgtttcatcgtggaccgtgccacttactagttctgtgatactggccaagtgggtaggaattttcgagcctcagtaggtatctgtaaatggatgtcagttctgtccactctcaggattggcatggggactgaggcccaggtcgtccatgcatggttgtcgttgttggtagtgatattcagtctaccctcattcttggaccactgtgtgtctttcacttagtgtcgggtctctgctgtagcaatgtttggccaagactgggggccagaatgagttctctaagaaaaggctggcattaaatattgtccagtattttctcaagcccagagggtcacaccatgtgcaggcgtgtggcagggggagaatgagggagcagtggggccaggtgtgaggagaactgaactctccctgggagcatctagggatgcctccttgaggatgcagaaccacagaggtcctcaaggaaaatgaggacttcaacacagcattctaggtggagcgaatggctgcagggaagtctgagaggctaagtgtatagggtaattcccagtctagggctgtgttatgttttcattaccatagagtcagtgcaggggtggtgagggtgtgtatggtcggtgctgaagctggaagggagggattttggataaggctatgaattttcagattttactgtgcatgtaatggacaaactgggtgaaagctttgggtagcggaggtgctctctgggttttggcagaaagccctgggtgcggtgattgggtaggttggagtgggcagcatcttgcaggtgcagaggcccccatcgaaggcggttgcgatgctcctggcaaaatttggggaaagcaggccaagttggagatgtggtgaggagacagctttgaggagcatcatggaagcagtactaaaaagatttggagcatggttggattgcccttataagggacagagaagagataacaattactctgaaatttcaagtccatacagctggcagctgtgataggaagtcaagatagaaaaagtggggcggggcgggcggggtgagagaaaacaagtcacatttggacaccttgattttgaggcatcaggggaagtccatgtcagtggatttagctggtagtgtgggatgtgggtttagcacttagagcatggatcagagcaaggtatgtacaggaaactttgtgatgctatcttatttatatagaattttagaatttaccaaagaatctcacgtgtaaaaaaaacaaaagaactccatggatggggcattgtttttccattctgggatgaggaaactgaggccatgcctacgtaaatgtattgattagaaaagagtcaagttgaaggagatttctgagcatattgttccagcacctgcaagtgtggaaatggacacggatgtcctcttagtatttctgccctttggagagacttctgcaaccctcctctcctccaagagcagggtaacttcctcctcttgcattctccctccaactctcttccccttagtggagaagtaacgatgttcacgcttgggcagctggatggacacgtcgtggagtgaaaacctaaagggaactaaatgccgagacggtgggcaaaggagaacgagggaggagcagagggtgacttccagctgggactggcatgtgttcgttcagcccgagcttccacagcacaccacatgctagcttaagagctgtgcatacagcagcaaacaaaatagagaaaaatcccttcccactcagatcacatattccagtgagggagagagacagtaaacaatataactaagcagagtaggtggtggctcgctggtggcaaaaaagacggggataggagtgttgggagtcgtacagttttagtgtcagaggggcaggtctcactgaggttttggcatgtgtgtaaagacatcaagggagtgagggacaagccgggaggttatctggaggaaaaacattccagacagaccagtgagggctgaggcttattagggctggagcaggctggcgttgatgagctgggagcaggcgcatgggtgggacccagtgagggagggggaggagcagaatgaatgggggcgccatggcagatcacgtggagtcctggtgaccattgggctgatcttggcttttatgcagaaggacctgggaagccattgcagggtgctgagcagagaagcgacatggtctgacaactcctgggtgctctgtggagagtggactgtggaggagtgaggaggaaagtgggggctgtatgcagggatccaggagagggatcctggagacttggggccggggatagcacagatgcctcctaaaggaagcactgacagaatgttcagatggattcgatgtagagaaggggaagaggccagaagtccagcatgacctgagtaactggctaggtgaggctgccaatggatggggatggctcagagagagcaggctggggtggggtgttttggatgcgctatgctggagatactgctggaacatccaagtggagacgatgagtgtgcctggaagtcgggggaatgtgagtttatgagtcatcggggtagagatggtacttaacactgcgaggctgggcgagatggtttggggcatggatgtaagaaaaagggagcctgcagcaactcccttgctgagcaatcagaagaggaagacctggcccagagaccaggggaagcatccagggtgggcaggaccaggtggaagccctgcagccacaggaagaaagtatttccaggaggaagcaggaccaactgggttcccaaagtagaggatggatcaggtcaggtgacagcgaccattggattcacccactttcacgcctgggaaggcctcgttcccatgtcccctccagtggtggcatgtggctatgggaactgtcattgagacgttggctggccctttggccagtgaaaataacgcttccatgtatcaattctgtccctgcgttagtactgatagctctaactgtcattcgctgatttcctgtttaatctgtcaagtgatctacgtctaccccctcatttcattctcaccatggcactgtaaggttaccacattttgcatctgagggaactgaggtttggaaagattcaatggcttgtccaaggtcatagttaaagaggcagggcaggatggagaatccaggacaatgaagctcccaggtacatgggtttttgaactgtgggtagttactccagtggcccggaaaactccagggctctttctcccataccggccatgtacagggtcagccttctatttttccaggtggcctcatgagttctctggagacccttagatgaatttgtagaacaggttggtaatgaccccaaatcaaaattgctctgtgctgtatatgttatgtcaatagcagcgcaaaagtgaactttgccaatgggaaacatcatgattttgctttttccttcgtccaaactgtgtttgctgaaaatccctgtcgtatggcccaaagggatacagaaacccagatctgtttaaatatagaatatataaactcatggaaatatgcacatataggattattaattctaagaagactcttgggcagatagagtgatctaagaggaccaggaaccaggctgtgggctgcctggttttgcttcctgttgcccccttgctgacaacatgaggctagctcctgccagccctagggagctcaccacaggacagtttagagagggaggacaaagctcacataattgcaaccgtgaagtggcttttaacacccgtggagccccagacctttaggacctgtcctttgcagaggctcttccctgagaagtccctgagagtgtgaatgtcccccagtctccatccagtgttacttcccagcccagaaaaggcattgcttcctctcctggggtggggatgcagcccagtgctgtttgcagagcctgtggcttataaagcctggtggtagggaaaagacagaagttttgggtggtaccacaatttgggtccctggaggctggtcccatcctgagctcactggcaaggaaggggtctcatgcactgcctagtgtagactctagtgtcagccagatgtgcccacgacctgtttctgccaaaacactgtctcttccagtataactggggcgtggccactgcccagggcttggaccagcaccaccaagccactctccaactgcagaacatcccaaggccatgttgaaattagaggaagatgccccatctgttttctagatttctcctgcatgtctgacaatccttctagccagctggatttcatgaaacccaaagtggatcttgcctggagcacattcttttctgatttttaaagccaatctgagaatttgttctggaaaatgtaatatgtgtgcttcttttgccagcctattattgaagaagggctggcaaaataccaaattattgaatttggtatctgaaaaaccttctgaggttttcttttcttttttttttttttctatctgtgtttgagtttttctttttctctcactgaaaattccacttcgccaagaattaagggactctagctcctgggagctgcctttaggtttaaacactgacagctctgcattctccccaccctgggcagcggcattgcttaacccaacctctttacacaccttgatagggagctgtttgcctccttcaaagccacagtattttttttatcaaaaaaattgtttccattatcactctttggtcctgagttctagctttgctgctatccaattaaatttgccttcctgggctgcagattcatccatttcaaaaggaccaagtcaggtggtctctgagacttcttccagccctgaagtcttgtgactttgtaggttcttaatttcttaccttatactgtgctgggaagcacccaaatctcgtggtaattacatttttccttcaacagaccattagaatgtgacctctgtgaagacaacagaaatggaggaggcgatccatgggcatcttctgaagctgttttggttaactttgatttggaagtcctggttccaggttctcctgtttcctgggaccagctccagaagttcattattttcataaataataaatgaatgcatactagggactggacactgttttgagtgctgagtatacagaagcgaataaaaccaaataccctgtcctcacaagagcaatatgcaatacggtagcatcatgccgtgggatggtcagttgtattctgtaagccccctaacaggtttgattctccataattagtttctcttgcttacaaccatcatctttaagatccacaatcattttcacctacatagtatttggtaacaatgttcatgccaaatgatatgttttactgccagacaagactgccttttcttcctggcttgtcctggaggattcatgcattcttcattaaaccctccaaacagctctctctgtatagataggaacctgatgctcagagactgatgcgtggtgatatttcaaagaaatggtcaagctaggtttccaacccagatccccgactctaaatctaggcttcttttaatgaaaagcccagtgcaaaatgaagtcatgtgtccatataacagggagtcagcttctagaatgctaaacctagaacttatttcatgggtcctaattatcagccttaacctccacccccagcatgagttaaattcctgacagatttctaaaatggtctttgcatttctataacaccaggtttgcattactaaaaagcatgctttcactttatcgtcattcattcttattctcactgtcaagccaactgtgtaatcccctggaagacatagcccaagacttgatgttatctacagattacattgccttgctccagcagttcattcaggaactagaatattagcaggcttccttcccttcagctggtttttaattttttacccccagcttaccatagcagcttagtggtgagcattctggcaaggttgtgactttaacaccatcacctgggtctgtggtttatgacaaggtgatctgtccttatccatggctgttggatcactagagtcccaggtaatgagaagagcagttaatctcacatgtatagtagtgagacctaaatgcctcctgtgctccttactaaaatgatttgaaggtgaccaagaacctcccatgaagatcacagaagagcagagtgtactggagctgaaagacatgtgttcaggtgtttgtttctctaaggaagcagtagagaatgtgaatagatgtgctacctcatctctctgatcatgtgtcctcatgtttaaaatggagataatgatcccagtctgaacaaccttgctggttggccaggagaaaatatatgagctaataatgtgtgtaaaggcactaggtaagttacaaaattctgtaccagtgtgagatcattatttgccttctataaacataaaaagtgattttcaaaaagggaaatgcatgggaatgtagaagtagctggctattttaaaggacacatgcaaaagtctcaggatacaaaatcaatgtgcaaaaatcacaagcaatcctatacgccaacaatagacaagcagagagccaaatcatgaatgaactcccattcataattgctacaaagagaataaaatacctaggaatacagctaacaagggatgtgaaggacctcttcaaggggagctacaaaccactgcccaagaaaataagagaggacacaaacaaatggaaaaacattccatcctcctggataggaagaatcaatattgtgaaaatggccatactgcccaaagtaatttatagatgcaatgctattcccatcaaactaccatggatattcttcatagaattcgaaaaaaactacttcaaattttatatggaaccaaaaaagaaaccatatagccaagaccatcctaagcaaaaagaacaaagctggataaatcatactaccagtcttcaaactatactacaaggctacggtaaccaaaacagcatggtactggtaccaaaaaagacatatagaccaatggaacagaacagagacctcagaaataacaccacacatctacaaccatctgatcttcaagaaacgggacaaaagcaatggggaaaggattccttatttaataaatgttgctgggaatactggctagccatatttagaaaactgaaactggaccccgtcctcctcaagatggattaaagacttaaatgtaaaacccaaaaccggaaaaaccctagaagaaaacctaggcaatacaattaaggacataggcatgggcaaagacttcatgacaaaaatgccaaaagcaattacaacaaaacccaaaattgacaaatgggatctaattaaactaaagagcttctgcatagcaaaagaaactatcacagtaaacagggagactatagaatggaagaaaaattttgcaatctacccgtctgacaaagatctgatatccagaatctacaaggaacttaaatttacaagaaaaaaagaacccatcaaaaagtgggcaaaggatatgaacagacacttctcaaaagaagacatttatgtgactatcaaacataggaagaaaagctccatatcactgatcattagagaaacgcaaaacaaaacgacaatgagatagtgttttgtgccagtcagagtggtgattattaaaaagtccagaaacagatgctggtgaggctgtggagaaatagtaacacttttacactgttggtgggaatgtaaattagttcaaccacatggaagacagtgtggcgattcctcaaggttctagaaccagaaataccacatgacccagcaatcccattactgggtataaacccaaaggaatgtaaatcattctactaagaagacacacgcacatgtatgtttattacagcactgtttacaatagcaaagacatggaaccaacccaaatgcccatcatgatagactggataaagaaaatgtggtacatatacaccgtggaataccatacagccataaaaaggaatgagatcatgtcctttgcaaggacatggatgaagctggaagccatcatcctcagcaacataacacaggaacaggaaactaaacaccgcatgatctcactcataagtgggagctgagcagtgagaacacatgcacaaacaccagggccagttggaggcttgggggcaaggggagggagagcattaggacaaatagttaatgcatgtggggcttaaaacctagatgatgggttgataggtgaagcaaaccaccacggcacatgtatacctatgtaacaaacctacacgttctgcacttgtatcccagaactcaaagtaaaaaattaaaaaaataaagggcgcatgcaatttggcacccagcttcattaatactaattttgcatctgtcaccttaatcttttcaagaaagccaaatattagaaaaatttggaatgtctattcaaaggcatggaaacagatcagttctttgaatgtttcaggttccattcagattttggttttcatgctaggccagtgaattttggagatactgatttctaatgagcatttgaatctgctgtgcccagagatatcccagtgtgaaatgagagcaatcatgttatcttccccaagttccaggcccaggaaatgggtagtggccaaaggcagatgatgcaactataaatccatccacattccaagagcagtgtcctaccatgacactggtaccttcctctcctaagaacctgcttggtgctctgcctgtgcaattttgaggagcacgtggtgtatacctggacaatactaccagcctctcccactgcctgtgacatattaggccatctagggatattagggtgggtcaggtgaggtggttctgaaggagaacagattggtcctcagccttctttaattactgtcctttgactatgggtctcaaacatcaaaagtgtctgtggagctgtttaaaatgaccatttccagatgcaacgtgtagaaattcaagttgacttagtctgggatctgggcctgggaatcagcattttgatgatactaagattgattcggtttgagcaatcctagtcctctgggcatgtgtcctcactcctcccgacattctgtgtggcctggacccatctgacctcagactttctgcctccttcatgatgcccatctcatggggttgttttgagcattaaattgaatgtgatgctcttgtagaaagtgtctagtctacaggaagcctcctgtagactaatatgcctagcccccttcccttgtaacaaccctggacaggaagtagaactggctttatttcagctttcctaagatgaatgacagtgctttgttcctcctaacccttttgtgcatgtatagtacaggtatgtttccatcaatcaacaggtatttatccagggcacacatcttgcagaacaggcattgcagaggcagggagggagacacagaagattcatatttcccagcacaatagactagaagcccttttttgggaggtgagacttcagcacatgaatcacatggttgccaaatggacagaacttctaagaaatcagctaatatacagcagaagactaagttatgcagtttttttgtatgctgtgaattcagggaacagggaaagcaatggtagactatgccagccaatggagtctcgaatgaactatgtggtctcttcaacccgtacattttaaatgcagatggagatgtcaggtttcactgaatatatgtgcatatgtgtgtaattcaaatcatagttgcagaatctgagggatcttccacttatttagagcctgccctattcttcccatccttcctgcgtgtcacctgacatttagaaatcagaactgtagaggtccaaggagacgaaataccatcttaggtacagaaaggaattcagaattagaagcacataaacacagaggataagtgtaatgacatttaaatatttaattttaatattttagccaatctgtatgctgtagatttctagctaaatgatgtttatcacattctaatcatgtaattggagggttggcaggaagtatggtgggggtggggtgttatttaatttaatggccatgaggctcagcttcaaaccaaataatgagcagaatgcaccttccaaagagtgggtggaagcaggcaagaggtccaagaggtctcagatgagccccatgtgactctggggttctttaatggcgctctctgcattcttgccctgtcctctctcagccagatggtttcagtagttgatgctgttttccatctacagcaagctattctcatctttccttgagtaaacacttttactctttctttttactgctaccatttaacattcacacagtgtcagaaatgtgccaggcagaggctgtgcaaacctactcagatcatcttgcctagcgaacttaaaattaattttaaaagggaaaagaggttgactgttgcagacaaaagtggaggatgacttaagggatcagctatgactgttttattatgccgtctagaaaatgattttgaggggatccacacggttgggccaattgatgtaggaacgaggctgtatgtctgcttagcttattcatctacctgctgaacacttaagagcattgtgacaggccctacaccgggcactgggaaatggcagagtcacctcctgcttcagaggagcacacagaaaaatccagcattgcccacgtcctacaaagcacagagaaatgggccattgactgtaacatggaggtggaggtctgagaaggtgcaactttaatgtgcctcaaagagtgggtaggtgttcaccagatagctgagggaggagggcagcctttccatgcaaagaagatagtgtgtgctaagatgtgaaaatataggagagtgaaagcacaaggcacactgagaaatcagcaagcacaggacaggcctaggagaagtaaaaagttgatgtcgtgttttgggaacagtttccacccctagggtgtcaggtgatcttttaggccataggaagtcatcagcaggttttaaggtgtgtattttagaaggatgactcaagtggccatggaatcattagaagataagagagagattctagaatcaagatgacaaggatgggctcttctgggttaattgtgacttttttggtgacctacctttgtgcagttgtcacagacatggctgtttgatctgccaagagtcatttggcccagttgtttgagctgtgatgttagtagttggccaactactaactgtgtttgctttccatgcttgccagttgaccttactccttgaccagaaccagcctcctagccatggttaagcttcaagggtgggtgggtgggaggaagtgtttggacctgttttacccataaaactaaggtagagtacagatttcatggacggcattgcccatgggattatagacactctgtctctttaattgcaggccatgaaaacaaacaggggccaaacatccaatgagaattaaacatcacacagtgcaggtgctcttgctctgcctgtataaccagcgatagcaggccccagatgtcaggactgccagcctctcactggcccaggcaggctgtgaacgtcagttccactgtgtgagaagcatccttgagtcatccagtccagcccaaccccagagcctaaacatgctttgatacctttttgttcaggactgcccaagtttgaatggcagcttttcaataggctccatgcatagacaagttttatttcatttgtattcctttcttagctgaagttcccaccaggttcctggttcacatttttcaacccactgcatctcatccattttctttatttccacataatgacaaccactttcatagattgcatgtcaacagtcttgggtgttttacatgagttaattcattcagttcttactcagaaccccaagaggtcgaaattataaccctccttgtagagatcggtccaggggaactcagggaagctgaagcacctgttcgtgcctcccttctcctgtttctccctggtcggtttttccatcccccctgggagcctgcttcctttctgctttccaacatattctgcatgcttctgttgcttctgcttcccctgtctgaaaaggaacttttctctagacccagctactccttccagcttcagcctggttctctcctactcttgccgtaactgtatctggcagcttcatagaccattatacgaattcttaggatctagagtcagccccaccagtgacctctgcctcatctccaccatgaccttcccggggacactctcctgtcttggcttctgggaaggagggcaagtctggcttccctcctatctcagtgcccacaactttatccctgcctgcgtctgctcttcctctccagtcctggaatgatgtgtaccccccgaaaccaatttcacgaacccctgttcctctctctgggaacttatctcttatcctgttcagacaggccccaactgcaggcatattctgtctgctagatcactagataaaatctcttcccattgtgggtttcagtgacagccctgccacatcctcattctctcaggcaagcaaacaagaggcacctttggctcccttctcccagcctttcccttcatacccaagtggacaggaagtcttcctagatcttcaaccctggaggcatccccactctggagctccttcctccagatcccatcacggtcagggcccctcaccttcctcctcctaggtccatgtgtcttcaggtcatcctgtgctcagagactgaggcagcccacggaattgctcttcttaagtcgtcacctgcctaggaggctgcagtggctcctctgccaactgttgcatcaagtccagcctgtctgatgctccagcttctacccaaagtgccacccgatctgtccatcgattcctctttcccttgactcctgacgtagtctctggcttccaacaagcagatcttctaaggttgtccccatcccctcgcaacacctgctctgtggttccatctgcttctccttggcctgaacaccctctgagcatccttccatctctcatctccagccatcctctgagccttggctcaaatcttgatccatctaacttctgaaattaataattaaaacatgttgtctgtaatcccagcactttggaaggctgagacaggcagatcatgaggtcaggagatggagacaatcctggctaacgtggtgaaacaccgtctctactaaaaatacaaaaaattagctgggcttggtggcatgcacctgtagtcccagctactcgggaggctgaggcaggaaaatctcttgaacctgggaggcggaggttccagtgagttgagatcacactgtcgcactccagcctgggtgacagagcaagactccatctcaaaaaaaaaaaaaaaaattgtctcttagagtaacacatactcattgtaaaacattttaaggaacagaaaagcatacacaagagataaaaatcacttataattctgccacccagaaattaccattataatgtgtatggatccttcaaagaaataaatgtgcatgcatataaaggtaatattatttttacatgactgatattatgctatttatcttctgtaaccactataatatgaaatttttcctgtcccactaatttgtcttaaaatagcatttttaatacctgtataatagcctttcatacagatgtgcaattgatttatttagtcagtcttctactctaggtcattttgtggcttccaccttttcagcattataaataacaaatgtccctatttcctatctctagtcatttgttttggacattatatgatttagaattttttgtaatgcagaggcaaggtgcatttattgagctactgcggagtgccagcatctatactcagtatttccctttctcacataagccttcagagcctccttgcaaagtagatagtatcaatatctccagtcacttggcttcagtcacccagttgctaggatatgaggttcaaatttggctcagcctttgatcccaaatctaactggcatcgctctgtcctctcgtgatggtgttgacagtacaccggtgcgcatctgtgggcaagctctaagtgttaatgaagggaagggatggtttcatttattttattaccattttccaactgggttataagatcctcctaggtgtctgatgtatacattagggttaatcttagacctaatcggagctggaagggattttctcattttataagaaactaagaggtttaagaagtatctacagtgtcagattgtaagctatattggacagcctacagtggacacataaaaacatcttcaaaaagttattgtcggctgggcgtggtgggtcacacctgtaataacagcactttgggaggccgagacggatgggtcacttgagatcaggagttcgagaccagcctggccaacatggtgaaaccttgtctctactaaaaataccaaaagaaaaaaaaaaatacctgggcgatgtggctggcaggcacctataatcccagctacttgggaggctgaggcaggagaatcgcttgaacccaggaggcggaggttgcattgagccaagatcatgccactgcactccagcctgggctacagagtgagactctgtctcaaaaaacaaaagagtattttctttataatatagactttcttttctgtgcacatgtgtcagaatctgtagctgtactgaagtgcagtacaggctgccttgtccaaggctgcagttttggtagcccctgtactgcatcagtgttgaagaatcaactgtgaagccccatgtagctcacctgtgaattccttgatttacttcaggtagagcagagctatgagaaggctatagtcccagcttaggatttcattccgcagagagttaaaatctcaatttttcgttgtctgtcacctaggtctgtcttctttaggcaggtgtttctcagactgttttcaatagggctggcaagggccctgtgaatttctaatttctgatttctaatgagctcctgggggataatgatgctgctggttgcagcccacacattgaaaaccattgcctttggccattaaatatatgtatatataaatatatatatataaatatatatataatatataaatatatatatataaatatatatataatatataaatatatatacaaatatatataatatataaatatatatacaaatatatatataatatataaatatatatacaaatatatatataatatataaatatatatacaaatatatatataatatataaatatatatacaaatatatatataatatataaatatatatacaaatatatatataatatataaatatatatacatatatatataatatataaatatatatacaaatatatatataatatataaatatatatacaaatatatatataatatataaatatatatacaaatatatatataatatataaatatatatataaatatataaatatatataaatatatatacaaatatatatataatatataaatatatatacaaatatatatataatatataaatatatataaatatatatataaatatatataaatatataaatatatataaatatataaataaatatataaatatatataatatataaatatatataatatataaatatatatataaatatatatataatatatatataatatataaatatatatataaatatataaatatatatatctgtaggttatacagttaacttggtgtttttggccccactgtttaaaatggcaaaacctgtgtcattcaaaacctatgtgattcgaatcgttcatcctttacatcttttgaagtccagaatgtgttcatcggtttgtaatcagcctagttatgggcttgagcctcttcctgctcagcctcaggtcctcccaccaccagctgcagtttcagtcccatccaggcctgagtccatctttctcaagccaggcaatgtaccgggcacttcatctgagcaacggatgcccagaaccttggatctcgagagctgaggttgggtgcccaggacagtgatgttctcactgaactacagggtctgctgttgcctctctctgcccctaatagaccacagccatttgcctggagtcctggactgccaccttgttagcttttgacagtcacttctccataggaactgcttctctgctctgtccctgagtggcatctagaatctgtttaaactgcctcagacctccccagaaccccagtatctcattgtagcacccacattttactattgcctggacttattctgccatccctaccccaaacatcagtccagggacctggcacccacttctgatagaggtgagtttgctgtacccccatcggactctgaaattgtgctgccgtccctctctctcctctcctggggaagtcccagaagctccccagtcctgctgctatgaaatgtggtcgtgttgtcactgggaaggagtccccaacctagttgactgcaataatccagacttcctagtacagtgtctcatcctcagcagcactgacattcagaccagatcgttgttgcttggaagtgacctgtgtagaatgtttagcagtgtccctggcctctactcactggattctagtagcagccccctaccatgtaaccaccaaaaatgtctccagatatgtcacatgtctgctggggaggtaacccgtcctctccctgcattaggaaccactgctttgggaggccgaggtgtgcggatcaccagaggtcaggagttcgagaccagcctggccaacatggtgaaaccccatctctactaaaaatacaaaaattagccaggctagtggcgggcacctgtaatcccagctcctcgggaggctgaggtaggagaattgcttgaacccggaaggcggaggttgcagtgagccgagatcacgccattgcaccactgctttagagcatttgtgcattcagcagtttctttattgttgtgaagcaggttctttcaccaatggtgactcactgaatgctcacataactccatgaaatgattggctttagccccattttacagatgaggcagccaaagcctggagaggttatatgtgaaaggataacacaggaagtgccaggaccaagatttgattccaggctggtctgacgtcaaaacccatgatcttagagatgagtggttacaaggaaaagacacccattgatagggtttattttaagggtacagttggatagtttacaggcaggtcgtgcctgcatctttctgcacagtggcttctcctcctggcctctgctaccctccctgctttagcttcggtgccagccccagcccccaaccttattaaagtctcttagtctctgtgtctgaaatccagattcccaggaaaaaaactatgtgattggctcagctcgggtgagtgatttgctcaaggttcaataagcggtgtgtgttcagggtgggtttggtgacggaaggaagtgactggtttctccagtacccccaagctcttgcaactgaccctaagctaccattgccctgctgtcaccatggcaacggaggccaattctgcccaacaccttgggacaaagattttaccaaccagtgcctaggccacagcatcctacaaagtgaaaccactggagatgtgggcagacacatctgtttcttccatttagcaaacaagtggagctagatcagccccccagaaatcgatctttaccaagacttaatgaagagttagctagttaatagcccatgacaaatccaaacgctgttagaggtctgacaacctagatattaacagcagcagtggccagtttccaagagattactgacatttagggccattcaggaagacatctgggaggaaatagtcatggaattgtttaaggcccagctagggaggcggggaggaaaagaagactcgacagctttgtaatgtacagtgacactggcacctcttagcaagagcacaagttgctcgtgagctttttaatcacagaagagttcagaacctgaaggagcagcaaatgtcagcggaatttcttccagcttaaaatgaatccagcaggcccctagatgcccagaaccctagtgctgtctgagatgtttccaggggtcattgcctcatgaccgggtgaccaatagtcaatgctcctgatcactaagctgcacacttaggtgactgtcacaaacaaataagcatggcctttagcttctggtcttgtggactttttctggtgatgctgcctctgctctctgcttcgaaggtgttagcacctgtggccttttcagtgccttcagcaggtgtggatagtgcacctctgtgggctgggcactctgcccttgaggagtcgccagccacagagggatggcttgtttgagaccaggcagatgacaaggcaatttattgcaagctttaagaagagtggaaacaaacacacctagggaacacattttcagacttgtctgagcagatgcgatgttgtcacagagtccctgcacacggaggcacggtgccaccatccagagattcaggaaatgcctcctgctctctgggaatgcacactggtatggtcggaagtggatacaagcccttgccctcattacccacatcttacgtgtcagtaaatgctctcagctctgtctccaaattacaccccaacccattacatctctatcttctgtccactgtgctagtcctggccactatcactaccaccaaccatatcatgtgtccactctgtaagccattactcactcagcaaccagaatcatcttttaggtcacgtccctgcttaaaatgttttggtggcttcctgttccacataggatagaaccctgactgcttatcacaactgggagagcctgccttcctcttcagcctgtgtcttgctatgctgttacggctcgggatgatgtagcctcctggcccctcttgctattcctcacatccatcaaactcactcccacttaagactttcacgcatgcttttccctccacaggtgacactcagccttcagacatagtcttcttgtctctcaggccccagcccaaatccaccttcttagagcagacttctctgacccatccaaagttgccttctgccccacgtcactctgtcacatacacctgttgtgttttctccatagtattattacctacaattttcttgtgtttttctcttactatgatagaggtgcaaataatcaggggaattaagtaaggcatatagtatgctcagggtccacagtgaggtgaaggcttcagggcagtggtaacatttgagctggaacttgaaacaggtgtgatttgccaggtcaagaggtggatggagagatttcatcagaggcaacagcatgtgtgagggcccagaggctagggaatgtgtcacccttagggaacagctttgggacagcatccctgtagcctggactgcataggaaggcagagcaagagtggctgggggcatttagacttcatcttgtgggcagttggaatcatcagtgcacagggagggattcactagacctcatggatttgctcaatggaaccaaatagggtttgaaagtgtaattgaggggttttttgatttggaatatttttattccaattttattaggagccaagcctggagagggagggagagtgtgctaagaccaggagcttcagtttggagtacgaatcaaggaggggctttggagcatgagagcttgtcttctgatcccatcgtgaaatgaacagctacgtgaccgtcttgtgtgtgctaggttcgtgcttgtatctgagagatgagaaatggcagaaggaacagccgtgaaatcagcagattaactcttcaaagaagacacttacattttccattgatggcctcctccctctccttttagttcaagctggacagaaacaaaagtgctgcgtgatgagggttagatgctctttgtaattctacagcaatgagtcttctttttaaaacacccagatgtcagtactattttgggcagatgtactggggagcagttggtgatgacctcacgaggctgtgactttaaagaccaaatgacacagcttttgagtaaagcaggctccggtctcctaatccccgggctccagggttctcgaattcagagcaaaagtggtactccacactgcccgtgtccctgctcatcgccatatccccaacccctccttgccccaagctgctgagtgtgcacagaacttgtgtggttggtctggggctctaagacaagtttccttggacagacagcctgtactcagctgggtgtccatgctcctgtcatccaccttgagatggggtcagcattgtatcaagttctctctctccactttgagcctctgttcccttatctcaggaaagagggtgagcaatacctacctggagacactggaagacagattggccttttgcattctgtaagggatcatatgaatgttcattattatgacttctggcttccagagcataaatcctagactcacctgggtaagaactagataggacctcagggttcatccagtccaaatgccaggctagtgaaagagttctttctcagcagtttccagcaagcagtgaccagcctcagattggataccttcagtcacagggagatcgctcttcccaaggttctttattccagccacatatacacaggattcagtgttaaaatgcattcccttatatgcagcctggctccatgtaatttccaagttcttgtctttccctctagagctgtgctgtcccagatagtagccactctgcatgtggctgctgagcacttgaaatgtggccagtccacactgagatgtactacaaatgtaaaatttatacataggcataagtacattttatatttatataaatacattttaattttttttttccttttacaggttgaaaggataatattttggctacgttaagttaaataaaatgttgttagaatcaattttacctgtttccttttacttttatattgtggctactagaaaaatttaaattatataggtgacccacattatacttttgctggacagtgcggctctagaactttccaaaataaactagatccagcccttttatctaacagcccttcagatgttttaaggcatgtatcttatgcccctaagtttttctggacatttattcacaagtcttcattgagtgcctgctatgtgccaggcaccgtgtagatgctgaggtgggatgggatgatgagcaggaccagcacagtcttctcactcctggggttacagtttgatggggagatagacatcaatcacagcctcacaagcaggactgtgcttccagatgtggcttcttggagccccctttttataatacactttttatttgacaatagatttacagaagagttctgaggatagcacagagagttcccacagaccccacatccagtttccaccatgattaacatcttacattaatatggaacatttgtcacaaccgatgaccagtatcaatacattgcgatcatctgaggtccacattttattcagatgcgtgtagtttttcgctaatatcatctgttctgtcccaggatcccatccgggacaccgcattacattgagtcatcatggctcctttggctcctcttggctgtgacagctcctcagacttttcttctttctgatgcccttgacagcgttgaggagtactggttaggggttttgtagaagctccctcagttgtgattttatgttttgttttgttttttttgttttttttttttttttacttctcatggttaaactggggttatgggtttggaagaggaaggacacagaggtaaattgtcattctcatcccatcatatcaagggcacatacaatcagtaggacttatcactgggggtattggctgagggagtgtttgtcaggtttctccattgggaagctgccctcttttcctctttgtctgctgtttggcaggaagtcacggtgtgcagcccacacttacagagtaggagttgggctccacctccttgagagtggcacatctacataaattatttggaattcttctgcatgggaggcttgtctgttctcaccatccgtttattcagttattgattctgtcagtatagatgcatggaaatctatattttgatttacaatccagtactgctatgttttgttcctcaaggcattccagctttggccactgggggctccttcagttggctgctgtgtccctttgacgtaccccatcgatgttcattttccagcaactttttactttctggctctatgagatgctctagactcatgctgtattaaaatggggatgcttttgtgcctgtcttgtggagctgtcctaaaaattgaatgatttactgcaagtaatgcttatttccctgcacacttctatgtttgtttgtttgttttaacagttgtagcaccacagtgaatctttagtcaagcaaaaaatgatcccaagtcttttttcactgaaatgctttttaagtcaaagccctctattattgtttttttcagttctgggatacatgtgcatgatgtgcaggtttgttatatagggaaacatgtgccatggtggtttgctgcacctgtcaacccatcccctaggtattaagccccatatgcattagctatcctgatgctctccctccacccacccccgcccacaggccccagggtgtgttgttcccctccctgtgtccatgtgttctcattgttcagctcccattatgagtgagaatatgtggtatttggttttctgttcctgcattagtttgctaagcataatggcttccaggtttatccatgtccctgcaaaggacatgatcttgttcctttttatggctgcatagtattccatagtgtatatgtaccacattttctttatccagtctgtcattgatgggcatgtgggttgattccatgttcttggtattatgaatagtgctgcaatgaatattcacatgcatgtatctttataatagaattatttatattcctttgggtatatacccagtaatggaattgctgggtcaaatgggaattctggttctaggtctttgaggaatcgccacactgtcttctaccatggttgaactagtttacattcccaccaacagtgtaaaagcattcctattcctgcacagccttgccagcatttattatttcttgactttttaataattgccattcttactggtgtgaaatggtatctcattgtggttttgatttgcatttctctaatcagtgatgttgagctttttttcatgtttgttggctgcataaatgtcttctcttgagaagtttctgttcatgtctgttgcccactttttaatggggttgtttatatttttcttacaaatttaagattcttcttatagattctggatattagacctttgttagatggatagattgcagaagtttcatcccgttcagtgtgttgtctgttaattctgataatggtttcttttgttgtgcagaacttctttagtttaattagattcgatttgtcagtttttgcaaagccccctagtctctacttgtgtaggttttttttcctcttaatgcagaacttcctttccttattcattctcatattgagtattccacgtcgtggttgcatccttttgtgatttcctacagtgttgatttgtgcattccacctcatacactctctgcatttgacaaacaggtcttgccatggcagacaagagaaagactgggccacatgcagcctcttgagctctctgcactcatcaccccacaggcatctgcatgtggccccttctttagccagcatcccgccatcttgaatcgaggttatcaggaaagacgttgtcacatgagattcaccgtctatcagtttttccctaatttattcaatctaatgaccttatgaaaatgggaagtgaggttagtcagattcgatttgtcttcagaacacccctttgtgctcatatttattgcctttattttattttttagaatccacaaaccgtggttaacttcactctgtaattttgctaatgtcatttccagaatctgtgtcagtctttaaaaactaagcagttacctagtgccagtctaggtggtattttctctgtttttccatatttttcccatgtagtctttgttgcgtctgcagttttgtctgcatctagtaacacctggggcttgcaggggggacttgaagtcatttgaagatgtatcttccttctttcccctttatttccaggttccggttccttcgtaaccacatttgttcagcctttgggggttgaagagcattatccttgaaggcaaaataaagcatacagaattacagttaagtgaatacaattccttgctgaaccatctgctctaaattgaagacccatcctttgctcctgcttttttctgctccaaaaaaaatggctttctgagatctttgcttttcagaaccttagtctctcttgggccagagcagggcaaataacttcgcttagaagtccctgccacgcttctatatccatccttaaaaataggacgctccttccatcatttgtcactggaaattctaagttgatccaagggttctcttttaaactatagactcatcttattacttcctcccatgtagtattagtgagagtgtttattttcttggacttccttctctccaaagccatgttccctataatttccctttcaaacaatttgcaattgttctaatatccagttgaggtctgttcagaccttcaccgctctaccttcacttttccgctgagaaaaggcacctcttatcactgtcccctgcctaagaaagccttgctggcagcagcatgggtagggtttatgggagtacctggacttcaggatcctcaggataaattgcagcatccagagttgattggagagaacaagctcaaccccttcccacttttagctttctttactgtggaaggatttggcttttaggtttctttactgtgttacccagttaattctttcataatggaaagacaaacatcatgtcagtttctccctcctgccagaaaatacattcccaaacatctcaaggtctccctgtctgtgcccttccagaaggtagcccttgcctggcagttgcccttctgggctatcagagcacccagccagctgctctgctgtgcccgtctcaggaagcctggcaggcacataagtccattcttagctttctgtcattccaagccgaaggtgctggggcctgattgccacctggactgccggtaagaaggctggaactcgggcaaggctgcagagggaagagtgggtcccatgccccttccctagggcagccctgcagcctggcagcccgtcatttcactgagcaaagggatctcaggaaaagccagcttagaagagagattactgtattcgttttcttattactctcaaggtgcttgctttttcctgaagataatggttagaactgagaatattggcaggctccaagcatcacacacagtccttggaaaaaaacaaaatacagtggattttcactcccaacatggagagggtcccagggactgatgtgcctatcttcccagaagtgcagaagcagaccaggagaccagtccatctgtgaggacacagtcccagagagatagattttcctcaggccccacctttggggatggagaatccagccccatccagacccagcgcttgagcctccagacattgaccagaatgtctgctgcttcttgatgcgagttctcctagaacctcatgtgccagccagctaaaagaatcactgatcatcagaggctgcatgagctgtcagagccatcccatttctcagtggacaaatgagcacatttggttgcagaagggagaggggccttgccctcggcgacaccaggggactaacagaacctgaatgtggacccagctttgatgatggttaataataatgcttattattaaacaaagcccaactctttgctgggcagtgttcaaagctaatggcatttgccatctctcctttttattgtaagtatgatacatcctattgtccccagattcccaggtgaggaaacaagaagcagagaagtggtgtgacttgcccgtggtcacacagcgggtaaggggtcagctgaatttggacttgagcctcatcatcactattgattaaatgcagccatcttctaatgctgtgctaggttcctgtataagcgtgagagtgtgtgagtgtgtgtgtgtgtgtttgtgcacgcctgatccgtgtagcatctctagaaggtggagggtgtttccacagatccagaaactgaggtcaagtcctgagagtctaagttcagtgccctttctactatttaagggaaagaggcctgtctgtgagttctaaccctatacataaagaataaatggggttcattattgagtttttccccttttattctgtaagttaaaatcaaccaaatggttgagttttacccctcacccatcccctaagcccattccttttaagggaatggccttcagatgaccttgaagataggatgttgggtgtcccgcagggtatggctacaccccactggatgaccccacctgctatcccatggaagagaagaacaggcaaatgtggcccatcaccccattcacgtagggacacctagtgttctctgggagatgaatattccaaacccacatcaccatagtccccatcagggataatgctttcctggggctgcagaaacaaagtaccataaactgggtggctcaaagcaacccaaatgtattctttcacagtcctagaagccagaactccacgatcaaggtgtcttagggttaacttcttctggaggctctaaggaagaatctgtgcctgccccgcctgccttctggtggttgctggcaatgcgaggtgttatttggcttagagacacgtcccttcaatctctgcctgcaatggccttcccctctgtgcctgtgtctttctctcctttctcttagaaggacatcagtcattgtatttagagcctatcctgagatccttcatttcatcttcagtgactcttatttccaaatgcatcgcactcacaagtgctggcgtcagggttggagcagtatctgtttgaaggcactatccaacccactctgtcactcctctgtcatggtatatcagcagctggggaagcagttggaagtctcggggtaactgagctttcccctttccatctccaccctctcttaccaagtagatcaacctcttccctaggggggtgtttcctgtcacagagaaaggccaaagccagcgtgctagaacaggtttctgcaaggacactgttacctgtctgtttccaagaagctgtcgggtgccctgtggctgggctggtttagctttctctctgccctcaggcagggggctgggttccataacttcccaaagccctttgcaaccggggcacacaccactttctctggcagcatgggtccatcctcaggagtgtcacattccccatgcttcttccgtcacccttgtccagcacttttccccagggcttcacaggacacatgcctggccctcagggaaggttgtcacttcactcattatcccgcctgtgagcagcggctggcagtgtgcccaccgtgagctctgtgcccccgaccagatggcacacgaggagcccagggctgctcattccacagtaagcctagtggctggcttccctggatttagatatcaaaattcacattggtggagagaagagggctgtatcgatgcaggggtctctacactgaggcctcctttagcacagaagaccctgtgacctcatcagaccagcattgctgcccagagccctaacacagcctgataagtgcatatcactgtagtcagtcatgcatggcttaatgatgaagacactttctgagaaatgcgtcgttaggcaattttgtcattgcggggacatcacagggtgtactcacacaaactcagatggtgtatcctaccgtacacctaggctatagggtgtagcctgttgttcctaggctacaaacctgtacagcatgtgactgtactgaatactgtaggcagttgcaacacaacggtaagcatttgtgtatctaaacatagaaaaggcacagtaaaactacagcataaaagataaacagtggtacacctatagagggcacttaccatgaatggagcttgcaggactggaagttgctctgggtgagtcagtgagtgagtggtgagtgaatgtgaatgcctaggacagtattgtacactcctgtaccataggctacactacatttatttcaaaaaaattttcttcacaaataaattaaccttagccagctgggctcggtggttcatgcctgtaatcccagtagtttgggaggccaaggtaggcagatcatttgaggtcaggagttcaagaccagcctggccaacatcgcgaaaccctgtctctactaaaaatacaaaaattagctgggcgctgtgatgcacgcctgtaatcccagctactcaggaggctgaggcacgcttgaacctgggaggcagaggttgcagtgagccgagttttttttttttggagacggannnnnnnnnnnnnnnnnnnncacccaggctggagtgcagtggcgcaagctcggctcactgcaacctccgcctcccgggttcaggcagttctcctgcctcagcctcccaagtaactgggactacagacgcacagtgccatgcctggctaattttttgtattttagtagagacggggtttcaccatgttgtccgggctggttttgaactcctgagctcaggcaatctgcccgcctcagcctcccaaagtgctaggattacaggcatgagccactgtgcccggccggtactttttaataaaatttttatttttgttcactttttaaacatttttgttaaaaactaagataaaacatacacattaaccttggcctacccagaatcaggatcatcaagacataattgggtgatggagattttgcagcttcattattatcttatgggaccactgtcattgtattcgaggttcatcattgactgaaacatttgttacacagttcatggctatatttggatctgagctcctgcaggcactgtctcatattttgacatccacagtaattaatgacgtgccttatacgtgttcggtgagtaagtgtttgtaaattaatgtttgtgaattagcattttccctcttttctacctttgcactggggtctggtatacataggtgcctaataaatgatccttgttcttctgggtttcccctctccttcaatgagtctaggggtgtttagaggctgactggctcatgcccacagctcagccctaataatatttcaggaccacaaatatcagactgagagtggacagaaatgaatgtggacatggatgaaagggagggcttgtctgagttccatcccagggatcaaagaggaagagatgcacagcagaagagatcttctctccactccccactggcatttgattcaaactcctagttccttagtagctgcccctctgaaggtcctgagagactgagacttcccaagcgtttgttcactgaatcactccagaagtgtcctcttactgggattagctatgaaatctctaaaacccaaagagctaatagggctgttggctgttgggaagatcctaagaaagctaagaggtggaggaggtgcacccactgtccatccccactggccaccgtggtggagatggggagctacaggaggttccaggccctcaggaaagcagagagttgaacagcatgctagcaaaacaggccagaaggaccaggagcctgccgggttgtcctcctaggcaacccatcaccctgttagacgctcctatgggtttgtttgtggatgcacatgtacatccttacacaagggcctcccctttgggggcgacaagggtttagctacatggtcatgtcaaggctctgggtgatacagggcaagatctggattttggcaaccctgtggcagtcacgcatctgccaccatccagatggcattgacagacagcgccccaactcacacccagccctccctggagctcccactgccttacgtcactacatgttgccccgggcccctcctggaggccttgtcaaaacaggatgaagagcaaaccctgaacactggggaaatccaactgaggaagacctgagtgttacctaactctgagccttcaaaatcctgtactaggacagcaaacacacacacactattctgattctgttccgggaagggtttcagatggtaaaagtttttgcaaaatgagtgagtaagtggcagttttatggaggaggtgacatttgcattctgtctgaattttgtggggacagctcaaggagcaggctgacctgggtccaagtcgggtcagtcatcctgggaaaagcaaggattcagtggcctgaatcatgccaggcagggaactctgcaaaggggcccgagtgccgtgtggtccatgtgggaagtgtgaattgcatccggaaggcaatgaagaatcaagccactaatgagttttgaggagggggttcgtgtggtcaagtttgtgtcctagagaaggcaactctgttggcagcaccttagaaggcttggaaagagaagggcttggcaacaggagactggttggcctgaagagtgaatttctaattgtggactttcagacactggcaagctgttaggggagttattttggggtggcgagatccagagctgtggtccagaggcagtctctgacatgccaggtcactctctcgggctccggctcctgtacctgactaccacttggagcgtggctgtgggtgttatcattgtggtccctctgctggatgctcattaaggctttccctggaaatcagtgtccaacctttctcccaccacagggcagccctgggatggcttctgaatcagggcctgcccgcctcctgcaggtccctctcagtaagtcagaaggtacagctctgtggacccagacctttggaacctcagcatttctcaaagtgggagttggtgagaagaaaaaccttgggacagaaaacagcttagcctgggctatcaggtcacccaaaaagaacaaccaaaatgggcagctcagaataacgccttaaggttagctcaggttctgcttataaatactaagctccaggctagagggaatttatccctttgggaaccagatatgctctgatgttttaccagggttcattttgagaacatggtcatgttaactgagagtgtggacctcagcaaagatggatgttttattaatgtgacagatgctgatcgggaccccttgtgcatagatatccagttaaacccatttcagtccaaaccctggaaatgtgggtggagtcctcggtgtaatggcatggtgtagtgtcagttttctcaaagccagacaggctcagctgcaaatcccagctctgccacctgttagccaagtgacctggacatgtgtcctaacctctgcaagcctctctttccctgtctataaaatgggaacagtaagaaccattacagagggttattgtgaagactgaatgaaattagttaaactccacctgcagttggttgctttaagtagtgtaatgaaactttttaaaaaatgggccgggtgtggtggctcatacctgtaatcccagcactttgggaggctgacgtggatggatcaggagtttgagaccagcctgaccaatatggtggaaccctgtctctactaaaaatacaaaaattagccaggcatggtggcgcgtacctgtagtcccagctactcaggaggctgagacaggagaattgcttgaacctgggaggcggaggttgcagtgagccaagatcgcaccaccgcactccagcctgggcaacagagctagattccatctcaaaaagcaaacaaacaaaaaaatcatgaagccaggcaggcattgttttattgttgttgttcttttgtttgttttttgctttttccattatcctgtggaaccctttgagcagcctatgaaaggctattcccattttatagatgggatgaacacagtttagggatgtgtttactctgaggttatcagtgactgagcataagttaacctctccaacagcctgatcttgcatctgttcaagccatgagcctaacactagagatagtctcctaacagagccctgctgaggctttcatcagtgacccccatggaggcacctgatgctgaacttggcttcgaggtcctccccttctccccttctcgcctgctgaaccttcccagagcgtaagaggtagttgggaaatgtttttcagatcttttgactgtttttaaatccaattacttagttttttttgctgttgagttggttgagttctttgtatattctggttattaatcctttgtcagatgaacagttttcacatattctctcccattccatgggttgtctcttcactttgttagttgtttcctttgctgtgcagaagctttttagcttaatttaatcccatttgttactttgtactctggctgcctgtgcttttgaggtcctacttaagaaatctttgcccagaccagtgtcctaaagtgtcttccccagtgttttcttctagtagttttatagtttcaagtcttacattcaaacactactcacgatagccaagatatgaaatcaacattagtacccatcaacggatgaatgaataaagaaaatgtgatacatagacacaatggaatattattcagccaaaaaaaggaattaaattctgtcatttgcagcaacatggatagaactggaagacgttatgaaataagccaggcacaaaaacaaatattgcatgttctcacttatatgtaggagctaaaaacactgatttcatggagggagagactagaatgatggttaccagcagctggagggtagggaggaaggggaaatgaagacagattggttaatgagtacaaaaatgcagttagagagaagaaatacatttcagtgttcaatagcacagcaaggtgactgtagttaataatttattatatttttaaaaatagctagaagagaagatttgaaatgtttccaacataatggttgaggtgatagatataccggttacccacgttttttgtttgtttgtttgtttgtttgtttttgcagatagagtctagctttgtcacccaagctggagttcagtggcacgatctcagctcactgcaacctctgccttccaggttcaagcagttctcctgcctcggcctcccaagtagctgggactacaggcgtgtgccatcacgccaggctaattttgttttgtatttttggtagagatagggtttcaccatgttggtcaggctggtctcaaaactcctgacctgaggtgatccacctacctcggcctcccaaaatgctgggattataggtgtgagccaccacacccggccatttacccagatttgatcattacacatgatatgcttgtatccgaatatcacatgtaccctataaatgtgtacaactattaggtattcataaaaattaaaaataaaatttttaaagaagagttaggatgaatggagacaaactggagtctcaactccagtttttctgcaaggaaaaaaggaggctaggctaaataattcagtagagttgccataactgtatggccgcctttcccaagtggcccctatttcctgcagtaattaagggggatccatgtgctcaaacccctttatagctcttttcaagaaatcatgttatttccttctttttttaacaatgttattgaggtataatttatataccataaaattcactcattttacgtgcacattttacagagttgcacaaccatcaccaccatctgatattaaaacatttacaactattcctggtttaaagtggagaagaagttatgtgctggtcctgttgagcccctcactgggaagtttaaaagaaaaaaggtttcctgagcctgttaggaaaggcagtgaggacacggctcagaggccaggaagctcccaggaaactttccttagatggaaagtagtgagctttcttacgggcaacattcacaaaggtgaaaccaccagaggaggagtggggaccagccaccctccatccttcctgtgagagtctccagtgtgggagcatcctcagtggagggcaggatttcttggagaagaaattccaaacagcctccaagcattaacctgctgcatccctcttgaaggaaggggaagagaagaggccaggtcaagtctagattccagagggggagttggtagagaggccaagcactcataggatgccctcaggctcttcaggggaagagtgacccaacggaaagaacctgttcaaatcctggcttcaccagttaccagctctaagcctcagtaccctcatctcaaaaatcggagaaaattgttgtgctgtttctggcattttgacaaagtgaatgacaatatgcatccatagggtctgggatgctgaacaaacagccacaatttcagttattgttaaagaaaacagcttctgagaaatgcaaaacctgaacactcttgaacaagacatatctggtttattgcaagaaatgagaatgtgtcttactggtgagttcaagtccatattcttctatttactctgtttgtgtggatctggacaggttgcttatagaagcctctctgagcctcagtttccttatccatgaagtgggcctaagaatagcgcctgccttgtagaattgagctgaggagcaaatgagacaccgcacggactgtgctcagccagggcccattgcctgccgggtgccctgtcaaggttggccgttgtcatcagtgtcaccatcactgctgccctctctatggctggcagtggtgaggacttgttgtggccgtgttttcaaagggaccttctgtcccagatcccttgggtaccatcactcaatattgcaacttctctgtgcgtaggaaactccctaactcaaacctgaaaggacaggcctatggaggagcgtaatgagaactcatatgcagtcccagggtgtctcagggagtcttctgggagtttgcttcttcacaccttgtatgtaaatattaggagagaagagtgagggagtcagctagagcttaaataggagaaatgttgaggaccagtctcactgatggcaaccaggaggtatgtttttgcaggccatcatgcccactgctgtgttgccacaaacaccccctgctccctcaggccaagggaataggagcccagagccctgtacaccatgcaggggtaggaggatgtttgctccagctttgcattaagaagggagatggattcctagtgatgccccagtgaggccaagttcgatcccctcctccctctgcttcccgtgtggtttcttcagcctgggctgccttgccctcacctcagccctcacgtaggtcatgtagcctacatccccgagggagaagtgagactattcttacagcataggaaagttgactacgggaatgacattaagagactgaactggaatcttttatctttgtctactcgtcttcctcctaacacaaatgcactagacttcttacacattcacaatcaggagaagtacatgcatgatatagtaaagccattaacctggtgtcaagtgttatcaattgggtcattaaataagactcattaagcatcgtctaactgcaagtagatggtgctgcaccttttggaactggatgtctagagccagaagcgtcagtgcagactactctttgtggtttcccttgtagctactagccggcttggaaggaatcacacctatgttagtccttttgggctcctgtaacagaataccataaactgggcagcatataaacaacagaaatgtatttgtcatggttctgcaggcggggacgtccaagatcaagacacttgcagattcagtgtctcgtgaggatcagcttcttgattcatagacggccaccttcttactgtgtcctcttctgcgggaaggggtgaggcagctccctggagcctcttttttaagggcactcaccctattcatgagggcttcaccctcatgacctgatcacctcgcaaggaccccacctcttgataccattaccctgggtattaggatttcaacatgaatttggcaagtaagagtgcacaaacgttcagaccatagcagtacttggccaggctacctcctaataatactgccaagcgaaatcagatggtgcaggcgtgatagagcggcacgaagctatttgtgtctttcataattagcatgttttgaaggaaaacttagctgtgatagagttagaaattagacttttctgctcagcaaattagctctcagattgcaaaccacgtgagtccattcccccacccccaccttactcccactttcagagatgaatcagatggtttactctgttctactttcctcttcagaaaagggaagcagaatccaaacctaattaagacagcgtttcagcgctataactaaattcattcatagcccaaccacactgggatgcatgagcttcctctggccacttcatattgcaaacctggttcaaataattatcattcatcatttactctcaagtttaagtttctagagaaatttttaaaaattaaccctgctcttctcatgcttgctggggccacaacgctccagtcactttgatcaagacagcacagaggcctcatactaaagcaagcctctgaacatgctccttattaattaacagctgcaggcatttggaatgttctgtccgaatggtgttaacagcctcatccctttggtggccagaactagaaagcagaaagatcccaagtgaagctcctcttttgagctacctgctagctcccaccactcacgcaggctttggactcacctgccctgtcactcacagctgtgtgacactggacattcagaacctctctgtgcctcattcgccccacctgtaacacgctgggtcacacaactccttcacacggtgatgattcctagagattcatgaatatttggagattcctactctgtgctaggcactgtgctgggcgatagggagacaaagagaaataagaccgaggttcttcccctcaataactccatgctccaaatcagtgcttctcattcaagggctccccccgccccccccgccaccccccactccccccaggggacatttgccaatagctggagataattttggttgtcatgatgggagatagagggtgctaccaggatctaacaggcaggtgcctgggatgctgctgaacatcctacaatgcccagaacagccccatgccaggaattactcactttgtcatgtcagtagtgctgaggttgaggaaccctgatctaacagaccaatccagatagatacgcagataatttcagtgcagtgtgataggagttacgagaattaaataaaatattttatgtacaggggccaagacttggtagttctcactgaaaggtcatgcccttcatgcagtgacctgcttctgcaaggacttatgttggtagcaaacagccagagaaagaaggcagtctttgcattcactacgcaagggaggtgtcactccaggtgacctaaacctggcttgtgtgatccagtcctgcctcttgcttccagctctgtcaaaatccctgcccgtctacaggttaccaggaccttgggggcagagggatcccagaatgagagctggacctgctgggggaggaggcaaccttcagcattgagtattcctttgcacttgcccttccctctcatctgaacactcccatccctcactcgagctctgctggggaaaatgatgaatgagtcacgaagtgaatcactggggaaagccctccccgggagctgtggctgagaacccacccaggcgacataacttcctggttcctttcttgcctctccccacaaaagattaaaaataaaacgggaaatagttaagatgacttgctgcagtaacttttatacttttataataagaaagtgaaaatgtttaaagaagccaaactggtaggctacccgaattaggtcgagcacgatgaagactctattctgttgcgttggcatcaggctcgttcagaaccgactgcttcaagcaagtcattctcccaaagaggcggaggcagggtggaaagaaaacgtgagcctaaattgaaatatccagggccttaagaaatcactcacgctctctgagcatctcgaagtttcctggctttcaaaatgggtttgatggcacctcgtaccattgtttggagggtagaggagttcaggcatgtgaagggacttcgaaagttaaacagccttgtacaattattgctaaatgttggggacaggataatagcattgtagctttgttttcatctttcaaaaacatgtcttgaaataattacggagggtcgggtgcggtggcttacgcctgtaatcgcagcactttgggaggccaaggtgggcagatcacctgaggttaggaactcgagaccagcctggcccacatggggaaaccccatctctactaataatacaaaaattagccaggtgggatgacgcatgcctgtaatcccagctactcaggaggctgaggcaggagaattgcttgaaccccaggaggtggaggttgcagtgacccaagatcaggccactacactccagtctgggtgacagagcaacactctagactttttttttttgagacagagttatggaggaaatgatattcgggatttgctttaacataaggatggaggagtggaagggggcagagatggaaccttgactgtgagttgatgatggttgtgactagtgagaggtatctgtgccttcattcttctagtctattctctctacttttaaatttgaatttccaccatttaaaaacatctgttagatattttaggtatactgaactatatacttaaaaatggttaagatggtaaattttatgttatggacattttatcacaattaaatatatatatacacatccctcttttaaagtcagtaattgagatcagcaatatatatgaggcacaaggaacacagaaaagcaatcatatgagagggaaaaagagaaagccaggattaaaggggcatagctcttttgcccccttttctgggaatttgttaagtacaaccactgaaagaagcaggactctccctggctggaggactagagagtgagcaggaactttggccaggacgttggaaataccctcctgggggcacgtgacctgagatggttgaggagcggttgggtgctgcatgcatgtgaggccggtgcctgccagggagcgtgaggatgaagacaggttgcccaagcctggagaggcccactgtctgcagggcaagcattcagagagcacaccagcacaccatcctcgcatttggctgcgagcaaggcaaatgaagacacaggacagtgtggagggctctgcatgctgggctgtagtttggacttggaaacagatgaaatgaaagctgtagtcacttccctttttgccttttaaaaaatatatgttcaggggaaaaaacacatgtcagaaatggagtcatttgaagctaagtgtcacccatctcggaataattgtccgccagcactagattttacaaagtgattggtggcacagagcactcttcctgatggacaacactggcccggcagtgtaggagggaacgcaggccactggcagagcagcagagtctggggtgggccgtggcctctcctctggccccagttcttcagtcgtgacacctggggatatgtcctttcatctcttgggctctctgcatccccaccttgaagggaggactggatggaatccaaagactgatcacaggcggctgtgtctgtgtttgcagttgttcctggcaggcagaccacactggatgtgtcttagtcgtaatctgggggcctgggcgtgatgagctcttgttccttctactgtgtaacttgcactagaacctaaggaggcctctcaaccagggtccttttttcagctgtcaccaagggtacaattaatggcacaaatcggttcttccctatgacgcactttgtgtgagatgcctggatagcaaaggcaacacttgcactgtgcgttttccctcctggattccaatagctttccagttagttcataggtttcaagggatttggatggtgcaaaatggaggccttttggaagaaattaaaaatgcgaagcctgataagcgtaaccaccattcttttttttgtttttttttttttttcctcactggctaatgcattgtgtgtttaaaaggagatttggcccaacccagcctcaagccattatttactcaacctttgttttctttttctttttctttttcttttttggtggttgttgttgtcggctcattataaccaactgaactcagcctttctttaacatttattttctgtgtctgtgctctggacttaagtgaatacaagatctgagagagatgacccaccaggggtagtggttttcaaattttggcaatgggcctgtttttctttaaacaaaagattggttttctgagactatgcaacaactttacgcaaaaactgtatttttgtccacaaatttggtgacttagaacaacacaagcttattatcttatggttctaaacaccataaatctgaaatcaagcagacctgtgctccctccagaagccaggggagaatccttccttgcctttccagcttctgatagatccaggcgttccttggtctgtgactgtgtaactcatgtctgtggctttactggcatcctctgctccccttctctcttttctgtgtgtctattataaggacacttggatttatgggcccactaaggtagcccaggatgatctcatctcaagatccttaacttaattacatctgcaaagaccctttttccaaataaggtctcattcacaggttccaggacatagacatattttttttgaggatcgtcattcaacccagtacaaaaaccttacacggggcagaagagagaaaggggagagctctgcttatatcattatcacattgtcaggaccttgacctccacacattcagatcccacccctttcccccatcctttgcccggtaagccatgcaccaaggatccaaatttgaaaaccagagttttagcagagagagcttgggagacttgggagtcaaaggcctacgctgggaaatgggcctggagtttccacaagaccacttggcctctcggtttcatcatctgtgaaaaatgagatattcaggtctacgctacagtgttgacatagagtctaaatgagatccttagttcttgggtcatttccagggctcggtagcatgagtttactctatcctcatcccacgacattctaccccgtggaaaaggtgttgagatgttatggaaacacttctgacttcacagaagggttggttcctgaaccagtggacaagaaagttaattctggctttcaaagaaagccaagagctctagaattgtagggttcaggttttcatcttttcctttggcagaaaagagagcattcttcaagcctattcaattctaagtaccaaatgacaagccatattaaacagatcccagtgagctccccacatcctttcctgcttacaccacaagtggactgtgtgccaagcaaggctttgagatcaattgcacttcggtggcttttgagtagtttctcaactccatctcatctagtgacattttagaacggataattatttgttgtggggactgccctgtgcattgcaggttcagtggcatttttggcctttactcaccagatgccagcagcaaccccagcccattgtgacaagcaaaactgtcttcagacatggctcagtgttccctggcgggcaaagttgccactggttaagaaccactgctttaagagaacctatgctcgaggtcaggcaccgtggctcacgcctgtaatcccagcactttgggaggccaaggcaggtggatcacctgaggtcaggactttgagaccaacctggccaacatggtgaaacccccgtctctactaaaagtacaaaaaattagctgggcatggtgtcaggcacctgtaatcccagctacttgggaggctgaggcaggagaattgcttgaaccgaggaggcagaggttgcagtgagccaagatcgtcccagtgtactccagcctgggcgacaagagtgaaactccttctgaaaaaataaagagaacctatcttctttcaagccagcctgtcatgtgtcagaactaaacagtcattttccttataattttttttaaaggcccagttgctgcctgcccattgctgatgcaggaagtctgagccattcagttaacaccaacccgaaagatgcagtcagaggctgactttgcttccctgctgtgcacaatttgtctcttccctctccttcatctgcaaacagaaccagaagtgatcttccagaagaataaagctcatattgtttgttccaattatgaggatcgtttctccagttctggtctcaggtgggccttaaggacctcaccaggtgatctgcccaggtgaacgtggtatgccctgaaggtctgctatttaccagtctgtcttgttaccttttttagaggagacattcctcagcaatacctggcctccattttccagcctgtgagttagaaccccgatgctcagatttctctagaggaacacactgcctgcaaggatgagttttccagaaaagccatcttccaggacagagacgcagagaaattaagcaactcatgttgattcagtctgggaatctcgagagagctgacaagcagggcggggggggtggccaggagctgacatggctttctggtaggcagccccacatcctgcttcctccctgtgctgagtgtaatcacttctgccccttcaggaaagtacttcacacccgtggcatagagccaacagtgaggtggattccgggtcctctggatgcctgggatggtgagatgcttgagaaagttttggcagtttgttcagacttggggactctccagtctgccttcctatcacccagcaggaatgcccttcccttcaaccctgatacctgggcacttggcctccacctgaatacccttggtggtgagcagctcactacccctctgaagacagccagtcccccgtgctccatgttccttgtcacctgctatcttatgactgcatcctgaatccgactctggcttctggagggaaacttggtgcttaagcttttattccccatgacagtgttccagccttgctgcctgctcattgtgttttctggggctaaacttctccagtcctttagttattacatggcacggcttctagatccttacttctcccaaaagcccctccaggaggtaatccagcatggtatggccccctctaaatgtcacattccagactgaccacactggcagctgactctatgagaatatgggggctgcccctttgtaaccctgactctgttaatgccacggaggttgcatgggcatttgggataagtgcatcactggtgggaactcatgctgaagctccattccgctgcagctcttcctgccttgatgagctcttgctccataccttcctcagcccatcctaaagtgcttgcaggcgaatgctggctccctttcagacagatagtttggccatgttgaatcctcagtctacctctagtgtatgaatcttccctctcaaatgggcataacatgccagtgtatccatcccacatgcagagaatgggataggagtgaccctttggcacactggccaagacctccatcctgctccacaggacttcacacatctgctccacggctttgagatggttccgccagttctgtgtctcagcatcatgcatggttccctctctcatatagtgagtgagtgtttttgtccagtctgtacttgcctcacagtataatgtgtttatgacttgtcttcaatctaatcagcatcctgttcctatcagaaaactgcagaggaaatgaagttggtctggcgtgacttgttcctgctaaactctgtcgacttctgacagtgacagctccctgcttgcagaacacataaatccagagtttaataatccatccttagttttcaccaggcttcaaaatcagccgactgtcatgtcagcaagcggccgtgtcccccttagtgataaaatcagggtgaaatttgcatttgactcacatcttgactgttttccaccgttcgtcaaacaaaacccatggtgtaggggccccgctggaggtgaggttggaaaggggtgagaatgcatcggttgcttgcagctggtgccaacctggctagcacctctgcagtctgcccttcccagtcagaacctcaggacaccaaccctgcctctagataggagggatttctgctgatgcagcctatgttctgctgcatgttcagtactttccccggatgcaggacgtagttttgatgttaggatttctgctttatcctggaaccccagctcccatccctatcttgtgccctatgcatgatcactgagtctctactcatttgctcctgcatggggcctgggcatgaatccacggatagacagtgccccagggacctgccgctagcccacccactctgcccccagagcctgattctcattctgctgagcctcactctggtgctcacgggcctccttggacactgtacaccagcaccgtacaccagccagggcaatccccaccagtcagcacacactcggagggaggccctgagccaggtccccacctgcactcagagccccatctgcctgtagtcgcacagcctggcatggagtcaggaagcctgtgagggtttaaaataggggatgagtgtgatttaatatgttttgggaagatgaaccgagtcaagtacggactgtatgagattggggagtgtattagtccattctcatgctgctaataaagacacacctacaactgcataatttataaagaaaagagatttaattcactcacagttcaggatggctgggaaagcatcaggaaacttacaatcatggcagaagaagaagcaatcacttccttcttcacatggtggcaggagagagaagtgctgaacaaaatggagaaaagccccgtataaacccatcagaactcgtgagaactccctatcgtgagaacagcatgagggtaaccacccccattattcagttacctcccatggggtccctcccacgacccgtgggaattatgggagctacaattcaagatgagatttgggtggggacacagcgaaaccatatcagggaggtccctgatatgggtccttctattaccctgtggttggggtaatagcaggcctcccttcccttcttgggcttttcggagatggtcatttttttgacagacacggcgtgaggaccttcactgattaccacagactcccacagagtcatttgccccgccgtgtcctcctacaggcgggggagccaccctcagaggagctggtgaccctcctaccttgaactgcactgcttcagccacaccagtgaggcaggcattccctggcatgagaaagcgtctggctccctctggtgacaagaggaagcacctgagcctttgccgccatttccactggtggtggagcacgaggtgaggatggataaactaaggtccagagatcccccacactgtaggtgcggggtggagtcccaagtagaggccccatgccactaaagctcagttctgtctccctcaggaccctgggcttcccagagccagcagggatatggctctgagcaggttcttcagcactctgcaggcgctggttcctttggaattaattagatttctctaaaattagcttagagttagagggatttccaaagccctcaaccttctgctgccatttcccctttctgagtgggaggaagtgcaggatcctgcaggacctgggctcctacgcagttgtgtggccacaggctggtaatctaacttttctgtgcctccatttcttcatttataaactgatggtgaagacacctgcctctcggggttgtgaggattacattctatgcagtgtctaaaggccctagcacatggcgggtatttaattaagaatgattttgttgttgccattattcatggcatcaacagagctggatctcgaggtagcagtgggctttccactgtggagcagcagaaaccgagttagttcgctatatccccattgagtgaacacctgagcatgctagtgaatgagagtgagaaataactgggaactacacaagttggcttttgggagcaccagagctggctagcacagggcctgacttgggtcttgcccttgaggcctgggctcatccccaaggttttccgagcctcagggacctccacagcagcactccatagcaggtgtctccctgaggccacatagcctgagcaggacacacctgagcccaggagctgccgtgcttcttgctgtaggcaggtcatagcctgacctcggcgcacctccgcgggcagctgcagcccagccatctcctacacagccacaccactgactcttcttgtttgcaagggtctccgtctactgtctgcctcacatcttggggctctcccacacctctgcctttgcccaggctgttcctgctttgcccaggctgttcctgccttcttcctgttcttcctcccctttctttagtcctctgctttgtttttatttcagcttcccacttactgtacatgtatcactgggcacgttacttcatctctctgtgtctcagtttccttacgttaaaatgggagtgtatctgcgcatagggttgtggcgacgattaaatgaggtagtacatggaatgtgctagaactcagccctcagctcactaggcatcagcaccgtcatcctcactagcaacagacctgcctcaaaacccagctctggccctacgctatgaatggggatatttccctcactgatgtcctgtgactcatctgccatactcgagcttgcgccctgtgagaaacagtttatcttgtgtaccacgtttaggaaacttatttccaagcctgccctttgctaggcacggtgagggggtccagcgataatgagtaaaatggtcccacaggtcagagctccctggcagttttccacccggccagtcctaaccagggagcaatgcccatgaaggtgctgattttatcctgacatctgggggccctgggatggctgcattcacgttggatggcccaccacatgcatctagtactccatgccactagggggcacaccacagcttccaagtaccctctcaagtgttggcccacatgatccccactctggtcttgggagctgtgttagtctcctggggctgccataacaacatgccatagactgggtggcttcaacaacagacactcattttcttacagttttggaggctggaagcctgagatggtagtgttggccatgggtctcttaagaactctctccttggccagcagacggccagcttctcactgtgccctcacacggtctgtcctctgtacctgagcttccttggtgtctctgggtccaaatccctaaggacacccatcagattagggcccatctaagggcctcattgtaatgtaataatctctttaaaagccctatctctgaacacaatcacgtgctgaggttcccgcggccagggcttcaacatggatttgaggggacacagtccagcccgtaatagggggagagcagggcaggtgactgccctgttttccagatggagctgctgaggctttgaggggtgagtgcctcgagcacagcctcctgctgttgctaagttgtcctgcagagctttgaagcctgaactagacacaaggtcctgcggtctctgcactgccccttgctgggggcttgggtgtggacagcagggagcctgcaaaacctgcatctgagaggatgtccctagagagcttctgggaggaccccactgggctcacacacagaatgcgggcccttcaggaaggcacaagctgttgtttctctggatggatttccggcctgcggctagccagccagagaggcatgtgccttcaccctggtaaggcctggctgggcctggagagaaagaaaagatgcctctttcagctaggttgagaagcccagagtggcaacagctgcggctttgaccaactgcagatcctccccgagcatcctgaagtcgtctagctttgtgggatatcgttatacaaattattctccatgaggccagggcttcctacccctcccaggcctgggtagtaatcagtttacagttcaacacacacggagtccctcctccagggctgtactgcccctatggaaaaggtgatttttgtgtttttttaaacagggtctctgcttttcccgagcctacaattattatggcaagcccaatacatggagtttttttttttttttcctccagtccaactagaagcagaactatagaaaaagtctcaggtcacgtactatgacagaagagagaaggtgaaggatgagagaaaatctaggaaggccccttggaggaggtggtatttaaggcaggctttgaatggaggatcagtttttgatgcaccgctagggccctggaggagaaggagaaactgggttgaagaccagcataagcaaggcccatgcccataccagacagcagtaggggccatactcggtgccccagaggccacacggggtacaccaggcagagttctgtgctgagtgctcacactcgtggcggcatacagtgctgctttggctggctttacgagagatttgggttctgtcaccatgctcagtgactttggtctggccacatttggtgaatggctgcccctccaccttccagggtgaatatcaaattgtgtccatattcttcctttagcccatgtgcccagatgcattttttttgggcgggggaaggtaggtatttttcatttttatggatacatagtagctgtgtgtgtgtgtgtgtgtgtgtgtgtgtgtgtgtgtgtgtgtgtgtgtatggggtacgtgagattttttgacacaggcctacaatgtgcaataatcacatcaaggtaaatggggtatccatcatcacctcaagcatttatcatttctttgtgttaccgacattccagtgatactctttcagttatttttaaatgtaaaataaattactgttgactgtagtcaccctgttgcaatatcagatactagagtttattcatcctgtctatatttttgcacccattaaccatccccacctcccctgcccccttcccagcctctggtaaccatcattctactctttacctcccaaatgcattttgggtaccagctatttctttggtcagtgctggtaccactagtggtgcttttttttttctttttctcctttttttgagacagagtctcgctctattgcccaggctggagcgcagtgttgtgatctcggctcactggtgcgatcttggctcactgcaacctccacctcacagattcaggcaattctccctgcttcagcctgcctagtagctgggattacaggtgcccaccaccatgcctggcttttatatttttagtagagataaggttttcaccatgttggccaggctggtcccgaactcctgacctcaggcgatctgcccacctcggcctcccaaagtcctgggattacaggtgtgagccactgcacccagcccactgatggtgctttttaatgagaaagtctggtcaagggcagcaagggcagaggctggttctagtccaggattctcaacctgtctgcaggtagaatcacctggggactttgggaaaagcccattgcctagtgtgtcttccagaccagcttcatcacaatctccaggagtgagacctagggattggtgttttctttttacaagtttctgaggtgaatccaatgtgcagcccagtttgagccccattgatgtatctgatctaagaggtcaacaggtgcagtaatgtggggaggggcacatatgctctggctctgtcatgtactgtgtggatttggtaacattagtgtttggttttgtttgtaaactttgtgatggagataattctattacacagtgtctaacacctaatttgtgctcaataaatggtcacctcctcaccgtctccttccctgttcacctcctcctcagacataagcaaggtcagttatgtaatgctggcaggctgttggcagcaggcaccagataaatgtgtattgcaggtttcctgctgtttatggatcatgttttattcatgcacatatgatgcagaatgctccctctgaggggagaactttgagcctgcagatttaagatgtggcaatacatttatataaattgaggagacgaaggcaagtgggtgatgagaaacgcaaagccctgacggagggtttcacaggcatttaggaagtggaggccaaggatgttcaagcagcctggaattgctctttttcctaggtcagcactgccctctagtggggcagagtcacagccaacccgcgtttcctcctcactcctcccacttgcgagaaccatctagggttaaaattactccaagtccagccaaagaaacagcctagggagaccagccatgcacgcccccattcttggactcattgttcctgaaacacaaagataattctagaaagcttctattcatgccagatatcagaagatttgcatgcattacatataattctcactgttctacaagactgataacccttcttcccagactcagagttgggaagtgaatcttccagaaattgagaaatgtaaccaggattccagcctggtaggaatcagccttggctgattctcacgccttcaccactgtgccgtgatacctgctctttctctaggaactaggtcccggagtcctgagttaaaatccacttccaccatgtacaagctgtgtgaccttggtgcagctgactgatctctctgcgcttctgtattctcatctacaaaaagagtctcataaactcaccttatcaaggcatagtgagaatgattgaccttgaataaatcagaaggggcagagaaagagctgaagaaaatgactgcctctggatggtaggaaaactgtgttttccccctgctgaatgcattacttttataatcagacgaaatgatcactttccttgtaaagaggtagaagccgtcacccgtgtgtaccagccctgcgagatattataggagagaccgttttcttgtttcctcgaagttgagtcaagcaaatctcaagattcctctaaagaaaacctcaggcttcccccaaagggatctctcattttgtcaagtacagaaccctcagctctgcccttctgctgcccagctagcttggtgctgtctctgtcactgctaagaagtcaggactgactgtcatgtgagatctcactgtcctcaggtgccctcccttcccacgttcaggaagggatctgagcagaggtttgagtgcagggcagcgtgactcctgggtacagtaggttctcccttcaccactctcccaaggacagctgagaagtgcctggtccttgcagttccgttctatcagcacctgaaattctattgcaatagataattgtattcttcagaagtatgttcttcagagaatcgtatttgtctctaagctttctgtcattaggagaactgtgttgggatttattaaaaattactcataagaaataagccttgtgcatagaaacagacgagaagggaagatctaaatgcatgtcagtgtttctgggtggtgagagatggtgatttgtgctgtcatctttgtaataatgattgctaaaatttattgagcacttactgtatgccaggcgctgtggaaagcccttgtgaggcactaatcacccaaacctcaaaacaatcctgcgaggtgggtactgttaacctcactcacaggtgagagtatggagggccagagtaggtaagtacctttgtcaaggtcacacagccagtgactgcagaccctggccatgcagctctagggtctgtgttcttggccactgtgttattctgcctctctacgcttggtttatcctcagtcatccttaatgagcatgtgctgcttttaaaatgaagaaaaggggttttgtttgtaaattaacttacatggttccaggaatgataaacgcatatgaagaaagacagtacaaatataataatgcctaaagggaaatatgagaacgatgctaatcctttacatgatcctgtattttccacattctctaaaaaaagcagagtttacctaagtgatttaaaacgtcataaaaaaagaaaatcctgctgttagaggcaccagtaagaagaacaaataacagctgatggtttttgagaatgtctgtgttccaggaattgatcagaagcattctgtgcactacgtatttgaccctcaataaccccttaggaggtagggattgttgtcatcccattttacagaggaggaaactgaggccgagggagcatttgtaccatgctcacagacacaccagtacagcagagccttgacaccgatcctccctcaaggtcagtagtacctctctgtccttttccaccccaggagaccttgagggtcagaaacacgaatgggtgcatctaattgcaaagtgagtaggggagctgatagcagtccctgggtttctggatggcctgtttggctttgctctcaggggcataaagagtttatgccagcaggtagcagatgcctgcagctcctcgggcagcctgtgctcctctcacccagccccacaggctgttcaacgcaggagccatgccccatgctacactttgacaaagagaaaaataaaggttcacatggaagggtcaacatttttctcaaacaatgcagcatgcaccaccatagccagccagtgatagtatctcttccaagagcaggccttccagtgagcctgcagaagccgcagggccaggcggaaggagggagaacaagaatgggtgccatggagtcttcctcttggagcatcagtggaaactgatgtttatgaagtgcttcatctgtgccagggctgggcccccaccattgctttcatttattactcaccacagccctataaaatgtcttagtagcacactacttttcagatgcagcaaaccagcatagagaggctgagggggctccccaggtttccaggcagttaagttggtagtacttggacgcacatccagtccagctgtagaacccactctgaatcccaccccacctgccctctgaagggcaactgggcttccctgctgtaagttttgatttcagagtagccgtgtgcctgcatctgaatggactcctcgattcaaggagctgcctttgaatagcaaagtttagttgtttttgttcttcaaccctgtctatttgcacgtgagctaactggggacccagttttgcgtaggcatattgtggttaagctgctgcctggaagccaagtgccccggggcgagctgcttaagtgggcctcatgccttcttggatgaaactgggatggtagcacccaacccattgcctagttgggagtaatcctgaggtaacattggtgaatcacatagtccaactggcgtcacacagcaggcactcaaatagccatttgtgtgtatgtacttatatcacgcatgtgcatacgtgtgtattaaaaatattaaaatcacgttttcttgcctgaaacgtagatacacagcttacacgttgttgtgaaataaatacccatgaagtctataaacaaatcaaccacaaaactagcattggagaatctcctccccacctgtccccaaggaccctcccttcccccgacagtaaccacagtcctgacttctgtaatagtcctttccctggtgttctttatagtttgactccctgtcattaaagagttaactttgctgtttggaatcctgcataagtagactcacaccaggacgtgttctttcaacttcaaccatgtcattgatgatcacctatagatgatctgttttctttgctgtagagtaactccagagtacgggagatcacagtatgtttttctgttctaccatggttgggcatttgggatagtttccagttgggaaatcttacaaacaatgctggtgtgcgcattcttggatgcttctccaagaatgtgcagtccgtcagcacacttgctgtggggtgtttaccaaggactcagaattgtgcatcattggattagtttatcttcactttttcagacactgccaagttttgccaaggtgttgtccaatttacactcctaccagcagtgtaggagagcttcagatccttgccaacacttggtagtgtcagactctttaaccagctgaaacacactcgtatttaattggggtctaaatttataattctctgaattctaatgagactgaccattttcttatatcttattgttcatttggatttcctgttttttgaaatgcctattaaggtttctgtcgatttttctcctggtttttttctttctcatcaatttatagtagtttttatatagtctacatatgaactccttgattcttacatgtattataaaaatatatgtgttgcacatgtattttcccacattttcacattcttggtcaactcttctgataaatcagcttcactctgataatgaagttgttaattgtaatgtagtccagtcttttctttcaatagctagtgttttttaagtttgttttaagaaatctttcagccgggcgcagtggctcatgcctgtaatcctagcactttgggaggccaaggtgggtggatcacctgaggtcaaaagttcaggaccagcctggtcaacatggtgaaaccccgtctctactaaaaatacaaaaattagccaggcatggtgccacacgcctgtaatcccagctactcaagaggctgaggcaggagaatcacttgaacctggtgtggggacggcagaggttccagtgagctgagatcaagtcacttcactctaaccggggtgaaaaagcaaaactccgtctcaaaaaaaaaaaaaagcaatatttctctacccccaacatcatgaaggtactttactctgtcattttctagaagcttttatgttttccttttcacccttatagtctctggtctctgatccacctggaattgatttttgcacgtgttgtgaggtgaggctcattcccccaccacccccctccctccgcccaccgcctatagttgcaaattgtcctggcaccatttatggaaaataccattctttccccaactgttttgcagtgcacactttgtcataaagcaggtgtctgtaagggtgtggatctgttgttgggcttctcttttgcttcattgctatatttgttatttcttgtgccagaggcaccttggctttaaaagaagtcctgatacccaacagggaaagtcttgacaacagttgtgcttcttcaaacatgtctagactggtcttggtccttagcatttctatgaacaatttagaatcaccttgctacattccacaaacacaaaatgttgcctagtacttttattatctattattttttttttttttttttgagctggagtttcgcttttgttgctcaggctggagtgcaatggcgctatcttggctcacctcaacctctgcctcccaggttcaagcaattctcctgcctcggcctcctgagtgcctgggattacaggcatgtaccaccatgcccagctaattttgtatttttagtagagtcggggttgtctccatgttggtcaggctggccttgaactcccaacctcaggtgatctgcctgcctcggcctcccaaagtgctgggattagaggtgtgagccaccacgcccagccccatctattattatcttatatcagtaatagtattaaagttgaataattcttcctggaccagaaaatttcaagtttccagttgtattttccaaattcttctggttacatgcacctagcctgacccttcttgtagacttagtgagtcccatggtcggattgcatctagaaggaggtacatcgagtgggagagtccacagcacagacagagacatctgcagagggacttggggaaagagcactggtcagggaaagaggaggtttgggtctgggtcccagctctgccaccaactggccaggtgagcctgggcaagcaattgccaagaagagtcactcactccttcttctgcatggccactgtgactagtgctctcaaccacacatcctttcaacaaacagcgaacttactgtccatcagcactggggcgaaataggaatataaagaagaataaagcatcatctctgcctgaggggcttagcatctacaacagtgtctcttggactgtgctgcagtcaacaccaggactgagaaatgacacacacaaaaaaatgttttgtggtcaaataattaacacaaaacctttgtgcaatattccattcatgcatattagcatttatgagatctgagaagtcttggagtttaacccagatttgcttaacgattgtattagttttctatcactactgtaacaaattattgcaaacttagtgtaaaacacaaatttgttatcttacgcttctggaggtcagacatccatattgggtcctactgggctacaatcaaggtgctggcagggctgtgatcctgcgtggaggagaaaatctgttttgttgccttctccagcttctataggctgcccacaagctttggctcatggccatccaccatcttcaaagccagcatgactagtcagctctttctcatgatgccatctctctggctctgccatcacatccccatttctgactcggactccctcttcacatttaaaagatccttgtgataagattgtgcctatggggactctgcagtataatctcttagtctacaatcttaattcctcttggtcgcttaaggtaacatagttgccttaagggattgggatgtggaggtttttgggggccactgttcttcctgccacggtagtggaacccctgtgagtccacttaccccagctttatttatttatttattttttatttatttatttatttatttatttattttgagatggagtctgtctctgtcgcccaggctggagtgcagtggcgtgatctcggctcactacaagctccgcctcctgggttcacgccattctcctgcctcagcctcctgagtagctgttgactacaggcacctgccactacgcccggctaattttttgtatttttagtagagacagggtttcaccgtgttagccaggatgaacttgatctcctgacctcgtgatccgcttgcctcagcctcccagagctctgggattacgggcgtgagccaccacgcccagccaccccagctttattaaagtacatctgacactgcgtggcacatggtgtggaggactcggtgcagggtggggtcttcctgtagcccctcaccatcatgtactctcatcttggtactgctcctgatatcatgtgatagatttgtgtttgttgccattcttcaaactccacaagggtgaggttttcatctgttttgttcactgctatgtcccatagtgttcactgttgctgacatagtcctagcaagtaggaggttctcagtgggtatttgttgaccgagagtggtggaaagtctttctaataagacaggaagcttcttgagggcaaaattcttgtccaagttatcttttcttccccagggtccagaggtggctggtgctgaatttaaagattatatagtgcgggaaaaggcagactcaccaccaggaagtcttgctggaggtcgttttcttaaggaatttgccgtagtgtatacctagactaatctgtcatgggcagaaactcttcatcatctgggtataagttgagataataagcttctcaggcaaatttgcaacagagggtcccaaacttacttggttcacagcgtcctgagtccaaaagaaatacgtagtagttttgtttatcaagcagttaggctcatactgcttagtaagtgttgctatcctcacaacatagagtagctgctcgaaaaccatgatacgtatcaacagaaaatatatatatattttagtcataatcgcttactaatgggatgtgtgtccctgttggcaactgcacagtttctgaaaccttggaatcagattggacattgccaccctcattttctgtgcatattgatttccacacttggttttctcacagcaactatggaaaactcagctcacaaagatgtaatgtcactgaaagaaatccagtgttgacaccataggctaccttgggatagtagattcacatgtccaagagatgtcaggtattgctgtgtttcccttagaaactcaagatattctgccttacccctgtgagttcactgcagtacccaatggtgtcccagcacagtctgtaaactgaagatttgtgctaattcactgaaggcctgtgtacagaatgccagagccagatcaccatgcaggggagcactgcattcaaacccttgtccccttgtccagccatctcatccctgggaggtcgggctggcaacccagtgtgccaatgtgcttggcttggcaagcagcagatcagtggggtggactccggacatccagtcagtctggatgctgatgaggcttgagattacagctgtttcccagcaagaactccttcctgggcctggcctgctcccagctccagcccctctcccccaaagatagctttaagaaatgaggtatggagggtgtagtgagctttggaaagagaaggactgggaacccaggtgggtgccagccctcgttgtaggagagtcacaggtgtcatctatttaacaaacccttccctgggtctttctgtatgccagacacttttctaagaggtttgcaaataggaggtcattcaatcctcaccacaaccccatgaagtcgatctgttgttacccccactttacagaagaagaagctgaggcatgggaggttaaatgtactttgcccaaaggttcatggagctgggaagtggtagagctgggatttgaacccaggctgttcatactctcacctggacttttcccttagggggttagaaaacctgggcaatccttcccactgtgctgctttctagcaacgtgctggggccaggtgctgaaccactctaagattctgtttttccgctgtgaaacaggcccagtaaacttccccctggggtcattgaatggcttccaggagatcaggcatgtaaagtgctttcaattatccagggtagtagcaaagaaagccttcagacctccctgactagggaatcccaggctctcctccccaccgacatacatgaacctggaagacagcagggggcagcaccgggccgctgcagaaggttctgcacctggaggcgctggcccttccttccacagggatcctgcatctcagtacctggcaatctgctcctcctccattcaggcagaacattcgagctggctttgccaaaacaagaacaaaatcacagcctggcaggatgaattaagggggaaaccaaggaagaaagctcagcataaccgttgttagctcagaacctgccttgcacatctgggccttctgaagctgctcgtttcagttgttaagatatttctgaaggcacttcccgatgcacgaaggcccctcccacgtcccaccaccggactgtcctttgaaaaaggttcgagaacgcgttgcaggtggtggtttaccttgaggtccgtgtgacgaggagcgacatagaaaagtgaccagaggttgcacctgaggaggaagatgccttttataccaaaatacgtgtgcacaatgtctttggtgtttggcgtggggtcctatcaactccgtcctgttcctttttagcttatctttgttcagctgaaacccagatgagaacaggaccttgaaaaagccacaatccaaactctggaaacccacaccttctcatagaggaatttgatggagaggctgcctcagggtgtggtgtctccacagcaggccactgctgttccctgttcaagccaccatccccagtcactggcccatctgggccctgtggggctcctgtggacagctgaggccagcagcttgagggacgcccctccttttctgcaagagggcaggaggcctgggaccccaattgtgctatgatgtctggctagtcctcactttcaactgtactgtccccaagcatgggggtaacagcacagtctcgatgcaaccccttcagcttgttggttgtttctgtttttccaaggatgctgaaggcttggtcctttgacccattaagtattaataataattctcattattcagtctgtagggcatggatcagtgacgaatacattgcttgggggatttatttaagggaagaagggctatgattatgggtgatgggggaggtgccgggagtcacagcagatgagtcaagaagggtaggcacagcacccatggcaagagaattgtatccctgtgctctgtgtcccgttcttttgggaaggcctgagcagtgagtttgtttgctgagccgtctctagagtgccagtaactctgactgctggcttaccacagcctgcagcctggatgggaggatatgactggcttcaggactttgcaggaatctctctggtctagtgtgggtgccgcttctgactcggacaactgttctccatgccctctacttcctgctgctttctcagatcctcttcctgctgctctgctccctaaccacaaccccactaaatagagccccctaattctagcccattccgaaagatcttttccagtaacatcccctgcccccaactttgtgtgcttggttatcttaaagttatgacaaaccagagataatgtgctgatcatgtgaacgtcactcctctccaaagtgacacattttcattttctaaaatgcagcttattaacagaaataagattctacagtttctggttggccatggagtgactatttggaaacagtggaacttccagatttcttcgcatccaagtaggattttgctgagggtggactcagccctgtttctgtgatataaaacattttcttcattctttccttcatcagacatctcctataagccccgttcaaatgactgcttcagggttctgggttcccgtgtgtaaatgtgtgttagttcattcttgccttgctataaagaaatacctgaggctgggtaatttacaaagaaaggagattcgagtggctcggggttttgcagacagtaccggaagcatggtgttggcatctgctcctggtgaaggtctccagaagcttccaatcatggcaggaggcaaagggggagcaggcacattacgtggcgagagccagagcaagagggagaaggggaggtcccagattcctttaaacaatcagatcttgtgtgaactgagtgagagcacacccatcaccaagggggcggtgctgagccattcataaggggtctgcccccatgatctaatacctcccactaggccccacctccaatattatggattacacttcaacatgagatttggaggggacaaacatgcaaactatattacgcggcttcctttgcccggtatttaaaaaccatttgccttcctctgtgtagtttaagttgtttttccccacctcaagtcaatgaatgagttcggaggagggaaagcttcaagtcagcgaggctaggatttttactggttggttcaatgctgaatccccaaccctgagaatagtacttggcacatagaaggagctcagtaaaacttgactgaatggatgaatatgtgattggttccacaatgacatcaccgagagaatttagggtgagttggtctacgcctatgaacagactaggctggagagctaccctccactgggcttaggttcccagcaagtgacattcatctctcaccctgctctccaggtgcccgtgtggcctgttagcacccaaccttggagctgcctggcctggaattacccatgcactgactgtcctcatcagatggccagcttctaaagggaagggccactttctggactcttatttttgcctccagggcctggagaactgtcagtgctcaagaaatgtctaccaaattgaaatttaaatagatacagcctgtgggtttgaatttgggatcagtacttttcccagaatgtcctaaaatttctgtgtaaaataccaggtattgtatcgatcagatacttaagcactgcccagagcctgccattttctcaagtgctacagaatcacttaattcctgaacagctgttacaagcagccacaacaacagtggaaacagataatgacttcaaaacgtggacagaaattgaagaattgaaattaataaatgtgtaattaaatgttagatatttaccatcgtgtgaactttgttatttgctgaatttcggagtcttgaacgttttattatatttgaaaataatttgtggcatagattatcctcacttcacaaaaaattcttgagtttgcacagtgggtgtcaagggatcttagccaaccataaattaaataagttacataaaagtaagtaaatgtaaaagcaaaattataaaagccttttcaaaagtgtggatggcagaaaaaatatttaatgatagatgcggatgtattttaatatgtttgatgtggggtgaagtcctctaaaagtaagggacacaaatttcaaagcaacctacctgaaatactatagaattgtagcataatatacagtgctttcatagagtttccaaaaattagaaattcagcctttcccctctaggatttttagatgaattcctaatgtcatctcatctcatcaatgtaaaataatctccttgacctttggtgattttgctcatcgaatagcttctgttttgtaatctatttttttcttcatcttccttcaggaatcctgttcacgatgctggtatttggaccagcctgcgggtttatcctgggctctttctgtaccaaaatctacgtggatgcggtcttcattgacacaagtaaggaatatatctccatgtctaccttccatccgcaagcgtttcctccctcataaatgcggcttcagcctgtgggttctaaaaccttcttgctaagagacagtcttgatgcccctgcctctgtagctggggctcacccgagattagatgaaagaacgtgagtgttggttcagagggcctgactcaagtctgggttctgccaacatctacctagaggctgaataacccccaatagctgattttactcctcaaatctgtattttccttatctgtaaataaagggtaacaataattacatcggcctggcagataagaatttaatgagagtgtctgtgtagaaatgcttggcatatcctcattgagtgggggcccattaacctatatgaggatcctactttccaaactaaaagttggagcatgtgttctggaggtgcaagtgtacgaacggggtcaatgagacagaatattggaacatccttttagaagacactgttgtggtggcctttgtgaggaaatatccacattcaaaaccattttaagcagaacctgtgttcttagcaggaagtgcaagtgcatttctcagaataccctgagttccccaatccatgattgtgggattgaatgggatgctagatcgatgggctagactattctgtggtgacagacagtcccaaaacctcagtgattttatacaactaaggtttatttcttggtcacactacatatgcagtgtaggtcagcagtgtcagggtcagggagacttggctcatcgtggtgacctgtagatctactctcaggatcgataagcattctcagccccccaggcccaggcccacagaagttccatcctgaccccagcttgcacagttaccaagacaggaaaccagttttactctggcccttgaaacctctactcagaaatgacatacagtgtttcccctcatatttcattaaccaaagcaagtcacgtggtgtattggtttcctgttgctgcataagaaataaccccaaacctaatgacctaaaacagcagacatttcttatcatactgtttttcgtatttttttctgtgggtctggaatacaggagcagcttcactgggcagttctagctcagggtctcttatgaggctgcagtcaaggtgttgcaaggtggcaacctggtcttggatcatcccaaggctcagcttggggaggatccacttccaagctcactgccatgggcccacaggaggggactacctcaccgtgacacccctgaagcaaacaacccaagagaaggtgagagagagcacctgaggcaggagtcacagtctttttataacctaatctcagaagtgacatctcattacttctgctgtatttcgtttgttagaagctagtcacttgttcaggtttactatggaaagagaagggattattacacaaggaccagaataccaggcagcagggactttaggggaccgtctgggtcattgcctaccatgtgctgtcacatctctaccttgtgtctgaaaaggaacactatatttccatgtagtttagcatgcagcaaagccatatttcctttctctctgaaaacagagggtgagaagccattccagcctctgcttctcatgccgatctatcctcaggatcagtaagaattctcagtccccaggttctcaatccatcatctcttgacaatgctaaatttactaattcaccccaaagaaataatgtggttttaaatccaagtcgctttgtgattcactccattaatcctactgatatatttacttgtagctaatgatgttacaaatttccaagtggaaaaaaaaaatcagaggcagccctatttatttatacttttaaagtgctgagtctgttccgaaggtgattgagtgctggtgttttgcagccgtcggctggccctttgaacccgtttcctagggagtgtggtaacaggtaggctgggaagacacaggacacatgaagtgagtcagtttccatcttgctcgtatagacaggccagcttccaccactgcacccaaggcagcacaagacagggccagcagaggggatagagaggaggcatactcctgatgcaatggggaagccaccttgaagggtagcaaagtggccagatagcatattttgccctcagtgctatcagtggtggccttgaaccaaaagcctgcgaatgaccagaatatctgagctggaaagagcctcagacatcattcctttccaactctttcattttacaaatgaggaaaccgagtcacagagaggggaagggatgtccccaatccaaggaatgtatctctataaaaccccgatctcctgagcctgcctgtggagatttcactcaccaaactctcttaggagaatgaaacggcaccttttctcagtgcctgaaatgaccagcgggtagacagatggctggagggggcttagcccatccactcccagttccctccatttgctgagactgttccttcagcctggaatgctcttcccatcttactgtgttcggcatctctgtttgcccgttaaggcccagggtggagcggtgtgatccatggttccaggctcattggctacttggtgcctgcatggatgtaaggcaggtgggctcctttcagtcccgtgtgggcatctcgctgatgacaggcttccccaccaagttgatagcggacttccctttctgtttccaaagaatgcaaggtgcattgtcagtcacggtctttgtttgcgtccttcccggaggcaccgtgaggcaccgtgtggcacagctctttaccggtagagggcagaagaatatcatttatcctatttagggagtcagccatagaattctatagttgccagcagtttttattgtttctagtcttgtgaaacttgccgcctgcaggtggatttgggctgtatttgaggaggggattcttaattgctttagggcctcccctatcttttccttgctttcctaaaacagtgctcttctgtagggctgtccaatgtatgggaacattactgtaggcattaataggcaagggccacacacgtggacacatgtttctgaagtccccactgagattggggtccaggaaaagcagcagcctaaaatttgtggggaaggagcaaggcaggtccacagagggccctcgttatggggtagatggaggagagaaggcggcgtccaccacatagcctggtgccagcattgagaggagaatccagtgaggaagcctggttgaaacttgtgagtagatgcagctggggtgccaaggagggctggttgtagacatgggccagttctggggtgacagcccccacggggcaccttgcctggaggtcccagctggctccacttggacatgggctgctcccgctgctgcctttcatccatgtttgatcgctacgtggttccctttgctcctcagctcagggagaataaatccctcccctgagagctgggggaggaaatgatggtgcctccagaatttcttttttaggttctttgttaactgaaacccaggtgagaacaggaccttgaaaaaacggacttagtagcagagtacatatctaatcactgccttggccaaccttaactatgtgggtttattacaaaaagattagtagtaacagcagccatgaattggtcacttcttaaagctatacatagattgcctcattggagcctcagcacattctcatgggagtgtagatcctactgttaggtgaggcattatcatgcagtggttaagaattcaagcactggaatcagactccatttgaatcctgactacacccccttatgagttctgtgatcctggggacatcgcacacacatcctgagtctgtgtgtggatggcatgagttactcatgcaaagcatttagcacagtgcctggcatatagtaagcacacaataaatacttataataagaaatccgagagaggttaacagtttccacagctagggatagagcagggattcatccccaggcctgtctgacctcaaagccccactcttaacagaacagctggcttccctgaaacatctccaggaatttagccagaaggcggctcccttccatggacaaaggccttgctgagatggcctagcctcaccagcacatccatgcagacttgtcctgaggcacacaccagccggcctcgcagaaggctgcatggcgtttgcagctggaacaagatgtggccatctgtttgcttcacaaaaaaggtcaacagactgagagcctcctgctctgccatcctgagggctggctgctactgctagattccttcattttgggctaattagcccaatggctgcgattctagatgttcaatgccaccctccagccttagtcccttcctgtctccagtttctaattaggtttgtaacttaatgatactcttggaattcttgagtcccatagcaaaagtttggcaacataggttaaacaaatgggtaaatgaactacaaaaaaaaaaagtccatatggcacaggaaaaagaagtaaatgtccccaacttgctttgatctcctcttctcacaatctcaagtatcctcatgagcgtgtgggtgggttggttggttagttttaaactggtttaactgtatttccagtgacttttcatttgatcttggaaatgggtggaaatctccatgagcctcctagttcagttaacctttgacagagagagcaaacagctgtcaacagctctcaattcacccaacacaagcaacaaataagaacaacccagaagtcagatacaaagagtggaagggttagaaaaattgatcttgtaaggccaggcatagtggctctcacctgtaatcccagcattttgggaggccgaggcaggtggatcacctgaggtcaggagtttgagatcagaccagccaatatggtgaaaccctgtctctactaaaaatacaaaaaaaaattagccgggcgtgttggtaggcacctgtaatctcagctacttgggaggctgacgcaggagaattgcttgaacccaggaggtggaggttgcagtgagctgagatctcaccactgcactacagcctgggcaatagagtgaaactccatctcaaaaaaaaaaacaaaaaacaaaaaaacggaaaatggatctagaaaaggagaaacaccttctatgcctgttgacacctatgtcaagacaagtccaagctgtgcctggcttcatgacagatatttcatggtacacccagtgtatggctctttgctctactctgcaacccttttctcctgtcccctttaccagacttccctccgaatgaaatggcatctgttctcatcatctggaatgaccacggggtagattagtggcttgatgagggagttgagcctatttacttagagtccccagaatgtgccacaccttgactcagcctgttccctcagcctgggatactgtctctacctcattttattcaacatctttcttcatccatgtgtctagttttgttggcaattgaatgcatctaagtaaatgagacagattggtgctttcagttttgttctgggcatcttactgaaagcagcccttgccagaaggctgaaactgcagccattttttttaaagttaagacactaactagaaccaaatagagaagtaaagaggttttcaagccttcctccctacttttatctaaaacaatacttttgctatgccaagcctgcctgagactgctgttcttatagaacgtggatttctatttcctaaaccttttgtactagtcagggtaggctaggttatgttgcggtaacaaacagctcccaactctcagcagcttagaatactaaagggttctttcttctttgtgctacatccagtgtaggtcaacagggacatttcatttattgtagcctgtcagataccatcttaggaggaaagagggggtggagtcatgtaccagctcatacacacttccacacagaagtgatatatgtccccttgctcacatttcacaggcagagctctgtggcttgtagttacacctaacttcacagagtgaggaggtgtcatcctccttgtcctcagaggaagaggatccaatgcagacactgataacatctaccacaccgtcctcttccagccacacagagaactctccctcaatatccctagttctgaaacagtgtctgtagagcattgacggacaattaccaacaggtggagggagatttttcaccaaaactagccaaaatacctcataaaaattatatttgttagctgggcacagtggttcacacctgtaatctcagcactttgggaggccaacgcgggtggatcacctgaggtcaggagttcaagaccagcctggccaacatggtgaaaccccatctctaccaaaagtacaaaaattagccgggcatggtggtgggcacctgtaatctcagctacttgagaggctaaggcaggagaatcgcttgaacccaggaggtggaggttgcagtaagccaagatcacaccactgcactccagcctggccgacagagcgagatccacctcaaaagaaaaaaaaaaattagtatttgttatagagatggacagaggcaagacatttctcagacgggtccaaccagtagccgtcttccccagatcaaactcaccaaagcctcccccgccctcagggcagcacactccacagctgagcagtttctctcagcatgttatttctctctgccacagtgctccggataattgaaatggagaaaaaaatcaatacttcccaaaatagtcagtgatgagtgtcttggatctacagaatcctgctgtccaccaccttcacgcaggccccgtctcctgtacttgcccgggtggcaggcgggctttggttctgacacaggtgacgtgcccttccccatctttcaaactgtgagccagcgtcagctttccccagacatacacatacctacaggaagcaagttgacacgttcacacaaaccaccacctcccccatcgccatccctctccctgggttgttttctcacacttagaacaacagagtcactaacttcctaactaaaatatgacttttctaattttgttcccccaaacaactgctaggatttctctctctttacccgctcacatctgccagcttttcaattccccctttatggagcctggagacaatggaggaaaatacttcagctcccttttgctgtcttttgttttcattcattgcttggcagcaggtgaagaaacacagtaagtgactagtgaaaatattcctgttcagctaccagaggcaatttcacttccttgtgtcttccctcatttgcataaagatgctttcaagatcaccttgtgttttcccatgctgtacccttttttaaaaagatccctattttgagattctcatttatatacatatatgtacataaaagtgagaataacaagatctctctctatacaaagagcctactgtgcatcaggtgattcttgctcattgcctgtcatccttgcaaccactctaggttgaagctgtctttattttgcaaatgatgcagctaagactcaaggagggtaagtaatctgcccagtgtcacatgctagtaagtggcagagctgggattcggccccaagtactccaggcttacactgtcccctctccagcatgtagctatgcagaaacatctggtccattgtagtgctattgttgcgctgggtgtatgtcagcatctccaggacagtgactaccagtgttccaaaggccacttgctacctactggaagagctggtggccttaggctcatggcacaaagagcaggaattgatcattcacctcgggccctacagagagcccaaaaacagacattgaagaggggcagtggaacagaaaggtgagagcgtggaccttggcatgtgtatacctgtgttccgttcttcagccccatgaacctgggcaacgaacctaacctttctaagcctcagttactccatctatagaaaacagataataaaagtcctgccttgtagagttatggggaaggttggctggaacagttaagaatgtgctctgcataatgcctggtgcagaggaagccctcaataaacgatggctggccttatcattaatgctagctgaggagtcttcagggagaacattttatgagtgctgaagtgttcatctggtgtgtgcggtcattactcttcccagagctgtccatccatctggtccaggcctgcagccctgttggtcttacctcatacaccattgcccagatctccccagttctccttccatgttccaggggcatggtttattatcaaagagacatttctaagcagctcacctgggagctgtgctgtacaaggcaggtgtaaagagagagaaagaaaaaaactgtaccaaagggtaagctgaagtttatgttcttgtgacttagctggcacaataaaagaaatagtggtacagtgccaccaaaccatatgcatagcccctttaagcacatgagttgactgcaaagctttgtattagagagctggtgccaaaccacaggccaccaacaaagttggcattaattaattaattaatgcatggaaacaaaggcccctcaccataaataacaggctaccatcatctgggtgcccaagcatgcgccaggcactcttctgagcattttatgtctggtgtggtcatttgatcttcccactaagtactgccatcatcctagatgttatacagatcagtaaactgaggcatagagagttcaaaccactggcctagggtcacacagagacaaaggggtaggacttcaacccaggcagcctggcttcagaggccctgctctaaaaccctattgtgcgcctccccttatgagctgtgaacctaaattgaggcagtgagtggggcattgagtgggatctcgtgtgagctgctttttggaagccaagagtgaatatacccggtgaaaatctacctctgaacaataaacatttccttgtgcttctttcagcacaccttagcagtgctgccaagccagttttagcctaaattcagagaacgtctggcttctcactgtttttgtttagaccgatataaacacagggtagacaagaaaattaaggagggaatgtgatcagcctccggctttgagagaaacagaaccgctggtgtggaacaataggcttcgtagcctggcagccagtgttcccgaccgcaagtcatttctagagcccttgccctctctgttcagcggattcagattctcagcaaaatccccagtggtccagccttcttttctccactaagctgtgctctttccatttacaggtaacctggacatcactccggacgacccccgctggatcggagcctggtggggtggctttctgctctgcggtgccttactcttcttctcttccctcttgatgtttgggtttccacagtccctgcccccgcactcagaccccgccatggaaagcgagcaggccatgctctccgaaagagaatacgagagacccaagcccagcaacggggtcctgaggcaccccctggagccagacagcagtgcctcctgtttccagcagctgagaggtaaaggtggcctcatctgcctctgctcagaacagtagggggattgggatgggggtgatgagtgaaggggtggcacccaggactggggtgcttggggacttggtggaggcagaataatattggcttgcatggctggcctctaccagccaggtgcttaacttattcctgagaagtaaataacctgacttgcttaataaaaacaaaaataaagtagctaccatttgttaaagggacccagtggttaatataggacctgacatttaataaacataaatgtcttcagaaggaagcaaaatattctgtggagcttttttgaattctttcaggccacccataagcacctggaagcaataaaggaattttgaagttggcttcctttgcctgatatcagcattctttaaaaagccacctccagccgggcgcggtggctgtaatcccagccaccgcgcccggtgtaatcacatctgtaatcccagccctttgggaagccaaggcaggtggatcacttgaggtcagaagtttgagaccagcctggccaacgtggtgaaaccccatatctgctaaaatacaaaaattagccgggcttggtggcatgtgcctgtaatcccagctactcgggaggctgaggcaggagaatcgcttgatcctgggttcaagctcaccagaggttgcagtgagccaagattgagccactgcactccagcctgggtgacacagcaagactctcatctcaaaagaaaaaaaagccaccttcaaagtacatttctttacattcactttgtcctttcattgtctccactaaagatgagagatgttttcctgcagaaagaaatattaacccagtcttaatgacacagtcacactttaggatgcagcaaagctcttgctatcattttttaaagaaaaaaaagtgcaacttttctgacaaaatggtgaagcacaaacaatgatgcagagtgagaacccccctccaccaccaccgcccaagttgtttccatcttcggcacaatcctttaaagacgaggaaaatgacaaggagctgaatgtagcctggcagtctcagaagctgctcggcgactatcaggcgaggtatgtgtgaggttccttaatgcacacgactccttgctcagctcccctgacgtcctgctggattttagaaatgagtgggctcatgcagccaggagcaaggtcaggcactacttcccagggaagctgggatgcagaagggagatggtcagtcccctctgtgcaggaatgcggcactcagccgggccagccttccacagcggcagatgcagtcctcctgtgctttatttagacatttcctagcagtgaaagtctgtttactaaacttctgtgtaacaatgtgcgccttctatagagatgctagagatttgtggagagaagcttgaactgctttgtgctcagccccctgttctgttcctcaccagccctgcgatcattaactgccccctgcttcttttccacgaatgtaaaactgtaataacacagttcctcactgccagtgctgtctcaagaatgaaagcactgctgcagaagactgtctgttaatcgtacctgttagtccatgagaaatctcaagaacttgtgcgatttctgaaaagagacaaatttaatatcgtaatgttatgtctggccccatgttccatgatggtttctaccaatgctgtaatttggaatcatccataaaacttaagttccagaatgcaccggtagatgagaaggccagccaatctgtgtcctctaaggttgccttggttggaatgcccccgtcctcatgcacgtgtgcttaataaaataggctcacttccagcaggccccaggcaaggagggtgcctgcgactcccctagtagcaggagagtgatgcctgagactcccctaatagccatccatagaaagtgtcctggtaactagacccctaggaataaattgggcaggcatgagagtgtggctttcaaaggacatcctggccatgggcgactacagtattttcaggttgctccccacctcgggatgatgaccctgtttccctagggctctgattgtaaaagctgcactagtaatcacttgtctttcatctctgggaataaaaagattaaaaagatacaatggtgccatcagagaactcaccatcccacacaggaccaggtctgcaagtcagcaaaggcagcccagtgttttgagaaccgcaataacaagcagcacaggtggttacagaaatgcagcaaagaggcagagagaagcccaccgctcctgggctgggagtcacgggtgaggaaagggtcagcggcagagctgagccaagtcttgagccctgctatggcttaagcattcttgggtcatgattcagtcgctcattaactcatttgttttattccattggtagttactgagaccctactcggtgctaagcacagccttgactaaattgacttatattctggagcttatgttccactagggtgcaacaggcaagctcagagcaatgacaaggtaagcaagcactggatgagctgccgttgagctgacaagtacacagtcaggtagacaagtctgggacccgcgaggccatattgattacaaattgtgatctgtatacgcacaggcttcacttctgatggttaatgattttaatttagaattaacaattcccagaggcaattggcccataatggactaaaaggatgtctcaacaggaaaagaagaaagtgtttctgcaagattccttaagagccaaaatacagtgaaatgagctattatgctaataaacacattttacacatgccagtgcatgaagtggggccacagtcgtttacatgatttatttctccatgcgagacacatgtttttgctatacgagcttttccaccaaaagcaccatgcagtgcaccctggcattccaaaacccttcatccagtttgcatcctggaaaacccacgctgcaaatgcagtgctatatacatgcagtgtgttacacatttgtgggtttcaataagctgaacggcgttgcatgtatacatagaactgacattgctcctaaaaccccatgttgcaatttctcatccgttttgtctgagcttccaaatgggtttcttctttggccatcaatctgtgccccctgccatgctctgcagacagcaaaggccccctgataagagctggcattatgccaggaagagcccttccagccccctcttctctggaacttagagtcttctcctgcttctaggagagaagggggctgtctgctttgaggcagatccacctgggttaaaatccagctcagtcgcttcttaatcatgcagccttggccacatcacttaactcctctcagctttcacatatggtgtctggtttagtctttacaaaagctgtgtaaggtcagtgtcactgtttattcctgtctatagatgagaaaaccaagctggtgatatggggatttgagtctgtggttcgattttcagaacattcccctaaaaaaagcgggctgcagaggtctgcttccaacagtcagccgtcaattgggttttacaacccttatccaaagctgagagatggaaagcccggagtcttgctccaggtcagcctggaagtccccatcttatagcaacagccccataaccatcttaccatgcaggaagcagatgaacaaatgcttgggtttgttaaactccagtatctccccgatgtgggggctggccgagccaaggcacatttttacttctcagctgcgccaccaaataacttttcctttaagacctggctctggctctgctcctccctgatcttgcattttggacagcctgttttttacacacctcacattcgtcctcttgtgtcctctcctcccctttcctacatggtaagccgtgtgtgggcaagactgcacctagtgtgctgaatctagcaaatgctcagaatttgcagaattgcttttgagaggctacacctggagggaagaagttgagggactgtaatagacatacgtacagtatcatcatcagatagtgtattaaatatcatctccacagttttgtgctccattgtaagttgtctccggcatctcttgccctgagaggccttgatggacatgacgagggtctcttctgcagccgcatgtccatctgccttctccctccagctctgtacagttcctggaatgcatcaggcagtctcttgtttgctgctatttctccctggaatgcccttcttccttcagttcacttctgggctggactgtttctcacctccccaggaagccccccaaagcccctctgtgtacctgcccctgtgtacccggtgctaggttagctgcattcctctgagttccacagaatccctgcaaagcacctgggaacacattaccatggcagtctctctgcttgtctgtatctgtccaaagattatgcattttccagggatgaagctgcagttcatctgttcatttccaatgcacagaacagtgcatagcatgtaggtgatactggttgaatgaagtaataaatgaatactttcttgcaagcctgcatgtatgtatagacgtggacgcatgcacagatagcaggtaatgattgttttttgtgcactgtcatatttcatccctgtaaccttaggaggcatcggtaccacttaccagtaaggcaagtgaggcttgtagatggaagggaaaggcatttgaacccgggcgaaggctccagtgtctgtctttttaaccatggcattatgctgccacttctgacagtaaacggacactctcttaaagaataagtggcgtcagcaggtgctgactgatttcttagcagagtgtactagaagtacggctgctggctgcaacagcacaggtgtcccctaaaaagatgggtcttccagacacagctgcagcctaaaaggaaggggagaaccaactccctgcaaccattggcctgtcctgaccctctgccaggttttctagctgggatgagtgtaaccgcaccagaggtttaaaatccaaagggagagtcctgcctttgatcactgaaagagagggcaatcaaaagctgagcactcttgtcactgagcgcttcatgctgactgccaagtggtctcttcctgtcccagaaaagatagcaggtgccagctgagtgggcagggctggggcctcaggctcagagtcttcaaagccaccacccaaatctaggagatgagttatgatttccggagctctcgcgtcgacctcccatttggcccccacaggtggctgatggggtggttatgttacttacctctgtcctgatcagggatcaggacaccaaggctggcaggcggttggggagacagggagaggtgagtgatgttaaaccaggtacttagattcccgtggctgggctggacctagttctccagattccaaatcccgtgctctttcccgtttcctgtaagggttcactaaattgttcataaactgacgaaagaggagaaagggaatcaggctggggcccgtgtaacaaagcccttcctgtgtctgagaaacgtacacttctgctcagcctttcccccctccaaaagaggccatgcagagcccaagctctagagaaggttcaccttttgaggagctgagatcctcctgggtccttgtaacctcccctcccctccagcaatgcagtccatcctggagttcagctgattttgccacccaagtctctctccagcctgcccttgatctctgttgatctgagagtccttgttaacattaacaaggtaacactccacactccagcatgccctgggccctccaggctgttgtccatgctgtgatcttttcagaacacatctgatcaagttactgcctcttgctttaaggtatggagacaaagtccttccatggtctctgagtccctccaaacccttctcatgccagtcatgccctgttccctccacgcccacctcactggtctcttttcagttctccctataccccaggctcctttcctcctaggactctgcattcgttccctctactggaattctcatttcatcttcagacatcagctcatgtgtcatttcttaggaacatcttcctgacctggtggtaccccttccaaggcacatcataattttcctttatatgtgtgaataattgtcctttattcacttactctgtacgcttcatgaaggcaggactgcagttgttttttctcatgtcctggtacacagcaggtgctcagtgcctgctatgtgataggggagggagtaaatggattgccgctttccctaaagctcccctgccccctacttcccactcagggttttggcctgtgtttgaccaatccatggacgtagacttggcaagagcttcaggtgtcctgagtgccaccaccagcccacatgtgactacctgtgttggagagggtctgcttctggcaccctggctgctgaatggtagaggatgtgccagccctggtgccaaaactgacttgccctggggactctgggcttcatgttgtcgcttgtccatcttctggcaggtgctttacatcttggtcagggagcacattcacccccgccccaccactgtgcttcccacagttcagcaggagccacagatttgcctgtccacaggacccagctcatgcctctccacatgacccagctcatgcctctccatagctcaggcctggccacaggacccacttcatgcttctgcatctcagcctcctccatccattaccatctagcagtcagtttctgctatgtttttcttaattaaaatcctgtgcctttcagcataatgttatcatgaggagcctggtgatctgagagtccttgttctgccggtaaccagctgagcacttttttttaatcatgcactctgtcctcagaaccatgttcttcctgtgtgtggatttcctgttaaagtttttctttcctgattccatggtgaaggagaccatctgccctcccaaatgcttggaatcctgtgccaggctgtgatttacattctgccatgtcacaggagttgtttttataggtccccacggaccagactggtcactggcttaagttcttatcaatattgattgataggggacctgctgtggacagcaccggagggataggtccatagataagctacagctgcacttctcaagttatttcagcaaagctcctgagacaaaccatgtgagggtgcctagcatgatgcctggcactttgttgatattcctggagtgcgtgttgaatgaaagaatgaaggaaataattagaaggcagcatttcccaatgagggtcccttgagatgctcagggaaaaacaaatcaacagcagcaataacagaaggatggggaaatggttacatggccaaataactttgggaacctgtgtgctgtttgatcctctctgagattcatacttctgaaacatatgtgactcagaactgtttcagtcacattaactgtagctacttggctaatgcttccagaatacagagtagaaagcggaaaggctcacaggaggttcaaagggatgaactgaggaccagagagaggggacttggagatacttgattaaagattgtagcatttcaccccagtctggaaggatgagcaggatccccgtggatggagagagaagagctttgggatgggggacagggatgagcagagacacatggacaggaatgcccaagacactgttgggagctagacgtctggttttagaaaaggtcatgctggaaggcagactaggggctgctcccacaccagcagttcctggtatctgaagctgctcgtggaggcttttgtgaaattatgaatgagttattgaaagccttagcattgcccttctgaagcatctggactttatctgaggagcccttgtttcccagccaggagtttgagtcagcatcagctgtggagtttcttgaaccaccctgtgtgtgggccacagcccaggaattctgattctgtgggtagagaaggggtccaagcatctggatgttttcgaagccccctagatgattctgtgtgaactcccaattgccaatgaatgccagaagcagtggggggttctttgagtggcctcctctgggggccaacagatcagagctggtcctcctgcatttgtacaggcaggggacatgtaatggcaggggactcactcaccaaataagcttgggacaccgtagacactgtgatccttgtggagattcataagtgatatcttagcgcatgaaggctctgagaagggctgctgtaaactcaacacttgaggaaataccatcaggaactctaggcttaaagatgggtatttatgtccatcgggtatttcacccccactgtttcttttatgaatgtcagtatttctctttccaggctttccagggtgaatgcctccattgttggagttttcatgaatgccaaatgcagtcagccttgctgccatggaggtggccaccactctcccaaagaaggttcttaggggctggcctggagtagtgaaagcagttgtttgcttacaaaagcctattcccttagtctttttctctctgctacctctgacctggaaagacaccatgttgggtctgaataagacgttgctgcctcccaggctcctttcttcatctctgtgatcccgagcggagcctgcgtttttctgacttcacactccagagggacggaaatgactggggcgacaccaatttggagctgcagcttgcaggaagctaactgcacctctgcagacacttgcttcgtgctttaaactggctaatgggcagccacatgactttttctcttgggccttcttggtggggttatgaagcgttggtgaccttaaaggaatcaatagaattgatgggggagttatccccgccagcccgcacccagctaacattgggatttcattctaaatgctcgtttctggtgctgatcatttatttgttcactcaagccacaaggtgcaaaggaagcactaccctctgcctcttatctccagaggatggtcaaaaggaaacccagtagctgcttctctcaaacttgcaaagagaaggtgctaggaagcgctcccatgggctcctcaatagcccagggcagaggttaggaggcaagttcatccgcagcaatgaaaccatggtgggtctgaagctggggccggaggctgccccatctggggccagtgtgtggcaggcacttgcttttagaagactcccagacactgcaggcctcctctcccacctgggctttcctctacccctacgcaagggaatggcttagacacctccagaatcgacagtgtaaatgaagaagagactgacattctggattattgcccccataggccaggagtttgagtcagcatcacctgtggagtttcttgaaccgccctgtttgtgggccacagcccgggaattttgattctgtgagtagagaaggggtccaagcatctgtaggttttcaaagcctcctagatgattctttgtgaactcccaattgcacatgaatgccagaagcaatgggggggttctttgatctcccctgggggccaacaggtcagagctggtcctcctgcatttgtacaggcagggggcatgtaatggcagggaactgacctaacaaataagctccccctgactgtataagcaagggtctgaatatgtttccacccagacagtgaacctgtggcatgtcactgatggttggttcataagtttttttctgttgcctcagttagtgtttcttacgaggctataacagttacccttcaaagctttgcaattcattcattcattttaaaatttatttattagattctttaataccccttgagtttgttaagtgtctgctcttacggggcgtggtgctcacatctaatgacagaactgctccatccttggtcccacgtggcttctggcttgggagatgagaaggactcaggcaagggcatccagcctgcacggggcacattagcaaccaactcggtggttgctaaaccttgatgctattccgtgacaccgtttctcctaggggtcaccccaccttggattcacacccatgcttccgtcacagtatttttctacatctttattatttcttcctctttccctttttttaagttatgatttgaagactgtcatttatctcatctaagacctccctgctctctgttctcttctgtctgtgggtctcatgtgttgggaagctcctcatggcaactcaacattcagaaaaacaacttttatagattcaattccccacaaaatacctgaatgttaagcacatggactttggagctcaggctgaccttagttcaaatccaccctccctcacctcccagctctgcattcttgggcaaggtggaatttatagcctctcaatgaagcgttggttttctcatgtctggaatgataatgttaagacgataacccaaaaagcattggctaccattgtaattactgagcagttgcatgcattagcttcatctccccttcttgggagccgtgacagtggtgtgttgacagcaatgttatcaaaggaaaataaaaagtcaaggccaacttcagtagagaagattgaaagcagaaatacaccgagagtccagcaggtacactgagccccatgataaccactgccttgggcaacttcaattccggggaactggacatggaaaccaaggccatggacaagtacattgcttcctgacctggcctgctgcctggccctctggaggtaggagctcttcttgaccacagagatggcccaggaactcagcccagcccactttctccatggctatggctgccccacttcaccttctttcccttctctgctagctcaccaagcagcgcacacagatacatctgcagcaagtcgtgtatccccatggctctgaggaacactacacatgacaaggagcctgagggtttcctccatgacttgaccgtggatcacttcttttatattaattattattattcttactgagctcacacctgtgtgccagagacactgggccacatgctttacacacttgggtctcatttcatctttatagcagtctgtggggtggagttctgtgctccagtcacttccatatctactaaagccttgaagccagaattcaatcctgattacctgactccttagaccaggttcttagccattattttatacaacctcattcagcaaaaccttttctacagtacaagcctcctctttcagctctacaattctttcttccttttattaatatttctccctccctctcttccctagttctcttccctcaaaaaaaaaaaaaaaaaaaaaaaaaaatggactaagtcccagatccatgccagatctggtcattttccccaacctaggcagaaattttttattattattattgctattactatcattatttcttagaattaagctgcacctttgactaccaggagtggcctgcatgcttaatcttcaaaccaagagcagctcagaagccagaccagagtagcatactggtgacaagcacatgccatggcagcaggtaccagggtttcagtttctgctgtgctgctctaaccatgggacctctctctgcctcagctttttcatctgtaaatgggggatttaatagtcccaagatcacaggtttgctgtgagcattgtgggagcagataggtaagcatttagaacggcatttttgcacaaaggaaatgctctgtcaacgttagttttcatgactcctccaaaatctgcctttctccgtcctgaaggacccataagtttccaagaactcttaatcctacaggaatctcttaaagactagcagtagaaaacctgttttccctagagaccgctctcctgccgctctttccacctttgtgtcatcttgctggtgacagtaccaagctcctaatgagagttgaaaaggtttctgcagctggtgaggctgcataattcaagccagcctacctcccacctccagctcccaagttctgaggctaaatcggtaggcggggggtacatggctaagagagtctgcaggtgttcaatggcctggtgtggccttggttcaccagtttctgtttgcctgggccgccccattagctgctgcctccttaaaaagtcagaattttataggcttaacaatctgtttgaatgcaaaagcttgaaacacagggttggccctaggagcaaactaattaatagcccttctcaaactagggttttggaaggtaggctgaacctttgaaaagcaatcatcttttgagggtgctgcaagtcattgcaataaaactggggatgggaggaagaacttggaaggaaatagcgaacccaagaggaaactgtcatttctggaggcaagttgccttggtagagggaaaaaaaaagaatgttcttcatgcaaataaggcccactaaggcttcctcaagtcaaatgattcagtcaaatcattctcaaacctaatgatttttcacatctaattcaaggagaaattagttattagatattaagacaaaagcaggcagacttctatcttgacaaggaatccttcccgctgaagtggaattatctccagaataattaaattgcttgctgaagtataaaagcattccattaaccggagttgcctttgttgaacagtgccttcctcatccccaaacaaatcatgatgactctgaacaaggacagggagataccaggacctaaatagataatgtgataaaactgaaatcatcatcagtgtcatttctgagccaaagagcaaagttgctaatcagcaaatgctggaggtatcagcctcagcccggcagcagttttacttgtgaccaagcgtggctgtgatgctttattctccaggagtcctagactctgcagattctgcaccctaatgaaaaaaatgaaggctacagtgaaagcacggcagaggatcgttttcctggaatgtccccagcctgcctgtttgacattggcaatgtttccagaatttagatatctttattccaaaagagcactgtgattgagaaatggcgttattacttgccaaaacacataaaccaccgggacattcaaatgtattcattacaaggaggcactgttataacccgacgtgatccatactgctcttactacattgtgaaacttgttgttgtgtggcatggccgacaggtctcctgccacaggtacactacaccatcagaacgtgccacacagtatagcaaatcagatttcactcattcatagtgatttatgaggatagagttgtaacatccaaggggcttctgtacatgaagataaatgcttacctcattgtcctctgtttatgcccaatgaattcatctgtatttgttgaacaatccacatatttaaatatttcacagtcaggattactctaaatatttgtaccatactttaaacataatgtggatttaacacaggaaaatttcccaacatttacatataggtgttataaaggtaaacacttctaaatatttatttgaaatgatatttctaaaaattcagatgatggtaaatgctttaaaccttgtaaaaatagacaaaacacacacataaagaccagtacacttaaaatcgaggagggtataagtgtattaatacaatggacttgaagttgttttcttattatctttattcttattcatagccttttaaaagtgttatttttatttgtgcatttatttcatcagagagttgcctttctaatgtttcaggaattttacaaggaaccaccacagaacagccaaggccaccagctctggttatcatctggttataacacaggattcggttgctcaggctttgccaattccaagcttttggtcatctggctcagtccatttgcataactaagttctttttgttatgtcaaagaaccctaagatgccgatcttctgtgtagattttcattcttgaaacttgataccattcctggaaatggtaaattctaagttttgtatatctgccagttcttgacttattgagcttgtctgttaacattattaaaaacttatgcatcccctattattattttattctgatgagttgggccgcttagaggtttcatctcctacgagatgagattgagcctgataattagctctcttctttaggacagctggctaattcatcaccttggaatgcagtgtgagactccctgcccacctgtttattttgcatgccaccacggcactgatcagtttttcctagacgtggtgtagtacctccttcctctgggactctgtgttttatctgttctgtttgcataggtggaaacaagtaaactgcatgtcagatactccacactttatgatcgcagcagcacagacttccctaactttagtctagtctctgggaaaccacctctataatttttgctttatttgcattccacctgaaccattatgcacttaagacttctctttaaataactttaaatctacttactttttgtagcctagcagtgtcttaagccataacagccatgaaaccacgcattcgatgtatcagctgtatttcagctttgttgtaaggacatattaaaatcatggcacaaatattgaaatgacagggttgtcctggtgccccagagctctcttgtacactgccaggatacgtcataccataatttaggagacttggctgaagaccacatgccaatgattctgattgctgggaatatccaaataatgtgcttgttttcaaaggatttttaaaaaatgaatctcctattttaaaagcaccaatttaagggaaagtcttagtggcatataaaaccacatgctttaagaaaaatagagtaaaataaagaaagaatgaagtacaagacctcaacaattcctgctttccggctctgtcattatttaaagtggtgcatgaacctcagagcacttttgcccatcaccagctctcatagaagccctgagcaccaggactgagtgggaggcttcttctagggtagactgggtgatgagaagagaccccctaaggagaaggaaacacattcagcaaagatctacaggcagagcattcttgtatagggaagacccccaaggacaaagacctgggtggggtggacctgggtgcaggcgagaaacagccagagccactggggctggactggagggtgggaagaggaggggctagggggtgtgatcagatcactgaggggcagacctcgggccatggcacagcctatggattttgaccattgcagggttttgagcaggaaactgatttgagctgatctcgctgactgctactcagggaattattatattggatcaagagtgaaaaccaagaccccagttgggtggctctggtggtctccaagtgagagctgatggaaattttgccagagaggtagccatgaagatggcaagaaggggttttattaggcatgtacacattttggagagcacaagaatttcatatctttcttgaaactgttaagtatattttcttacacatatatatatatagatccatcaataggtatattgacatatacttaaatatattgatatttatactttattttatataaacacacacacacacacacatttttttttcttttgagaaacaaaccccaaaccctctgttagtagaggatgaaaatatcttctgacattgctttaaaaaaattttactgtgtctagtgaactgtaagaaaagtcctggtatagtctctcctgttttagtagaagatagtaattggcaacatgtcagtgtacgctttgaagccagagatttcacaatcatggatgacttatggggtgtagattttggccttagcaactgggtacctctggatgctgtttgctgaaatggacaagagcgggccaagaaggggccttaggagcagggagctataagatgggagcacagggtgtgaccttgaccctgaccatctgccttctgtctccctgcagtgatcccgaaggtcaccaagcacctgctctcaaaccctgtgttcacctgcatcatcctggccgcctgcatggagattgcagtggtggctggcttcgctgcctttttggggaagtacctggagcagcagtttaacctcaccacctcttctgccaaccagctgcttggtgagtgtgtcctcaggcctcctgagagggtcgggggagggtgtcctgtgtgtaaggcactaaaaatttactgagccctgctgaagaaccccactctgctctgggcctacagcaacaagatatatgtggcctctgtgcacaaggaatttaaagtatattctcagagtaagatttgcctgcctggatcagttgctaaaagcacatgataataaagagtgaaaatataaaatgtacatttgagaggccagtaagtcgatagatgggtgtgaaatgggaaatttgaggaagctatgatgaagaaggataaatcttgaaaggttagcaggttttaatcagccacataaagttaagaatattcttggcagcatgagacccatagttaactgcagagcttggaagccatacactccctactcctccctgtgcccacaacagacataactaatggatcatgacactccttctccccaaggtcaggcatggctttacagttctttaaatcatagactacaggtttctactcccaattgttcagagttgacatactaaagaaaaccagtttgcactcatgagaagcagtgttgctcaggcagggtaaggaatgtggtcctgcagcatgtcttagtttgctttttgttttgtgacaatatatcatcctttacttcaaatgacaggaagctgcatttgttgagttaatcagctgagatgttgataagtagtggacacaacagcaacagacatagcagtcaaacaagagggaagaatcaacaatggctctcaggtttctggcttggagagcttgtggtaccatttgtaaagactggaaataacaaagaagaatcagatccatgcaaagtttctggatcagacctgaagctgttgagtgtgagatgcccatagcatatctaagtgatgtccagtattcagccgaggggtcaagaagggtctctgggatgataatcgatattatatgtagtagtggaggttcagttgcctcagtaaatggatggtagttgaggacatcggagtggaatttacgtaggaaaaaatgtgtagagttaaaaaaagataggtgaaaccccaacctgaagaaatagaggagtctgcagagaaatttaagcaacagcacccaaaagaaatgcagagaatgtggatcatggaagtcaagggtgagatgattccaagaagaaagcagccatctgcaatgtgagcagtcaagcaaggtgagggcccaaatgtctctgttggctttaatgatgaggacagcttgcagcctgtgtgagggctgtgtccctgaagtggcagcggtggcacccgttctgtggtgtggagggaagcccacgagagggaaggagtagacagtgagcacgggacttagccaggggagaaaggagagaggacatggcctgtggcatgtgttggagtcgagggagggagtggtgactatgtggttgctgggacaggaaagacttgagcaggtttctcagtggagggaaaggagcccacagctggggatttgcagcagagagagggaatgtggtggacagcccttgacagaggagttcacctgttctcctgaaagagcagagggagggacacgtgatggaagctactgagaatgtggtgatacagccaggcatgggggcagctacagctccacagacttcgtcttctctgtaaagtaggagtcagattgtctgctgagaggaaagggaaggtgatgctttctgatcttcccttttaaaatctcctgtcatgtcacaagatggccaagaaacaaacacaaaggtgctaaccatcatgagtcatcagagaaatgtacattggaaccacaatgaggtgctgctaaacatccaccagactgatagcaccaagtgttggggaggatgtggagccactggaacttgcatacttcgccagtgggaatgcaaatgggtgctgccactttggaaaactctttggctgtgcctattaaagctaaccatatgtctgtgctgtgacctatcagttccatttctggtcatctgtccaacagaaataagtgtttatgttcactcatttacatagcatatgtaataatgtccagagctgttttatgcataatggacccaaacttgaaacaacccaaatgtccgtcaatgtaaaatggataaattatagaatgttctatggtaaactattgcacagaatgagaaggaaagaactttgatacatgcctcaatgtggttgaatctcacagagttgaaagacatgagactcaaaagagcacatatttagatgaattaaaaagaggaatagttaattgaggtgacagaggccagaatagtggttacctttgggggaagctaactgggaggcacaccagggagcctcctgagctgctagaaatgttctaaggttaatctgagctgtagttacaggggtgtgtacagacgcaaaagttcatcaggctgttcccttaagctctgtgtacttcacaggacataacatatctcagtttaaaagaaaaagtaggccaggcgtggtggctcacacctgtaatcccaacactttgggaggctgaggtgggtggatcacctgaggtcaagagttcaagaccagcctggccaacatggtaaaaccccatctctactaaaaatacaaaaattaggcgtgtcatcccagctacttgggaggctgaggcagtagaatcgcttgaacctgggaggtggaggttgcagtgagccgagatcgcgccattgcactccagcctgggggacaagagtgagactttgtctcgaaaaataaaataaataaataaataaaataaaatgtaaaaccctatcacaatgatatggccagattaccacccctctccctgggaactgccagggtaccacaagtcttatgtttttcttttacacaaagaactctctaccacccaccacttggtcaattttacctccaagaggtattggcaaaatgcagtcagccctttaatatctgcccgacagagatagggtaaaatacacctctttataattaaagttgtaacttctttgttatccccaggatctcaggtttagcccttcagcacctgaagagtttatctctcacctgctgactcctctgctgctttttcttccattttgattccatttgcacagttgcttcaactttgggcagtgctctgtttcagaacagatgcctacatcttctatcgacaaacaaatcaatagtcttcagggcagaaggtcaaaaaaacaattctgccttattgcgcctttctgtctcccagtgatttctgtctgctggtgtgcttggcaggaggcaccttctcctgagctgggcagtccaggcaagcagcacaggtgccctctgtgtgtgccctgcccttggtgacagtctagtcagtgtggacgctggaggctggctgcaggaggggctggcagtgggcggttagagaaggcagacttgggagatgaggcccaggcagtcatcccagagcatcagcactggccccccttccaccccttgcaaagtcatcagcaaatggggcagagctcagagaagagcaacacaggtgattaaagagctggtggtgctgatttgtgagtgaagataaaaaggactcaatctgcataggttaacgtaatgagaatggaatttcagggaagttctgatcaccgcctggagtgttaaggacagcacatacatcagggagggagggggcctgacaatggcttggagaaaaggtgtgaaagcctgtgattgccatggttaccatccttgacaggtgacacccccactgtctctgctaggaaatgaaacaaaacacaggcctgctttctgggtgtgggcatgttgtcactgatgtccattcacacacatccaatctgttccttagctcattcattctgaaaataatacttggatgcccactccgtgctgggtaccatgctagacacagagaatctaggcgggactgaacaagacaaaaagggtttttgtccacaggaaagctgtatcctagcagagagagagagagagagcaagaaacaagaaacccaaaaataaatgaggctgcttcaaagagctgagagagccatgaaaacagtatggaatctcagggtggggatgcatggatctctacatagggtggcctgggaaacctgtctgaagagagtaggggccagccaagtaaacacatcgggcaagtgtcccaggagagggaactgcacgtgcaaagcctggggaagcagaactgtttggcctgtcctagggagagaaaggagggacagtggcatggttgggatgggcagtgcggtgcaggatgaggataaagaggcacccaggagctggctcatgacatcactcctataccaagggaagaaaaccaagcacagatactccaagagcagcagatgataaagagatattatatgtcattttaagtatgacttgtgctgttttcttgcagagctatacccccttattatattttctcaccccaatattaaaattaatttgcattcccttagcacataccagctggttaatgtagtcagttgacctagaggtctgttgattggcaagaaggcagcctagactggaaaattggccatgcatcatctacatggtagataaatgacacgtagcaattgaaagctgagttttagatgagatgaatcagaatggagcaaaaccaacgcaggagcttggaaccctgggatcctttggtcctcctaaaatgccatggtctctgcgaatcagaaataacaggtttatggtcctgctcacttgtagatagccctgggtagaagagagagaaaggaaaaaatatatatgccatttattcaccaagagctacaaaacatattgattgatgccacttcctgaggggtggcggagctggttcaaacactctctctatggcctggtgaattccgtgacctttaggttaaacagcctccgtactttccgtgaaaccctcccttcttgcctcattagaagacgaggagaaaaatccctaaatgatctcaagtccgcttcccacatctcatctcaaaaatgctcacagagcacatcactgctccgtgatatgtaccctcccgaaggcatgtctgtgttcccagtctctctgactccatctcttggtagtcccctcttcagcttgcgtttctcctgagggtgccccacttagcaggacaggtgcgtgcacttagattcatgaagcagagttgctttatgtctgtctcccccagttctccatgagctccctgggggcataaatcaggcccttcctgaagactccagggtcccatggaggcagtgacaccacagtgaggtcatagggcattcacgggactcagcctcaggcctgctgcccgcctgtctgtagactggccccaccttccctgttcacagccctgcccctctattttccttccagggatgactgcgatcccgtgtgcttgtctgggtatcttcctgggaggtcttttggtgaagaagctcagcctgtctgccctgggggccattcggatggccatgctcgtcaacctggtgtccactgcttgctacgtctccttcctcttcctgggctgcgacactggccctgtggctggggttactgttccctatggaaacaggtgagtactggcagtgtctgccgccttcctgcctgttcagggaccctagcaatctccctctgcagtaggttgagggaaccagctttgttcctagtgacctgaggagacgcatcacggctgcctctgcatcttactgtccacgttggagaatcagtagaaccctctgggctgagaaagcagacctttccactcaaaggctgggaagcactgggggagaagagaagccgtttcctccctggcagactcacatcgcgatttttggcatttgactttaggaaaaatgtgaagagagaaaataaaaattttaattcaaaattcagctcaaaataaaagacagaattgatttgatttcaacaattccttaaactatcagaagctgtcattaggctcacatggcaattacaggatctggcccatggcaggtgttcttaagtgtagcgagggaaagggggagaaaaagggagggaggaagagaaggaagttagttctcataggaccacttttctttcttcctagtttttatcccaagacttgggactagagtccagtgagaattgcccttagagggaattatggggagtcttcagctatccagtatcaatagctgtccccttttccacatgggactgaggctgccttggaaatccagcctggagcatcgaggctgaagcatggctggcctgcaggttaccagtttctctctctagagccagactcttcctccaagcagaccacgaggcctgctcctgcgcttgtgccggaagatgcagtggagccagggcttctctgccacccacaagggtgagcaggcagagtgggagagcagaacagaggcagctttctgtatgtctgtgtacaatccaggcaccatgtgcccctccttcccctttacaccatcacggggttgccccttccaatccccgccccagcctggccccgacttcgtgttcagatatgtcttcttcccgtttgcacctgctatgcataacagctgtctcaagtagcagactgctcaactcccaaggagtaaagggtagtggttaggagcacaaggtcttactataatgacgttattcttccatgaaaaagaaaagaaaagtgtatatcctacagtcagacagtcctagttccagcgcctcctctaccatttatgacttctgtacttttggacaagtcacttaacctggctgtgcctcggtttcttctctaaagcccatggggttataatgagaataaatgaaataatccatgcagtactttgaatagtgcatgacgcataaattgccgggtgtcgccatcgtcacctttattattatgaagtgctctgagccttaggagacatagctgaaaatgatcagagtaaagaagagacatttcctctcttatagagctaatacactcactctacccttttgttcttttttcagtttgcttgctctagataactttgcctttaatgatgcaaaggaaaattaaaacaccttagtgttatttttctcaggacattgaatcaattagacaataattattgaagtcagtctggttgaagcagtgtagtaagtaagcatcatgaggcttcctgactgtaggggaggaataaagcaaagagacaagaaccagcccaaagagggaagaagttaaatcctcagtggtgcaggcatagcagtgttcaggacagggggataagctgaggccttagcaatcaggagaggcatcgtggagggggtggccctgagcagtcccaactgccaccagcccagagggcacatcaataccagtgataaaaagcatcttcctcctcgcttcatgagaggggctggagtggactcagctcccacccagcccaccacccaagctggcatcattggccagggcacaacccacgtagctctcagcagtggccctgggctgctccttgctggacaggataggctaaggttggtaaaggaaaagggaagggagaaccaggtaacaatcccataagcagggtaccacgcgactcatcacaacagaggcaaaaggctgtcactgggggcatctgattccgaattgacctgtttctaatggcttccgtgtttcctttcttttccagcacagcacctggctcagccctggacccctactcgccctgcaataataactgtgaatgccaaaccgattccttcactccagtgtgtggggcagatggcatcacctacctgtctgcctgctttgctggctgcaacagcacggtaatgggatggggcaggggatggggcaggggattcaggcagctaaagtggcttaaaacccaagtttttgcccaggttgttcgccttccctgtgactttttcttagctgttgccttgctgtagtggaagatgttccatcagcaggatgagaggactgattcaggtcttcttgctaaatcaagtgggtttgtaggaagtctcattgtgcaactgaaagtaaaaattcaaaggaagctgtatatatggaaccaaaggaaaagatggtggttcaaggtacttgcagtgtcaatgaaataggatgtctgcatgggtagtgagctccccatcaccagaagtatgtcaagagaggcttaaaaaccatttatcaggaaagacttcttccagacctgaaacactctgacaccaattcagcttctttcctacccagtttgctttgccattttcctcctaactaaatgcctcccacctctttccatgttcctgacacatttttgggaggaggtgggttgctttttcctgcttagcgtggattttacaattggctgtcagcccacagctttccacgctctctccctgaaaacctgatgctaagtgacgggtcatccattggtgctgatcccaccttccaggagtccttggcacctgccctgtggaggccccgcccccatctcttgcttggacccgagcagtaggtcctacctggcctcccaggatggccccttatgtccttcgttttcttcaacactgcagtcagaagggtttctgtaacatagcaaatgaccctttctcatgctactctgtcaactagaagatcagttctaggtgccacgtgtcttcagctctacctcctttcagtttgtggtgttcagcttcccccatacaacctgtcttttcatacacctccctccagctggacaggtcctactcaccggtcagtagcctcctccaatgtcccctcctctgaaaccatcccttccctttttatctttggggtttttctccctgaagtccttcggtgcctctttctcctaaagacattgttctcactttattacgatgatttgctagaagtgtctgtcatctgctctggtctttggatttcttaagcaagggccagcacccagaagtactccatgaatgtctgtgcaaggcatagtgggaaggaaaatatgaacccccagtggcagctttcaagggacttagagttgagatcattagctgctgcttcttcctacatcttatatctttcaggagcagcaatttctctgaaagaagaaaaatggatcatttattttcattttcaaagatttcatttttccttgtgtttagcatttagattcctggccagttattaacattttctttagagaaaataaatcaccatggggggtgggtgggagaaactgattttttaaaattagatgataaagcaatttctttatgtgagtggaaataaattttaaaagaagggatgggccttgagaatggttcaaataaaaacacaagccattatttttcatgacaacaatttcattaacattttaatatccagaaagttacattataaatcagtctcggttattgtcctgttataagaattaaattgactcagtatagtctagtgtcctgagaccaaatgagtctctattccagggaatgcactgaccaaaaaaattatcttaaaaattgcatttcccctgatcttgcatgtacaggagtcttattgaataagagccttaccaggcccatctgtggctgcatcccactgctgaaacagcgaagctggagaatgcagttatcagactgtaagcttctctgcttacctctggacctactgtttgtcccccagacacctgccttttattcaggttactcgaggcctcacattgtctgctggggtgtaggtgaggcaaggaggatattctcatgcaattgcaatgcagagacagagaaaccaccaggccccagagctggggtgaggcatacagtgccttccctgcagaggcagatctctagatgccctggcttccaacaagtggatgagggatttggagacccagagcaatgcttatcctggaaagggacccttgtgacagtctagccttaaaaacaaccacaaccataaaacttgcagcagcagcagcaggctttgtcgagagcctattaaggtccaggtaatggggccttccgtgtgtcactcgtgacccatggcagcttggcccagagtcagagaaatctcaggccaacatccaaaaatgagtgaaaagcaatttaaatcctttaaatctctgctgcagtattttgggaaaatgccaaatggtggctatattcctggtatgtgtactccctccctcgcccccttttttctccactcttcttgtctccaagttcggggcaaaaaaaaaaaaaaaaaaaaaaaactctttgacaagctaaaacctttcacctcctccttttcacagtgatcccctggaattctccaccttccccaatgtgagttcagccattttccctggtttcatcaattcttccacccacggcctcaaccctgtgtatattatctcattgatcctcccagcacccttgggaaataggtgttcttcttatttcctgaatacagatgaggttagtcacttgcccaaggccatgcaataggaagtgggggatctggcttttgaatgtagggtctgtccaatgtcgagtacacatggacaccaagaaaggaaaaatagtgtctccctctgtacctcccctaagaggtccaccttttttctacctcttcaaacatgcacttctcattcgagacatttatttggcctttaccatctggccctggctgcctctccagcctcaacctccctattcctcccacctcttttttttttttttttttgagacagggtctcgctctgtcacccaggctggagtgcaatggcacaacctcggctcactgcaacctctgcctcccgggttcaagtgattctcctgcctcagcctcccaagtagctgggattataggcaaacaccaccacacccagctaattttttatatttttggtagagacggggtttttcaccgtgacggccaggctggtcttgaactcctgacctcaagtgatccacccgtctcggcctcccaaagtgctgggattacaaggcctctcacctcttaaagagccacttggtaagtggaacttgcagttccccaacacatcaagctctccctgcccctgggcctttgcacgtgttgtttctcttatctgcagcagtctctcccttctaagctctgtcttatctctcagggctgtctctccttcaccactgctgagaagccttctccagctcattgcttcctccagggctgtgttagtgcccttcctgcaaacccctattgcccctgctcttgcctagcaaggctctcacctcacctgttctaatggctcatttactctggcacctccctcattaagctgcagggacaggggctctgttatggaaccttgcattctcactgtcagccatggctctggataaaggctccaggctttctcaacacccagctggaggccctgtactgacctcagagagccccagggatccaggggtaataccattctcttgtttagcagttggcaagtgggtaggttggatggtgccagtttcagtactgaagacctgatccttgctcgccactcaccactttatcgtttccatcaagacgtgaaaattccccataactcaattagatgtaaataagtcactgatcaaataattctgattatagggaaatctgattagtgttagtggtttcctgatattaaacttttcttcctgctctggattggattttttttttttattttcttatatctccttgagtgatagcaatggaagtttccaggcctgcatttaatgtacgacttctaattcttctcactgcatatgaccaggaagggtgaccaaaaaaaaattgagttaattctgtaaatttcctttggcgtgaatatatggtccagattgtttctgtacctttcactttcagaagtaattattccaacagaagcatgttagtatgctgtggactgatggctgtaagttgtatccttttgatgtactaaataattgaatagaaaaaaaaaaaaaacttccatcagccaccaatagaatgttgaaagtcagtatgagtccagcactgcagtttgtagggtactgatgatagatgactaattcatcccccccattccaggcaacaaatatttattgagcacctgtttcagtgaaatgccaagtaggttctgtggcggggaggaggacagctccattatgggcccaggcaggcagctcatggttcagtgtgacgggtctcaatacaggccgcaccttaggatcacgtgggagcttttaaaacatgaggccccactctcagagattctgattcccttattttggagtaagatccatgcatcagtatttttttaacctcctcaagtgtttttgatttgtaaccaggatggagaaccgctgttctaatacagggcttctcagtcacggcactgttgacattttgggccagataatggattgtcatgaggcgctgccctgtgcactgtgtttttaccagcatccctgggctctccccaccagatgccacccctgccctccccagccacaagttccgacaactgtaaatgtctccagacattgccacatgtccctcgggggatgtcatcacccccagtgaagaaccaccgctgtcatagaagggatgaggcatgttctataaattgtgtctttcttgaaaaaggtcagcatctaagctgacactgagtattcatcattcagtctcttttttcttctcaccatgaccatatttgcccactataaaaaccaactggagagttagatatgccatatagcaggggtcccccacatctagcaccagtgccagtctgcggtactggtactgttgggaactgggccgcacagcaggaggcgagtggcaggtgagcaaagctttatctgtatttatagccgctccccatcgctcacattactgcctgagctctgcctcctgtcagatcagcagtggcattggattcttacaggagcatgaacttactgtgaactgcgcacgcgagggatctagggtgcgtgtgccttaggggaatctaatgcccgatgatctgtcattgtctcccatcatccctagatgggaccgtctagttacaggaaaacaagctcagggctcccactgattctactttatggtgaattgtataattacatttcattatataatacaatgtaataatagaaataaagcgcatgataaatgtgatgtgcttgaatcatcctgaaactatcccccaaaccccactggtcagtggaataattgtcttccacgaaactggtccttggtaccaaaaaggttggggacctctgccataaagcatgttgcagcacaggaaacaaacagcgtgtctgccctgaagatatatttaatgtggcctgagccaaagtttaactgggcctccctgaaaaagttggaagatagctatcatgggacctgcaccccagtagggcagtggttggctggaactgagaagcgctggccttttgggcaggacatttgctgtctacttagacacagcccccaccactggccatcccttacacctgagccattttttaaatgtatgtttcctgtctggttccaaaggcttacggtttgcagccctcctcatatagcctggccctgtctgccagagctgatttaaaagtctgtacttatcctggtaatggcttgtcagaagggacttgtgactattctgaaatcaaaccctactggggcatcgccacctgggacacctgatatatctcaggccctctgctaggcattgtaagtgtagagatgaataaggaaaggagctcatgtttactataaaatgagatgtcatattattaatagaggtatgtccaagggagcacccaaagcaacacctaaccttaccttacaatatagttaagtgaaaagaacacattgtaaaataatacatagacaataatcccttttgataaagaaacatctaaatatatgcatatctttgcataaaaaatattggaagaacatatagccatccattcgtagatggatacttcaggttaggggccaaaaaactaaattttgcttatttgtttccagtttttgtgtatatttcaaaaatatctaaaatgattatcacttttccaatgaggaacagatttttttaatttaaaaaatccaacattaaaggttaggtggttaggttaggttctaaaagagggaagcagctgtgtagacaaatcagtgaacttgcagtatcaggcctgctggggtagaaattggttctgggtggggcaggggtggaaggagggagtgggcatgttctccgctgggggatggggtgaatgagacccccatctctgaaaagatgtaaaaaaaattagcagggcaggtggctcacttgagcccaggagttggagggggagacgtggcaagggccaggctttcatcatgaagggtagtgggtgtttggtagccaggcatggaaggacattccagccggaagagtgcacaggctgaggtgtgacaatttggacctcatgatgcaggcaggttttgagttggaagagagaaagctggagggagagatggaggggccctgtgttccttcagagttgcagtcatgcctttcacctttccgtgatctccccactgtgtcctatgttagatagctggagcagagtgagcctttctgctccccaaataaaaacccccttcctcccctcagcaggagataattaagatctaacaggacgtgctcaggctcacgcgccacaggttaccggggtgcaaggtggaaggaggtcttgctttcatctcagaatttttctccctggccattattcttcagccagtgaccccacaagggaagaagagatcgtatttcttcttgcagtttttcagtgtcccctttgccttgatcttgcaggttgccattggcgccctttgtgatgagatctgagggttatgtctggaaataccagctttggttgaaccaatgaagtgaagagatgctaagctacaaaaagacagtaataaatgacaggagactgtctgaggaacgtcagtgaattatgagaaaatccataagtgtctgggactcagagaagtatgttgccattcaaaggaaaacaccccactttattgtggtggtgtcccacgttctttgatatctcagctattagaacatcaggtgcaaaagatcaaagatctcacaggcaaaagcaggaagagcatggcctgtggtggtactccccggtaaactccctttatgaacatttctagaaactgccagagccaggcatggtggcatgcctctgtaatcccatctactcaggagctgaggaggggaggagcacttgaggccccaaacttgagaccagcttgggcaacatagtgagacccctatctctgaaaagataaaaaatgaggcaggcaggtggcttacttgagcccaggagtttgagactgcagtaagctatgatcatgccactgcactgcaaactaagacctcatctctgaaaaaaggaaagagaaaagaaattttcatgtatctctgctaactgctttcaaggaggaaaagcaaaaacagtattccaggggcgatcctctacctttcaagtttccatagaaggctcgtaatacaaatatccccatacaatcctcttagaaaaataatctttccaccttgaacttcgcttcctttgtacaattaatagggatcgatcatcaggattggatgtggggggaaaataacaggcagaaaacaactttatttgccagtatttttgaaacactgctgagcagtatcttgttcttgtaataccggctgtcaaaatagcatgccgactgcttccttcatcaatagaaaacaaatgcaagattccagagagtcatttttctatttttgtggtctctagccttcttgtaattatttattctcatcattgtatgtgaatagaaacatttctcaattgaaattaatgactgaaggtggaacagaaatacagttttcagtgatgtgctattctttcattgatttctttattttataacattttccattttgaatacatttatatgattcaaaagccaaaaagtataaaaaggaggatatgagggactctccctttcacctgtgtccgctatttacttcttcctcaacctgccaaatagatgattgctgtccttggtttcttgtacatccttctggattttttactgcacataaaaggccctattctgtacctcactattttgtttggctttttcagttaatagtttacctgggagttatttctaaattagtacataagggatgttcttctacctttttatggctatatagtattccatcgcgtggaccaagtagtctgtctttttttttttttttttaattatactttaagttttagggtacatgtgcacattatgcaggttagttacatatgtatacatgtgccatgctggtgcgctgcacccactaactcgtcatctagcattaggtatatctcccaatgctatccctcccccgtccccccaccccacagcagtccccagagtgtgatgttccccttcctgtgtccatgtgatctcattgttcaattcccacctatgagtgagaatatgctgtgtttggttttttgttcttgcgatagtttactgagaatgatgatttccaatttcatccatgtccctacaaaggacatgaactcatcattttttatggctgcatagtattccatggtgtatatgtgccacattttcttaatccagtctatcattgttggacatttgggttggttccaagtctttgctattgtgaataatgctgcaataaacatacgtgtgcatgtgtctttatagcagcatgatttatagtcctttgggtatatacccagtaacgggatggctgggtcaaatggtatttctagttctagatccctgaggaatcgccacactgacttccacaatggttgaactagttcacagtcccaccaacagtgtaaaagtgttcctatttctccacatcctctccagcacctgttgtttcctcactttttaatgattgccattctaactggtgtgagatggtatctcattgtggttttgatttgcatttctctgatggccagtgatgatgagcattttttcatgtgttttttggctgcataaatgtcttcttttgagaagtgtctgttcatgtccttcgcccactttttgatggggttgtttgtttttttcttgtaaatttgtttgagttcattgtagattctggatattagccctttgtcagatgagtaggttgcgaaaattttctcccattttgtaggttgccttttcactctgatggtagtttcttttgctgtgcagaagctctttagtttaattagatcccatttgtcaattttgtcttttgttgccattgcttttggtgttttggacatgaagtccttgcccatgcctatgtcctgaatggtaatgcctaggttttcttctagggtttttatggtgttaggtctaacgtttaagtctttaatccatcttgaattgatttttgtgtaaggtgtaaggaagggatccagtttcagctttctacatatggctagccagttttcccagcaccatttattaaatagggaatcctttccccattgcttgtttttctcaggtttgtcaaagatcagatagttgtagatatgtggcattatttctgagggctctgttctgttccattgatctatatctctgttttggtaccagtaccatgctgttttggttactgtagccttgtagtatagtttgaagtcaggtagtgtgatgcctccagctttgttcttttggcttaggattgccttggcgatgtgggctcttttttggttccatctgaactttaaagtagttttttccaattctgtgaagaaagtcattggtagcttgatggggatggcattgaatctataaattaccttgggcagtatggccattttcacgatattgattcttcctacccatgagcatggaatgttcttccatttgtttgtatcctcttttatttccttgagcagtggtttgtagttctccttgaagaggtccttcacatcccttgtaagttggattcctaggtattttattctctttgaagcaattgtgaatgggagttcactcatgatttggctctctgtttgtctgttgttggtgtataagaatgcttgtgatttttgtacattgattttgtatcctgagactttgctgaagttgcttatcagcttaaggagattttgggctgagacaatggggttttctagatatacaatcatgtcgtctgcaaacagggacaatttgacttcctcttttcctaattgaataccctttatttccttctcctgcctaattgccctggccagaacttccaacactatgttgaataggagtggtgagagagggcatccctgtcttgtgccagttttcaaagggcatgcttccagtttttgcccattcagtatgatattggctgtgggtttgtcatagatagctcttattattttgaaatatgtcccatcaatacctgatttattgagagtttttagcatgaagggttgttgaattttgtcaaaggctttttctgcatctattgagataatcatgtggtttttgtctttggctctgtttatatgctggattacatttattgatttgcgtatattgaaccagccttgcatcccagggatgaagcccacttgatcatggtggataagctttttgatgtgctgctggattcgttttgccagtattttattgaggattttggcatcaatgttcatcaaggatattggtctaaaattttcttttttggttgtgtctctgcccagctttggtgtcagaatgatgctggcctcataaaatgagttagggaggattccctctttttctattgattggaatagtttcagaaggaatggtaccagttcctccttgtacctctggtagaattcggctgtgaatccatctggttctggactctttttggttggtaaactactgattattgccacaatttcagctcctgttattggtctattccgagattcaacttcttcctggtttagtctcaggagagtgtatgtgtcgaggaatttatccatttcttctagattttctagtttatttgcatagaggtgtttgtagtattctctgatggtagtttgtatttctgggggatcggtggtgatatcccctttatcattttttattgtgtctatttgattcttctctctttttttctttattagtcttgctagcggtctatcaattttgttgatcctttcaaaaaaccagctcctggattcattaattttttgaagggtttttttgtgtctctatttccttcagttctgctctgattttagttatttcttgccttctgctagcttttgaatgtgtttgctcttgcttttctggttcttttaattgtgatgttagggtgtcaattttggatctttcctgctttctcttgtgggcatttagtgctataaatttccctctacacactgctttgaatgcgtcccagagattcaggtatgttgtgtctttgttctcgttggtttcaaagaacatctttatttctgccttcatttcgttatgtatccagtagtcattcaggagcaggttgttcagtttccatgtagttgagcggttttgagtgagattcttaatcctgagttctagtttgattgcactgtggtctgagagatagtttgttataatctctgttcttttacatttgctgaggagagctttacttccaagtatgtggtcaattttggaataggtgtggtgtggtgctgaaaaaaacgtatattctgttgatttggggtggagagttctgtagatgtctattaggtccgcttggtgcagagctgagttcaattcctgggtatccttgttgactttctgtctcgttgatcagtctaatgttgacagtggggtgttacaagtctcccattattaatgtgtgggagtctaattctctttgtaggtcactcaggacttgctttatgaaactgggggctcctgtattgggtgcatatatatttaggatagttagctcttcttgttgaattgatccctttaccattatgtaatggccttctttgtctcttttgatcattgttggtttaaagtctgttttatcagagactaagattgcaacctctgcctttttttgttttccatttgcttggtagatcttcctccatccttttattttgagcctatgtgcaagtagtctgtctttaaccagtctcttatcaatgagcatccagactgctgcaaaacttgagctctgaccaaccacattgtgactcatattgtatatatgtccttttatgcctgggcaggtctgtctgttggatatgttctcgtagaacggacaagcctgttccccctgtcctccgggtcaacaaacttgtcaggtctgttctgggagctcagtggccaccttattattaatatgaagtgtcatggtacattttattgacagtaaagctagatcccgccaccccccaagtttggatgccaagcagagaattcacctctcgcagaggcagcagggactgcatttcttcccagagaatggcaaaccaggaagacactgctttgcctttgaaatagggattgaaaatggggtcatttgccaattctgcaatcataaactaatctgaaatctggtatgctttcttactagttaattgtcttagggacagccagagaaagcattaggggacatatcacttcattcagaccatgggagtctacaggtcagttccaagatacacctgctttttggattggccaaatagaactatgctattggggtttggggtgagaattaggatcccagcctttatcatccccttaaattagactgctgtctcacatccagcttttcaaactttttatagctcaaagcatttgcagatctagggcttcccatgtaggtgcccagttactgccagctgaaggggtatcccctacttccccttttcccttcacatcaaagttgaaaaccccatttttggaaatcatctctctgcactctgggaaaggtgaaactacctaagtcctcatctgcagttcttcctaccacactcggacatctgagtggaagatccctccttaacagcctcacgaccttatgcacccatctcccttagcacaacgttggacaaatctgggctcttatgtcacacaagcccagtaaaggagcttcctaccccttgccatctgaccacaactgcagcattttcccttggatcccctgctggagaggttgcagggctgccccagcctgctccccatgtgtgggaccacccagcccatcctggtggattgactcattggatggaaaaggaaacccatccaagtccttgcacagatcactctggcatctcctacccagcctctctcacagctatgaataaattaaatctgaataaataaatacagatttgcctagaacctttaggagagatccatccatttccaccttttcctcttggacaccaacaaacagacattttcattggtcttgtgccggtctctggcttttcttcttctgtcattaaccctaaatcatcccattcctgtctattcagcatggggctaccttggcccattttggctgctatatcaaaacactttaaagtgcatggcttataaacaacacatttatcgcagctctggaggctgggaagtccaatattaaactgctgatggatctgacatctgatgaaggcctgcttccttttcatagatggcaccctctagctgtgtcttcatgtggtgggaggggcaaggcagttctctggggcctcttctgtaaggacactaatcccattcatgagtcctctaccctcgtgacctaatcacctcctgaagaccccccaccttgtaatagcatcacattggtgattatttttcaacatatggattcttgggtcaagggacaccaaacattcaaaccacgcactgctaccctttgtttcggctgcaaatcctgtggcagcttaaccctgctgtctgctcgcctcattaacatgaacatagacaaggacacatttagctcacccggatggggctgtgcaggcaccgtgccagctgtagcctgagataaagatgtctcattttatcccattccatgagtgccatgatcagaggatccatttcaggagggatttaacactttttagggcagagagaggccagtttcctcttttatggtaaatataatataatcgagccatagcctaggtatgggcaaaaataagaccaagacacaggcagcaattgcagatgacttgttaaaccaaagaaagctcaccgatcacatggctcattcagagggttctggcgtcagtcactcaactccagtgcccatatcacattcctgagagactgcgtgctacaagtatgtagcctctcaggaacactcaggaatgtgatatgggggtactggaattgagggattcctggggtacttagccaaacaagaccacagccacccacaaggggcccatttttcatttacgcctaactactctttgagtccatatggttctaagaacttcagtcccaaatctttttcctcacagaccactgcagtaatcaaagatggatggttgcaagtagtttgaactagggcagggtttgagacagatttaggacatggcaaaatgaacagaacttaggtgttcactcagtcaacatatatatatatattatatatgtatataaaatcccacttgtgagccaagccctgtcctggatggctgggtaaattagggaatacggccacagtggtctctgtcttcattagctttagtgtcagggggaagatggatttgatgtaggtatgtgagcgggggattcagaattacctcctggtttttgttaagttggtgcaaaattgtggtttttgtcattacttttatagtcaatagggtgccgttactaaggcaagaggtggagggaaaggagtttggagctggagctggggctggggctgcgtaactgtcaggaaaacagtgttttgaagtaagaggaagaagcaaagcagcatttcctcactagacgcccctggcacaggtgggtgagtcagagctcaggggaacatcccaggaagctgtgcggcatggctgctcaggagatctgatgggcactctgcgatgtggggagccacgtggcctgcagcagccaggtcaccagaggtgggcatggcgcctccactggtcagcagggtaggcagaaaagaaggcggcgccaagtcgggagtgctgggacaggtcggcgccttccgggcgcgtctgtgtgtccgtccttatgcctgaccgtgtgaccttctgggagaaatggcctcagcttccctttgtagaagaggaatacataattttctctttacccttcacagttcccagttgggacagacccctgtaacctaagacagattaacaggaggaaaacaaaggtttagaaacacatatacatgatgtatacacaggagatagccagagaaatgagagcatctcagagacgtggctttgacttcaggcttgaataccatggtccagggaaacagagaaagaagggtgtggggaaggccagttatgaggagatgcccagataaagcaccttaaaaaagagtaacatttgttatgcaagcttaagtcagtgtcttctagattgatgatagtctctagggattcagtcattcctttatctctggtacagagaggaaccacccttacaaatggagatttcctttgtaaatgtaattttccttacgcaacggtaacttctgttgtcagaggttctgcctgtgtctgtggtttctcaaaataatcagctcaaaatattctttatgcaaaaggggcataccgcaaggtggcatatgctggtgtcccacaactcctgccttctgagtctctcccaggtttccttcttgtccagctcccgtccttgcaggaaagcgaattcgggggagatactttccagccttaggcgggacagtagtgccaagctgaaagcacagaagccagcaccggcactcgttcctggaggcagttttgatgcctcacccgtgctcatgagtcttgggaaggatctgggctaaagatgattaaatttgggagagatgtgatcaaatgcagagatggtaaaatgaaggaaggagagctggggcaagagtacagatgaagaaagtccagagcaggtgggaaagaggagaaggtaccagcaacaaagatggaaagcgagtgaccagaggaggaccagggaaacaggtagagtggagctttgaagccaaacaagggagtgatgagtagtgagcaaggggcctgtgctcctgggagctccggggagagaaaaatgcatggtgggcctgggatatggagcccactgaagagcttagccccaccggattcatgcgtgtggaaacagaagccagtcagagtcagctgagagcgtgggagaaaaggaaatgcaggtggtgagctaaatagctagaaaagtttggctgtgatgctggggaggagtgggcagtttcctctcctgggaagaggaggagtggcattttaagtgaaagttggggagaagtcttgcttcctaataaaagtgaggaaggttcgttctcatgtgtattctaaagctgtatgcttagtttctcatctacgtctcagctctgcgctaggaaaagatgctagggaaagaatgcaaaagacataggtcttgtcccgaggttcttgtctcctccaggaggcatgtaaaggtctctgctgtagggtggagcgacccttgaaaagggccctgcaggacttggaaggaggctgggatgtgcccagtgaggtgaggttctgagaagggaggcagtatctgagctgggttttgacaaagagctaaaaagtctctaggcagaggtacatgagaaggaacagaggggcggggcctcgggatcttctgggaattacaataaatgcccctgggtaccctaactgaaccattttcacaaaggcacctgctctgggcagacactgaggggaagggtggagccccagcgtacgtctgcccccattccttcccccatgaataaaagcccctgttgggggcacagcgatacagactggccctgttgggtttggggcacatgaacactttcagacacccctgaaaccatcccatatagcttagtgggatcagaaaaccctatctctgtgttctgtggggagagggggaggaccagaggaggagaactgtaaaagccagaggggatttatttgaccctcaggaggatttacctgggcatgtgctctgaaagccaagcagtcctggaaggaaaagcaatgaatcatttatgattgttttcactttgtattcattaaaggcctctgcactattattatggaaccttaattggcttggcaccgggcactgcctctcccagcccctgctcctccctttgccatcagaaattcctggagtgagtgggggagaggaccctgtctgcaacaggcagctgggctagaatccaccccgaagatcaaatgaaatgcagtcacttttctttcttctctctgatcatatattaataaatgtatctatcttgttgggttttagctctgctccccacgagctgctccaagctcctgcatctcttagccccctttgcttcctcagcctccagagaactttccatcagctgtccctcgcccagccttgcagacgcggtgacttcacgcgtgacagcgtgcagcctttgttccaagtgccgtgttgggcactccaccagcaacaatatgcgggttacctgatttacttcttttaatacacttcagtgtaattataactgcataaaagagaggacaaattggcaagtaattacaatgttaatttggcaacgttttatcatattgtggaagcgcaatttcctctctaattgtattgggggggacacatttatctgtggttcagcttactgagggattcttgagaatggaaatgaaacacacaagagacagagaaatcagctctcctccccgtaaatattcctttatttatgtgtgttttgcagcctccttaaaaaagctaactaactcgtttattcaggcctaattaatggaatgccacagaatgtgtaattaggctgtgacagattcagctgatggatggctttgcctttggaaaccggaagtacccccagataaaagggctgaacgcttccctttcagaatctcacgggctgtgcgtgcctcaccaccgtccctgctgagaacgcaaccgtggttcctggaaaatgccccagtcctgggtgccaagaggccttcctcactttcctctgtgtgatgtgtatctgcagcctgatcggtgccatggcacagacaccctcagtcatcatcctcatcaggtaagccctcggcacagccccgcctctcctcctttccacctggtgttcatctgcaggcctcctagggaccagagcttcagacaacaggaatctctcgaaccaggtgagctagggccacagcaaggagcgcagcttctctaggctgataggaatcaattatgtttgatagggacctcccaccaagagaagaaggcagggcatgggggagaagacagcactttcatgttctcccagaaatagagcctgcaggcagttttgaaaaggatcctgcattgagccttacaggacgcagcctcgttggaggaaaatgaaagtggcgtcagtgcccagcccccaccaccctgccactgcttagccatatgaccgtgggcattttccccctagacttgctcctgaatctgtaactgggggtgatatgacccatcctgcctgcctcctgcagtggagcaggacccactgagaccatgtgtgtgcaaacacatagagacttgacgggttattgtgcagcagggctcacggcaggtgagcagtgaccattcttgtacaaagaggttgctggagagagccaaccgaaattctattgttacctgtctctggggacctgtcctggggataggtgaagtgcctcaaagaaagatgagccattagtaatattctgagtaacttttatcatttgcagagttacctagatttgtgttggaaacccagaagtgaactaacacataggctgccattcatctgaatcaggggaaggtactctacacaaagactcatcagctgggcatggtggctcatgcctgtaatcccagcactttgggaggccaaggctggaggatcgcttgagcccaggggtttgagaccagcctagccaacatggagaaacctcttctctacaaaaagtagcagggcgtgttggcacatgcttgtaatcccagccacttgggaggctgaggcaggagaattgcttagacccaggaggcggaagttgcagtgagctgaggtcataccaccgcactccagcctgggtgactgacagagcaagactctgtctcagaggggagaaaagacagacttgcctaattgggatgcagttatccaagtgaacagattcaatagcaaaggctggaaataaaagtaggaatgaaacgcatggaagtacccagtgtccatgcacctcacctctactttatccagcttctctctcactttgccaaccacatttcctcatctttattatgaattcccaaggaagaggatttttacaagtactaatgttacctagaacgtcattagcaaggccttgcgaatgtgcagagcattagggtataatagcaaattaccattttatacttactaagtttgaaaaataaattttaaaaattgacacccagtgcttgcaaggctgtggcaaaactgacaaaatcacaaattgctggtggcatgggaaaaggctatcactcctttcaaaaaagcaatatgacagtgtgcgtcaagagccatacaaatattcagacccttttattcagtaaccctaccccttgccatttatcttaaaaaagtactcctttacaagaagaaaaaaagaaagagctcaatgcagacaaatttttattacaacgttaactataatagcagaaaaacctgaattggaatagtgagttaaattatggcactgcagctccatggaataatgaaaattcttaagaatgtgaaagtgtttatgaaatgaactattgaatttaaaactatttagagaagatgattataatatgcatttggacaaaacccatcagatctcatgtataggttttaggtggctgccttatgagtagtttatttttcattattagacgttttcgtgaagttatattgtgatattcatacactaaaggcattggagaagcatgaaaaatgactagtctcttattagcttgccccacgactcctctgcaaaaacccagcctctagacgctgactagtggtgactaccaaacatggaaagtttgttgaaattcttaatcacttccagatctcagcttgataaacagctcttggagctttgctggaaatatttgattccctctaaattaatcagccacagatggcctaaatgacctaggcttgtaactccacgctgtgctggaagcgcatgctatgcattgtgcatattgagaggtccaagacacagttttattccatcaccttcctagtctgatttgccatcacagatgtctcaggctggcacaggggcacagatgtgcaccagcccttgcccctcccagaagaatggacccactgtcatgccaaacaggaccatcccaacaacagtgctcagaacatctggaagcgaggttgaaagctgatgcccagcccctcttaggccccacgctgggctccgagagaaattaggcagtgttctcaaggtcacccagctagtacctttagaactaagactccctcccagcgttgtccagagctttcaatagtgttcacacggagccctccccgtttcttcatgactcaagccaagaaggattcttcttctcataggaagcaatttcccaacaggatatgaagggagatcttagcaccttgctcactttgttcctagtgacatatgatagctgaaaggaaatcaaatttcaggtgataaatattctaactcattataccagtgtgctttcttgataaggagaatttgtctctatttatgtgtctgtctttcaagtcagtgctttcaaatgaaagtgcaaaaaccggagacatggagctgataatagctttgaagaacttggattttgtaacgtgcacgttctaaagggtgctgactgtgtttctgtccagaggcactggactcatcatggatgttgtactggtgtctaactcaaccagccagagtcacgtccccatcgctcaatgaaagtcatgacctgctgccctgggatgacttacctgtactgtctgggtcccaaactgaagaactaggagtccaatgttcgagggcagaaggggtccagcaagggagaaagatgtaggttggaaggctaggcccatctggtcttttcatgtttttctgcctgctttatattctagctgtgctggcagctaattagatggtgcccacccagattgaggctgggtctgcctttcccaccccactgactcactcaaatgttaatctcctgtggcaacaccctcacagacacacccaggatcaatactttgcatccttcaatcaagttgccactcaatattaaccatcacagtgctggaacatgctaagtggattatttcccaaatggtccatccagggtgtctaaccatgctaatctggtggatttcacaaaatgactggagaatggtaaaggtgctcatggtttcagcttgtttgtgaaggataaggggaattattttctcggttgatgttttcccccccatacgtgtaccccacccacttaagatgcttcctgatctcagcaaaaccaacatgtctttaaacgcaggttttatgaccaaatttgcattctgtccttcgaatgacaaggttagctccagttattaaaaaacactgttaaattcctaaacttatcttggcaccacagttgcagttatttttcagactttaggcagaaaaaaaaaaagacactattagtaattttaaaaaagacactattagtaattttctaaagaagagctctgatggacagcagcaaatgactctggggtctgttaattacaggggaatgataaaaatctggttttttttttctcttcatctctttgcacgtaggacagtcagccctgaactcaagtcttacgctttgggagttctttttctcctccttcgtttgttgggtatgtattatctctttatttcctcaataatgaattggatgcttattactaggtgagtaactgtcagtcaaattatcccatttcctaggtctgtctcttttttctttgcagtttaattattagtaaataagaaattttaagtctcaaaattttggtcagagataaactcagacactgcctcgatatcacgaagttctcatttataccaactcttatcttcacgccaccgtgaattctcatcggcataaggaggaaaagagatggcaccaaaggggaaaaaaatctggtggtgtaatttggcatcttcattaagcaagccatgagcagcttgtgaaatgcttcatttatggggccgccagctgggagagagaggcgttctcacaatgccttgaaaatggaaactttgcatcctttaaatttttccaaactgacttagtttgtttaccttgaatttctgggatggggcaaatgtgaccttcatgctatagggcccacgtttccagatttggtatggaaagaaggaagaaagtctgaccctcttgtttttaagataggcaaaaggaagatgagatagtccatggttcaccacccaaggtccttcctgggcactggctgggctgacgctgggcctggttcccagctatgcctacctttctcttgccataccacaccgttgctttatgagcattcttttgttaaggccaagatcaagataacttttttccttgaataataggacagtcaccttccccagtggactttaagtggcatctgaatgtagaaaggaaaacaaccatgacctgtatttttagagtagaaataaaattcctcattccacgtatataatcgtggataagcacaaatacctagctatagaaatgtttgtaaaagtggaaaattggcagcaacccaaaagcccaacagcagacaattagttaaatcagttatggtctataatcgcagtaggatttatgttcccctttaaaattctggaaagaaaaatatagacttagaaagggcatgtgatgggggaaggggaaaaacaggtctgtaatgtaataacttttgcaatatttttccattttatcagaagagtatcagctattatctttgagtaataaggttatattttctaaatttgttttaaagttttgaatgaaatgtctgttacttttatgagattagtttttatataccgatatatgaaagaaaaatattaacctttagatccattaaggtcctccctggggaatggcaaatacatagcatatgtctctcctcaccttccttctccgtctatagcaaaaactttctatcaatctgtgatcattccctctgtgcctggtagaagacctcagaatgctctcaaccactatcaatccatgttccttggtatatacatgggaactcaaatggcattgtcctaagtctaagtcatggaaaagagaagtgctctaggtgtgaagatgccccaattaaaacaagttcagcgctaattcaaagtaaagcatttgggccttcctgggaagctgtagtagcatgcagaaataccaaggcagagttatgatcgtgctgattttttcctatcagtgggagggtgcagtctgcatatattttacccctgctctcactgcagtgtggggtggatcgataggtggatgtgtaatattaactggcacattgacaccctaatttttgcaaatggtaaagccattccacatatgcatttgttcaagaagctaatgtttattgaaaacctattgtgttctaagccatgaaccatccccaggtaagtgacctcagctctgccattacgagtcctctggggctggccagggaaggtaagagcccaccctcctcatctgtggagttgctatggagatctctgcacctctagacagatactaaggactcaatgcaactggcagaacatttttttgatagcacaagatgaaaaacaatttgcaaggtatttctgaaaagttaatgaaaattgtaggatagttgaaagcaaaagtgaacattatgaggcatatgatactgttaaaatcatcatacactgctgtaaagcagtttcaatatctgtatgtctgccccaggaataatcaaccaggtattacctagaatagtgtttttcaacttctgcaactgtaatctagagcaagagatgacaagttttgcattatggcccagtacgcacatgcctatgcctagatacagctgaaacaaacaaaaaaaaaaaatcatgaaaaaatactcactgtaataggtatgacacattctgacattttctattctagtctattacatgcttttaaaaaagttggttgtgacccaccctattgattttattgccccttatgagtctccaattagaggctggaaaaccctgctctagaagactatgacacagcttcatctttcagttgaaagcagctcattgaagaagtcttagcatttggcctaattccctttcttgcaggacccagtaagattaaccaccattattgttaatgtgaaggccggcaaagacatcagatcctgtgacatcatcaacttttttgctggcctagcaagggcaatggggatacaatggggacatcacaggttagtgtgacaagattcgagttggcacaggtgcaacaggaatatgtagaagggcctcctaatcttgccttgggatgggagcagtgggtttggaaaggatgtgatgtctatgctcagccctggggaaggagtaagagtcatacagatgagcagggagaaggacttacggggtaaaagcccggggatgaacaaaggtcccagcatgtttgggggctgcagaaggcccagactggggggaaaggggggacagaagaagatggagctggagagggtagtggatcaggaacttggtcaggaagggcttctgccctgttgctgcatttgacctttatcttgggagggtgaggcagaagaatcccttgaacctgggaagcaaatgaaagttgttgatgggctttaaccagagagtgacaagatccactgtgtattttagaaagggcttgtctgccatgtggagaataagaacatggctgaagaagttgctgctgtaatgaagtgaatgacagaggctcgtgccgagatggtgctcgcaggatggggagaggggtagggttgagaaataaaaggaggaatctgcattatgcattattctccaagtggaagcataagaactggagtcttagaaaggggcacccacagtgcccactcctaagaaagtcttgggtaatgtggtgaacaggggaattatttatgagacaggaagaaaggatgtagagcaagttgggagtggtgtagaccagcgctctccagtggaacgttctgtgatgatggaaatgttctctgtctgtaccacaggtgctgttgcacacttgaaatgtggcttctgtagcctactttaattttattagttttcacataagtaggtggatgtggccagtgtctgccatactggacaatgagggggccatctttgatgcaccaccctcatgggtcagagtgaggaaatgggataggggaacaggaagaccctctttccagacacttgggtgtaagtgaagagggcaggagctagaaatgaatgtgagatcggtctcccttgttgctttacccaccaagagcaaggagttggtagaaagggccagggtagggctgcagaggtgtactggtcagtggggctctgggagtggccccagcaccctggagtagaagcaggagtgtggcaggagagtggagccaaagaagctgagggtgatgatcaaagtagggctgagatgggagaaaggagagaggacaaagatacaggaactgtaaaaactagttgtaataaataatggaaaaagaactggaggatgtggccaaagcctcattgtctgacttcgagattatggaagtggagcagttctgaccaatgacaaagcccagggtgttgctggccagagagggacaggggtcaagagcgtggatgttgagagtgagttaatgaaaggctcacatggacaagtttatgttgttgagtaggggaggaagacactgagctggagaagggtcagtgaattcagagtaaactgaacgatctactcatagcagaattcctggtataattgagtccatcctcctttattcttctgcaggtgtcttggctactccttttctctccaggctgtgggcaaactctctgctcctgagttggtctagaatcttgttcctggggccactgcttgccagggcgttacaccaaattaaattattggaaacatacatgtgctgagactcttccacatccaaggtgctgtctaggggctgctcagggtgcacagataagtaggtgccaatatcctgcctctggcggctccagtaggagaacaaagcaagtgtggggaaggtgtggggttggaagagttacagagggccttgattttcaaagggagaaattatacttggctgagtagttgccagtgtggagcaaatgggggtttcagatgggagagtgaatgtacattcagaattctgctttaggtagagcagcaggtgagcagggcatgaggtttagcaggatgcaggataacccatcaaaagcattgaagtgagaagctgaccaccagcaaagcagtgggtttgaacggtaaagacagatgggagccacataagagacagcatctattgagatccccccaacccaaccgacctaagtgaaagcaaaagagaagcaatgaaagctcaagatgaggctgaggtttggagcccctgggactgaggctatggagaagcctttaatagaataagaaacaatagatcaagtgtctcagggtgtcattagggatgagcttagcttccacaataccactacaaactccccacatacactgaccctgcctcttaattttccagcctgcccgcctagccaaaagcatagggaaggccctcggggtgcatttctgtaggcaggggtcattcctgagcagattgtccttggtctggggtgatttgtgaactactctggaaaagtacatcctagacactcctgctgtggcttgtcagacatttgttgagttcctgctgtgagcatcgtcttgcatatgccaaagtttataggcaagtggaaaaatgaacgtgttaagtgctgctttggaagaagcaagcacagcatgcccaggggccccaggtgagagatgagagggagtgagatacggcggtgggatgcatggaagaccccttccacttgcctacacttttaattgttcattcggcgaacatatgttaggcgccagccatgtgccctggctctgtcagcagtggacctcacctcctgatgtacctgcaccacccatgatctgccacccttacctgtactgagatgacatccagtatttaccatgggccctctaaagtcagtcacacctgctcttgagcctagctctgcctttcctgaccatgtggcagattatttaagctctctgggccttaccaactttaacaaggggtccaggaatgaaaggagaacatagtagctcctgcagactctccagtttaagaaaagtaaatgtcaggtatcactggaaaacagcccagattctttcttggcattgctgaagcagagaactcattaaaccttccaggagaatacacttttcagcatctccctttctagctggtgctggacataacagtaattccaccaggttgaatagagattccatggtgaattcaagtcttggcaggtaagccagagagaaacagatatctttttaaatgtaagtggccgtaattttcagcttccattttgtcccgtaaaggaatttgaacttatttttcttacaaaagcctttcagttcaccttttaagtttagaccaaggaatataaataggcccagccatttcaactaagagagtaaattaaatagccaatatataaggccctgaggtttaatctctgttaatagatttcaggaaaacagagacagtgttcttaaactgtgcagcaatttatgcattgaaatatatatagctgcaatttaagccagagtgtaatagtaagatttagtccttttaatattccctctaatagcgggcaacagcattgagcctgcacataccttcctcagcacagggtgggttcccagtgccccagtgatggaaccctattaacacctgcttcatccacaagttcctgcccagaggacctagggagaagacaagataaaaaaaagagagagaactgctcttgcaggctttggggaagacagcatttcttcaaaagacacagttactaaagaaatacaccaccatcatcaagctcccttgtaactaaggacttaacagagtgaaggtgctcaaaaccagagaggacactaaagtacacctggcccccccccttgtcctcccttctggacacacctgattatcctctaaaacttatgatgatgtggagaaatttttttttttttttttgagaccagtctcagtctgtcacgcaggatggagtgcaatagtgtgatcttggctcactgcaatctctgcctcccaggttcaagcgattctcctgcctcagcctcccgggtacatgtacagaattcttgccagtgggggttattattcactgaatcacagcttgaaaggttttctacaactctttctctagaggtggtgaacttaggacggattttcatttacccaaaagagttcctgaacacggaacaaaagccaaacagcagcaagggaaccagatttttggagcgcccaccctgtgagggctttctcaaatggcatcccattgattctttacaaaagctctgcctgaaggtatgatcgtgcccattgtataaacagtgaaactgagattcactcaagttgtgtgaatcacacagttcccaagtggcggaattagaatccaagatcagctgtctctggttcataaatttgcatttcctcccagtcaccaaaactccagatgtgaactccctgtctgagttcacatcaaagcctaccacgatgacaactccgcgtctcttcctgctgacaaacatagtatctgctattactgcctcaggtgtccagcgaaatactgagtttgtttacaaaataagtctcccagccttctctatgtattagcaaccccagagaaggaagggctgcccgctttgcaaagatcaaaccccctgtgtgtttcaccctctgcacacttcaaaaccaggcttcttcaagccagttacgccaggagcttagcaaaagggtaaataaaatgttctctgtatccctggaaatccccaataagagctctaaagtcttctcaaatcaacaaagtctgaattagaaggaaggagattattgggtttggaattttgaaatatcaaacctggaacaaataatctcactctcagtttatttgtatgtgaaataaggtggggcagggggagtggttatggaggggacgcataatggatgtggagcactctatacagtcctgggtagggggtagttaatgatactacttagcatgacagttgccagtcacactgtcacagtctcccatttgtctatggggaaccagctccttgcagggactgcctgagtttttgtttggtccaactgagtgacgaacatataaggatgtggggctgggcgtgaaaatgagtcaccaaggtggaactcccttctgtgactcatcaggtgagttccagaatggcagaggcctctaacaaaaaagatgcagtccgttcgtctctggtattctccgcacacctgcagtttagggcctgatagctagacctcccctttgggaaagaattttaagtgaataaaaaggaaaagatgaatttgatggaaaagaaagccaatattttcactattcagaagtataaaaggaatctcacaaaggttatacttaaggtactcaacctagagtttattctaaaataccaccccaaatcccctatctaacatgaataaggtggcaaaagttctggttgcatggcaagatcagacccttggcgaaacactcacacacacacctcatttgtgtagtgtttaccttagcccttaccaggcagggtggtattaactccattttaaagatgaagaaacagacattgaaagatcaagtgactttctccaggacttttggcaccttaaaagttctttcatctcagctgggtgcggtggctcacgcctgtaatcccagcactttgggaggctgaggcaggcagatcacaaggtcaagagatcgagaccatcctggccaacatagtgaaaccccgtctctactaaaaatacaaaaattagccgggcgtggtggcaggcacctgtagtcccagctacttgggagactgaggcaggaaaatcacttgagcccaggaggcggaggttgtagtgagccgagatcatgccactgcactccagcctggccacagaacgaaactctgtctcaaaaaaaaaaaaaatttatttcatctctaccacaaatgcactctgaaatattgaacagagcatagcatgaaaaactttggtaggttttttttttttttttggagataggatcccattctgtctcctagcctggaatgcagtggcgtgatcatggctcactgcagcctggaactcctggggtcaagtgatcctcccatcggcctcctgagtacttagctttcaaattgttgtttagaggttttgtcatctggtagtggagcttgacaataggcaagatataattggcatatttatcacatagcagtatgccctacttagaagacaaccaagtattataagaattctcactcaggtacatgaatgagttgcacagtggtattttggggggatattttggttttaacaattattaacgaatttggttcctttatgttgcaaatttcctctgatgtgcttaaaatatgacctggtttgcaccgacctggaatttgtatgcaagtatccatgcattatagagcaagggacacctgtaccctcagttccttccagcagcaaagcatttactagaggtgtcctctctaaccttggctccccgtcaccaggtgttgggtggctagaacaaagtgaaatgacctcaagaaaggtcacaaggagggaggagcatttgggagctaatcacaatataatgattatgccccgtgcagagatagaaaggtgaatggatttgctttgccctgctgtgccacagaaacaggccacattagttccatttatctctaggtccatctgtaatacacactggctccagatcttcattttttacataaataacgtggtgtgtggcttagtttctattatgcggttgccatggcagttcctccagttggctctttcaactggagtgaaatgaaaaaaggcacttgttagggggcagggaaaacacacagggttggtggggaagggctgagacacctgggcagcctttgggatcacagggaatgctacgaatatgcgcttccattcggcaggaccacagcccaacctggcagctggaaagaaggaaacaggttgtgtgggattttgagcttggagcttatttattaaatcgagctgcttgggaagtttaatgagatttcaaccagaaatcttctccggggcttctctttggggtatcaagcagcggaggtgaagagttccaaggagaagtacagaggcacctgggccgagagcctggagctctgccaagctcattagcactcatagggtagcaaagccccgctctcacccgattccaggcatgtcattaaaaccgggggaagggctgcttccttcattaagccttccctctctccccaactgcctttggaggccccacagaatggaggtgctgctgtgcttataatgcacatgctgttattccagcaatcatggatggacttcaggggcctatgaaccccctgagatacaggtttgattttatgggtaggtgcattttgctgggctatgggtctagatctcatcaaaatctcagagggaccttccttaatacaaaatgaaattcagatgctctaggactagctctgcaaggaacactccagacagaggtatagaggccctgggatctcagagttggccacacctagttccagagatcacttcctcctcctgcagtctgtcactgaagatggttggcactttattctggcctcaaggggacagtttttttgaacagttaatttgcattagtgactcatctgtcactttcccatagtacagatgacactctcccccttcactcagaatcacctgggaatgtgaaggtgctgaggactgtgctgcacaccaaatgctctgatttcagtggtctgggatgggacaccctggatgatgattgtcatgggcagccaggtctgataactcggataacagcaggcaaagaaacacagagaggaacagggaacggaagtaaggaaggggaacggttttcatctcatctgccatttttggtgactggttgtaggtaccggaaatgctctaccgtgagggtttcaaaactggttaccaactcattctgagctgggaatattaaatatccaggggaagcgaagttgtcagtatatatgcagatattttccatttaaactatatgtgtatacacacagatgtactcaagtccaatttgtggtgcctgcactcaagagcacaacagccctaaaagcctcaaacagaagaacaccacacacagtatgccggcgctttgcagtttcctctgtagaacaccacacacagtatgccggcgctttgcagtttcctctgtagaacaccacacacagtatgccggcgctttgcagtttcctctgtggaacaccacacacagtatgccggcgctttgcagtttcctctgtggaacaccacacacagtatgccggcgctttgcagtttcctctatggaacaccacacacagtatgccggcgctgtgcagtttcctctatgagactacgctgctttcactgacactaactaagaatgtttctcttcaaggaagaccgtcttggccttctcaggctctcagcagaggatgatgatgataatagcagctgtcattcactttacatggtaaagtgacacagtacacactgttctagatgcttttttttttttttttttttttttgagatggagtcttgctttgttgcccaggctgaagtgcagtggcacgatcttggctcactgctacctctgcctcctgggttcaagcaattcttctgcctcagtctcccaagtagctgggactgcagatgtgcaccaacatgtaccacagtgcaaattccaggttgtctctttagtagagacggggtttcaccatgttggccaggctggtctcaaactcctgatctcaggtgatccacctgcttcagcctcccaaagtgctggaattacaggtgtgagccaccatgccagactgatgctttctatgtgtaaagttagtcttcacagccatctggtgaagactgtagtattatcatcatccccattttgcagatgaggaaactaaggcaggagggcttaaataacttgctcagatttgtaccataataaaaaggcagaactgggacacaaactcatgcgctttgcctcctgagcatgtctttgagccacggagtcagacatatttgcctagcagtgctataagaaaagctaggcagagacaggaacaggggagcactggccaccagatccagaaccttaacattcttttcccggtaacaggcttcatccctccacccctcatcttcggggctggcatcgactccacctgcctgttctggagcacgttctgtggggagcaaggcgcctgcgtcctctacgacaatgtggtctaccgatacctgtatgtcagcatcgccatcgcgctcaaatccttcgccttcatcctgtacaccaccacgtggcagtgcctgaggaaaaactataaacgctacatcaaaaaccacgagggcgggctgagcaccagtgagttctttgcctctactctgaccctagacaacctggggagggaccctgtgcccgcaaaccagacacataggacaaagtttatctataacctggaagaccatgagtggtgtgaaaacatggagtccgttttatagtgactaaaggagggctgaactctgtattagtaatccaagggtcatttttttcttaaaaaaagaaaaaaaggttccaaaaaaaaccaaaactcagtacacacacacaggcacagatgcacacacacgcagacagacacaccgactttgtcctttttctcagcatcagagccagacaggattcagaataaggagagaatgacatcgtgcggcagggtcctggaggccacttgcgcggctgggccacagagtctactttgaaggcacctcatggttttcaggatgctgacagctgcaagcaacaggcactgccaaattcagggaacagtggtggccagcttggaggatggacatttctggatacacatacacatacaaaacagaaaacattttttaaaagaagtttcctaaaataaaaaaaataaaaaaaaaaaacccacaagttgaaaacattgccagattaagcactagtgacacaccccgtgccaccctcttcctccaggtgggggtgggggcgggcgcacaagtcggaggggtggaagcaccactcctctctctgactttcgcaatatgggtcactgtgtagacgactcacccagtctgcatgtggttcaaggccccagagttctctcagtgatgctaatgggtgatccgtgctggagtttgtaattggcacctctcaccagctccatttccatgttcaagactgagggcctgagggggagccaggtggggggccagcacctcccagtggcgggcatccaccttcccccagccccacagagtgacctcaggaagcagtaggcctcgcctggctatgactgacccggctcagagctggtgagacccaacgcagtccaagtcatttgcttacatttgccaaaaacattttgccatttttaaaagaaaaaaatacaatccatatgaatttcaaactgttgtatgtataatcctctaatactatttttaactacttctaaaatctgtgttaacccttcaagtcactaacacagttctctaggccggatttattatgctggttgcttttactttttttctccttttttaatgcaccaaaaatatgtgatacaagggatgcaattaacctattgtaattttcatcattttatcctcattcgaatattctacaaaaacaagaatatacaatgtgttacaagaagaaaaaaaaatgcttcaaaaagagagtgtatatgcagcctgcctttaaaagaatcacatttgagacaacaggggataatgtgatgaattgcaaatttgccttttagcttccttccccatgattcagtgatcactgtcacgggaaacccttttatattcatgcttgacattccaagaggcgttcttttcagcctgtggaggagacactcttagatgtgggtttgtgtgtatgggtgcaacacttccggggataggaaagaagaacagttccctaacacaagctgttaagaagtctgtagcatctctgataacgaatagacccacaagctcctggaagctgtcgtgtgtccaatgcgtgaaaatgtctgtgacattttcagtgttagtcttgaactaaggcccttgtctgtgtgttttgaaggtgggtgaacctcagagaatgaacctgttatgatttggggtaagaatcacgttggaaaacctctcgcaaccagcacactaggccttctacggccatttccgtaaggggacagagcttaggtaaaggcacacactcatacacacacaacaaagggccctgctaacttactcctcatgctgcttcagtgacctttgttcatgtcacattcctggcgctggaaaaaaaactcaaaggttgattggtttgctttttcaccttggacacatttgcattttacccacaaggcaaacaaaagaatcaggaagtaaaaaatggttgggagtgggacaggtatggtactgaatttttaatgaacattgtaaatgaagaggcttgaatgacagcccaaatctagagaaggcactcagcaagaccaaccaaaagaaaagctgtgtcgtggtatggggccaccgtgatcagctacctggggcaggatgcttctgagacaggcctttcaactgcttagtgttagtatgtccttgcttatgaaaatggggacactcatcagtacgttaactactaaaggggagatggttctccaaccactccataaaatatgtatgttctgttgttcctaaggctttgataatatcctgtacagattttggtttagttttgcaaatatattgctaataggtcactcttatagattattgcttggcccttcaaactcagtacacacacactgaggccctttgacctagtgttttatggaactatttgctttgagagaaaaaaaaaagaaagttttttaaactctttgcattttggattttttttcctaagattttaggatgaatgtgaaaaagatgttagaataacaggaagacaactccagggctgagttttatcagcaattgggtataaatttaaagaccgctgttgcaggatggctctgaattctgttgtgtcgtcttttaaaattttaattattctcatatagtaccgaacagaaaactcagtctagttttaatttgccttttgtgctctaaagaagcattgtacatacaacactagatccagcccctcgattatctgtttggtttcaagtgaatgaaaagatttcctggtaagatcattggatttacagaatacaaaaatgtacgggatggaataaacctagaaagtgaatgctagagttctctctcttctgctacaaactcctacaccatctcagctgaacatgcccagggtggatgaaaagtctctctctgctgaaattgacagatctttgtaactcctacgtagagacaaagaaggtttgggttttgttttgttttttgttttgttttgttttgtttttctaccaatatcattccctcctatgaagtaagcacattttgcaaaaatgcctctctaggggacagggtttgctgtcttctctcagctgaggctgtgtgctctcagggaacgctggctctgaggcaccctgggggacagggctccagaaggccacagcatggcatgcgggctttcctcacagctagcgaaggagtggaagcagcctcctctcacggtccccccgaggagcttgctaggaacacttaacaggcaaaataataactggaaagccaggagctcctaaggaatcatttgacagggttgctaacgtcttcctagcaggagggagcgtgcccctccataaaaatcacttccttctcaccatctgatcatggaataactcgctctagtgctgacttttaaagattggttgagtgtcatctgtacattccagtcccccgattccactgccctgtgtccagtaattgccctccagcttcccctcactcacactatggcagggcttcccagcccttacagtcaaaaagcctgcagaaacgttccacacaagggcaaccagctggtccctgggatggtagtcacaccactcttgaggaattttcccaggaaaaagattctcctgtggttgctaatggatattctttcacaccttccagaggaggtcattcactgaggaacatttaaaatggagatagatacatgtactaaaatagaaaaacctccaaggaaaagtagtttctgggtccccgtgtgcctgctgggctggttttcttgccgcctgctgcttccggtcctaggaagtctggtttcttctccacccagccatgcctgccagacctgtgcagtctgctctaagccctgctaggaactccaaaggccctactcagcagtggcaagctatgaaggtcagtgcatagaggtcaatgcatctgatcatacagtcaagaccagaaaaacaggatgagcttctgttgcagttggacggagttacgctatattttattgttgcttgaatattttatttgatttggtttagatgagggaagaaaccatgcagttttttcagtctaacagatggagaatacttcccgctgcctggtgctattcttacctgactatcttgatggcttgggagaaccacatatctggccagaagccagaggaaagtaccagacacatggcaggggcctgctggctccactgggctcacgccattctcctctgattgacctcctctcaaccatgatccatgtttccttttagggaccgttcccccttaggttagaatccacttcaaatatctaagaggtgccaacttttccaagagagggtgctagtgaaattaaatttggcctggaaaattagttcaagacccaaatatagtatttatccattttctaaccttccttccttttttattacacctgctccgcccgacttattccaaactgctactctcacaacagccgcaagaacgtaatcccttacagtaaaccaccctaagtgacagactttggaccccacgcccctagtgtactgtcattgctcaagagtaaattggaatactctctcactggtggaagatgcaaggcagatttttgttcaaatgcctcttatggggcctgttgcctagaacagcatgtggaatccaccctgaatgcatgcagccacccacgcctgcctcatcagtagcttcagcaacccagaatgcttggtcgtcatggcagggacaacatgggttatcaaacctaaaatggaaaattttggaaagcaaagatggccctgtcccttagaaacctgtgactgccatggagacagggacaactcacacttctcagagactatccacattagcatttttctttgcagagtttatttgggcgtgcattgcatgagtttgatatattcaaaacatgtattttttcattcctttacttaaaattttggctatatgccaagccctagatcagatgcaaaagtggaaaagttttggtccctaccctccaagaacccccatttcaatgagctggacagatctgaacacaaacaaaaccaatgggataatagtattaagagctagggtctgtctggggataaggagagccaattcatgatggtggtgagttctgcctcatggcagcaagaatcaggaaggctctggagagtgggtggcctagaaactaagaactaaagagcagtgggtgacttttggggaagcagggtgagaagatgagggcagaattgcccccagagagagcgccaccaaaacattcacaagttttttctctaatgggccaagtagtaaacattttagactttgtgggcctgcagtctgtgttgcaacttctcaactgatgtagtactgtgagatcagccatagacaacaggtgaaccaatgggctatgttccaataaagctttatttacaaagaccgtcggtgactgagggaaggccatcgtgtgctgatctctgttctcttgcacaggcaaggtctcaagcagcactgcatgtttgggggaccctagcggctgagcataggtgaggcagatcccagcacctaagactgctgtagcatgggccagggcatacataggaagggaccctgagctaggtgtctatcagccttaacactcctgaccatgagactcttaattcagatatctcatttccaagaataaagtaagtacccctttgctctcatggttaaaattgaaggcaacattatttttctcttgtgtgacgtggcggatttgaactgtatagtctacattcccatatagctgtgacactgtagctcgactagagttaccatcctttttctcttaaatgatggaaatgggcacatgagggagaaatgttcaaactagaaaaagaagagtgattccagataccaaagagtattttccaatccttttcctccccacaaccaacacaaaacactggcaccctaaagttaacagatatgccaggtaaaatacttggtaagcactaataatagtagctaacatttctcaagcactgactatgaaccagctgctggctgagcttatttcatgtattagctcatgtaatctcaaccataaccctgtgaggtaggagctgttattggcttcattttacaggggaagaaaatgagactcggaaggtccagaattggctcaaattcacaaagcagagttgggattcaaacccaggtctgtgaaaaagcttttaggtctttaaaagctctccttattcccagacagacccataaccactatgggtactacctccctaccaggtaagacacgagggacctccctccccacctttagacactgatcaagaagaccctggcccgagtggactgtggggccccacatgctcccacgtgcctcctgatgtaacaaccaggacaccatggcagctgggctctggggctgtgtgtccttctaacccctgatcccagtggtccattgatgtgaagtattttacctgaaacagacagataagaggaatcagataggagactcctagtgcattccgaaatgcactatcaaagcaccaagatgccagggaggcactccacagtgctggtcatcggctcccccggaaagaccccagatacctgccatgcctggcacccctgtagtctacagcatcaaccacaggagatcagctctgaccccagggcttcaaacacaccgaagctggtccctaattggatatacttcctctccagaggagaccaggggcacttgtcatattgagttcaagtccctggtcaaactcatgcactggccaccctagcttgctgttctgtcttctgttctcagattccaggcttttaggaacagaatatccagacatttccatttttgtaatagtgactcaggtcaacaatcaggagttggtgattatcataaattttgaatttttgtcccgtaagatacaattgattacgttcttttgctatgagcaaatgaacaacatagtaagttttctggaagtttaactttctgtaggtggacacttaccatcccattcatgtttttcttaacgttaaccttatagaagattctcacactaaccttatagaagattgctctcatggagacatgtttggcaagaccatttgattttataatctaaggccataaaatgaattggaagcatagaatttacaaaatgttctacagaaggatcccaactgaacacagatggtgctcccatccagcactgtaagggagggaaggggccaggaagctcatgtttttattaagcacctgctacccacgtgccgggttctgtgaattcatgatcccaggtactgctcccagcagccttctcacaccagccctacgaggtaagtatatattcttttccacttcacaggtctgaaaactaaagctcagcaaatccaaccgttctaagatcacatagctagtttataaagccaccaggagccagtgacagatctgactcctaaaccagtgctctttccactacaacacaaagcccccgaagttagaacacggaactagcttcttatgaagcctctgcaaagccaacagagcgtctacctgtgggaaacccctagcaggagtctattgtttcatagagaagtgagccaggagttggaggtgagaatctctgcaaagttttgcctatgggcacaggaatctaggtttcactttaataattaaatgttggaaacctttcaaaacactcctccttcctacttcaaccttagccacatcagcaggaacttcccagccattcatcagcctttatcttattcattctgctgagcagggatgaaccccagctctctcacttcggtcccacccttcccaactccccacgcccaagtctttcagtggaacccaagactgtaagaacgtaggccttgtgagagtgaaggaaggatgctcgaacttgcccaggactcaggcttcagcttcacaatcccgaggaaaggaatgacatttccaaactgtcacctttgtagcgctgggtcaaagtctaaagaggacaaataaatagagacttctgtggcctcgttgtgcctattgaacaggagagctgcatgtcacaatcaatgagacctgcacagcttgtgaatcatcactgagactagttgtgtttttaatacctttaaaatgaagccacagcatctattctggaaatgtggcgtaggcttaaaaaccttgctccaaagaggatatcgtttcagccagcatgcagtgaatatctgtggctacacaaaaaaacaaactgtcccgaatgctggaggaggaaatatgacattgtgatgccaggcagttttctgtgacactcaggaatctcttcaatagagatgtacagtgacacttagagccccagaacacaaggtctgtcactagtaatttacataagataaggataaattattgactgggatacatcttactcatccccgacatctgcttggctgtggggttggtcatgtagataaatatccttcccagaaaggatatttggccttcaaaaaagtctctgggctcagagtctggtcccttggggttacatggaatgaaacccagcactttattgctttgactgcctactcttgtcccttcactgcaaagccatcatgctattaaataagcctaacaaacagtaggtgaagcagaaaagaccgatctctttttcctcttggctcttcttccctcctccccctttaggcacagagtaccaagacattgagactgagaaaacctgccccgaatcacattcaccttcagaagactcctttgtgagaagctgagggcctggccctcttcctcttcctggagagaacagcccaccaccacccacagacctcgcgggcctcacttagcgcgctcctccctgtccgagaacccgagggtccccatgtggattatccagccagtgtgtggtcctttgaggccccaagcgcaggcctgtgatgaggaccaaagaggtgacttatggtcaggagtactccaaacagctctcagagtaggcatctttcctgggtctctaaagagtcatgctgacctggtgtgcaaattcccttccacccatccctctacctcctctggggatggcttgccgacatgctttagaaactcccctcttgggaatgctcctctgactgagggctccaacagctttaatgaaatcagccgagagggtaaaaaccaacctgttgcatagaatggaggggggaaaaagcacatactcaatagatttttgagtgtggtactctgtatttttgcagcgtttattttccaaatgagcagtttagaaatatgtgatgtaaagtacatactgtacgtttgctgaaaattatattaaaagcactattttaattcttcctctgtctcatgctctaatctctgttatctttcttgtgccttcaggtagaatgattctaaaagattctggagagtgtttctggctatgtgcgttctatatttatgggctttgaggttatggacttaagagagtatgagctttagagccaagagagacctgaactcaaatccctaccccactgttggtgtgatgttaatgtagtgatctgactcctcttagcccccgttttaccatttgtaaaatgagaatattaatgcctactttatgcaactatggtaagacttaaattagatcatgtgtaaaggtaccaagtgcaacatacagcacagaaattgtcattgttcattactaccccaacctctggctggaatctaaatgctccataccatgcagcttctactggtaacatttagtggtcctatcctctcactgtctggttttcatttctgattctcccactgcctgtaaagcctaggagacaggcaattggcttcatctcacaaaagccccagtgcatgtatagtgtatagtgcccaggtacagtgcatgttcttccgtgggtgatcaatatgcaaatgaatgaatgatgaacaaacagcctcagacccagtcccattccctcagtggaaactacagcatttgcctccctttctgtaggtccacaagctacccagtggctagagctctagtggctttcccataccttgctaggtctcttcgtaattggctggcctcacctctgtatctttattaattcactggctggactccaacctcatatgagcagataggttgggttgacacctgccactgacttgcagaatggaatccccactgcattactccactggccagactggagctcaggcatggatgcttgccagaattctatctgtgctttgtcttttgggcaaagcacttagaatccacttgtcttatggggctagccccataactgaccacttttcttcatagtcctctccatcctgaatcttgtcctctgtagcccatcatccactgcagctgagttcaccccaaatcaaagcttgtcaaatctattattacctgaagactgcacccacctcagccttgagttgtcttttcactctgaggttttagggggtcaggaaacaatgtgcttgactttcttcaaggtccaattataggccattggtgccttggaggatcctttttcagcctggctgtgttatgtgattgtttattttttgcaaagcaacatgatttattctctccagtataaaaatcccaagaaaatgcaatttcaacattctctgtcctgatgttaaaagaggctgaagcagctgtaaaagttgttagcggttcctcctgggcttcacctgcaccagaaattgagatggaggcagaagggaaaggagtaaggaaaggctagtgcttaaggtatccgtgtgttcagtcccacattttacatctgtttttatctatagtccagtttattttccctggctaccattcccccatacaggtggtcagcttaaagaaaacttattctctccattttatctcagccttgcaaagacatattcttatagtcaagagattcatctttcaatacttaagtgaattcatgagaaatctgtccataaaagctgtccaactattaataactcagagagaatacacggcttcatcagaccccaaaatgccccctcttcccaatgtcctctcagttgccatgggccaccagggccttgaactacatacacaactagctcatcttccacgcttgaaagtccaactcgacctctttcccagtcttcaggaaagggttagccatgcactcaagcatttggctcaaccaaaacaacagcaggctgtttctgtggccccataacatggattcagaatcactcatacatcccctttacaaagagctttctgtcttctttttaggctttgttacttaacgagctactgttatggaacagcttccataactcttgagacaagtgtctacacttaatgcacaaggcagactcacttgctttcctggaagcctttaaaaagtctcttaaccttcttgagttatagcatttccagttataaaatacatgaacatgtatttatgggatccccaaaggagggcacttcagatcttccagaatcctgctcctctgttgctcataaaattaaggggtgaagtaaagaagacagaacagcaagctagggtggccagtgtatgagtttgaccagggacttcaactcaatatgacaggtgcccctggtctccttcagagatgaagtattatcctgtgaggcctctctacatcacacatcactgaggtcttgaccacaggacacagatgcaactgaaacatgctgccaatgagaaagaagtggaagacccctgtccccagactctacacccctcagcttggcagctggctcctttcttcattcagaagcttaccttgccctctatcttatgcttccatttctgtggacaatcattctgtattgaggcaactatattttcatagtaaaaattagtgcttgatataagtttaaaaaaaaaaacagcccaaagaaaatgacaattcttttccattgtttctaaaatcatcattttctagcccttcaagttttgtgcaaatgactagacatgacaatgcaatactacaaaaggagatgttccttttcagcaggatgttggaaataagattttatttccagttcatctgtgcctgagaatgtgactcttgaagggtcacattactgccaattattttctcaggtggtgtcagtggattggtcctgacaaagtcactgaggcagctactggggaggagaatgcagagtgaagacccgtgctgggtgaggagggagctgaatgcacatgaggaggcctcactgcgacctggtcttaccctccacttcctgcatcccatgctccctgggaagatagaccctgaggaagatggttagtttcattccatatttcaaatggatagatgtcagattaaagcaaggccgtgacttttagcaagtgagtatggacaggactccatgaagtcctctgcacacagtggccacttcataactgggggccataggagagcaagatgacttaggggaggggtcctcaacactcccggccacagactggtacccgttggtggccttttaagaaccaggccacacaggaggagatgagtggcaggcaagcgagcattaccgcctcagcgctgtctcctgtgagatcagcggtggcagcattagagtctcataggagcatggaccctgttgtgaaccgtatatgcgagggatctaggttgcattccttttgagactctaatgcctgagaatagttttatcatgaaaccatctctacacctcccacccccactctctccatccatggaaaaattgtcttccatgaaaccagaaaggttagggaccgctggcataggggaaagagcaggtaacaggtttacatcccggcggttcagccacttttcagcctcgccaggttagcaagtcaagattcgctctaaaccagtctttatgtagctataaaatgggaaggttacagctgcctgcttggcagagacatcatgagaattcaatgtacatgtacagcccagtgtcagtccccggcaagtctcaggaagtcatgagtttcattgagaagtctcatttttggccatataaatacaaaaccacttctatttgccaatatttgttaccactctgctcttcggtaatcctctgtcctgctgagtagtgactctcttgatgagttctcagtccattccttaattttttagtcatttctacttattaaaagagctttgcttcactcattaagatccagtcctgaccatttgagaacttcatcctcatataccttttaacccccacaatggcaggcctggcctgtggcttggggggcctatagtggaggaggaagtgtggtctaccctctcctaccccttttctcttccctgccccaactgggctccagatggaggtgtgggagctgaagagggaagtgaggtacattcagcagactgcctgtggctaagcttgctgccatcactgacaaccactactgatgcagctccgtctctcaagtacgtttggaggcaggcaggcaggctccagtaagcctagctgaaggagaaaaccatccaacagctcccttcagctctggggctcccttttgagaggcagctccaactcccagcaaactctcagttgcccgctgtgagctccaccccccttcagtaagcacccttttcccctgcatggattagtctcagggaagcccatagcctaacctcatcttttccttttagcttgaactctaggatggaagtattagcagggctcttattccccactatgagtaacagatagcttccaagggctgtccctgcctccctcctccatggtcccatctttccagtgtactccccacacctcttctcagtctgctctggtagcaacaagacatgttggcaagtccacatgctgggaggacacacaaccagtgtgcatacccccaaactctatgagcaactgctttgagaacacccttcccaaacagtgccttgcttcagaaacattactcttctcacccaaaaaggtgacctctcatgctcttctccagccctttgtgtgttttgggaatgggtgcatatagggtgggtgcaaggagttggtagtgtgagtttttccaaaaggagaaaactcaaaagatcctcaccccacacaccacaccaccacactatacaaatatggaaagaggaaggccagccaacaggtgacaataatgagagatgatactacctcccaaattttcataatgaaaacccaccctacacctgagccttcaacctgagtcttctaacctccaggtaggtatgtctttgtagatttcacacttaatcaaagagtactggttcaaagcctggtatggagccctgtatcctctaaggacgtgtagagagatccaaggagaacctgtactcaaactttcaatgtagattgaggcaagacaagaacccacataatacaaagaccgctatcagagccctgtctattcaagggctcctactgagcagtaagtacatgacagtgatgggcatttggagcggagagaagccctatgacctgaaatagccagaggaagctttctgaagaacttggagcgtgcaaagacctcaaaggaaatatttgtcatttaggcttcaggtacaatgctttgccctgctcataacaataggtttctgaaaggaggcagggcagtggttagagaagaaaaatgtctatgaatagacactaggataacaacaacgtaccaggtgccgggcgaaattctttacaaaactgtctcctcgtctaatccttgcaagccccctgtgaaataggaatcatttcataccagccccttagctggggtttgagtctcagttcctctacttgccgtctgtatgacctcagtttcctcatcaataatatgaggataatcatactcactccataagaagattgtgaggattcagcaagatgatgattctaaatcacttagtactgtacctggcccctagaaaatatccaagaaatataagggctcctcttctacttcagcacatagaaaacacattctctcacatttccaggtcatctaacagagtgttaaatttttaacagagctaacttggatgggtaaataattgtaacagcaattatctccctgagggcaattatttgccatcaccatttgcacccaccgaaattatatccacaagaaacagagtcacccattagcagataaacgtaattaaattggaagaatgacatccaatggctgactggattaataaaagaaatttattccctagaggtatttcagaaatgcttctccaagctggatcttattttttaaaagcttgtactctgaattcaaattatgtattaattcttttccaaaaatcagcacacctctagcccttataaataccatgtatttctgagaagctttgactacagtggttttataaaccacacacacagacacaaatcctcttgatctttgtataaaactacatatataaaagacatcatactttgtggtaacgtcgattcggcaaatattttgactggattgtatgttttctggtttcagaattttatttcaaacagtaggcaaagaccacggtatatgttgtcacctcacacatttaaacaattttttgcccttaaaccctccaagaataatcatatgcagatctggctcaaaataccttgaaaaagtgagtttataaactattataatttctcatgaattccacaacaaactattaataataagcagactccaaatttatggatcctgataagggatttttccttttccttttgggacatccgacactctcattgttcttaggaacacgggtctaagtcttcattcctaaatctgtctactgttgtcacttcgaaagcctcaagataattggtatccgctagttacatgaatttttatgcagctctccgtctgagatttggtggcagtctacattggcatacttcttaggttcttgaaatacttctgtgaggtagagataagaaagccataaaactttattttactaccggaaaaaatcccaaagaggaaaggtgtctttccctgtagctcttactttgctcctgtcacaaaagaaagtaaaaccatctgtcccaagatggctgccagagaactacacaagctgttactggcctggaagagcatttcaatcacttctacattttcattcagaaaaaatgaattttcatacaaagtgattgcagaagtaaaaatgggtgcattcaatatccactctgcacttgacatgctctcagagtctagaccatggctagctttgagaatttcaagttgcattgaaatgtgcccttacagcaaatcacattcattaataatctaacccaattagactacaactgaaatacagccaaattgctaccctcttcaactctttggaagaccattgaatgatctttctaaatatttaaccaaaattaaaatgtttggtattagaaagtttcttgtgttgtctttttttttttttaaatataaggtcatcttttctaagactagtataaatggatcttagttgttacatagttggtagctgtgtgtataaattagcaaatgtggtgtagcaatgttctctacttccctgcctgtataggctcagatctgtggacatggccttatttgcacaattctgcacatccttctgtggcatactgggtgtagacaaagttctgttccttgagtactgatgaatataaatttcctacctgctttttgcttttcaaaaaaaaaaaaaaacgtggctacagaaaagaccatacctagccctgttcatttacaaagatttcatacttggttacaatctcaacagtgataatggtttcattcatgatagcacacataaaaaagcatggtaataaacctatcagaaatatgcactatttacttttttaaatagtaaaactatcctaaaaaacaaaagtaataacttgaaaagtaaagacaattaccatattcctagatcggatagttaaaacctggaaaaatgtgatttctcccaaatgaatctataatttccatgcaatccccaagaaaatctcaataagagtttctatggaaattcatgaactgaatgcaaaattcaaatataagagctcaagcatagccatggtaattctgaaaataaaaataaaaatgaatgaggattgcccttctcaaaaatcaatatattaataaagcaatagtgcagttgacccctgaacaacatggctttgaaccgtaagggtccacttaaatgcgtttttttccaaccaaattccacatcaaaaatatagtattcttgggatgctgtattagcctgttcccatgctgctaataaagacatgccctagactgggtaatttataaaataaagcgctttaatagactcatagttccacatggttggggaggcctcacaatcatggcagaaggtgaatgagaagcaaagtcacatcttacatggtggcaggccagagagcttgtgtaggggaactcccatttatagagacttattcactaccacaagaacagtatggagaaaatcgcccccatgattcagttatctccacctgtccccacccttgacacttgggagttattacaattcaaggtgagatttgggtgggaacaaaaccaagtcacatcagatgtgaaacccaccctatggagggccgacatatcctgtaggttctgtagggctgactgtaggacttgagtatgtgtgggggtcctgggcccaatcccccatgtaaaccaacgaacaactatacttaaaactagatccaagcacagtggctcatgcctgtaatcccagcaatttggggtctgagatgggaggatcagcttgaagacaggaattcaactctagcctgggcaacacactgagaccccgtctctacaaaaaaaaaaaaaaaaaaaaattagctaggcatagtggtgcacacctataaggccagctactcaggaggctgaggtgggggaattgctcaagcccaggagtttaaggctgcagtgagctatggtcgcaccactgcactatagtctgtgtgtcaaagcaagaccagcattcatacaggaccagaagataggtcaaagactcagaatagcaacaaacacatttatatatgtgtgtgacttagaatatattaattaaaggggaatattttagattgctgggaaaactgactattcgattaatggtttggagagacaacttagaaacaaatttgattcattcccagtcaccagtgaaaaatataaatcttacgtgatttacatagctaaaagtgtttagaagctataaagattcaggaaaaacaagagaatatattcatggttttgtggttttctaaaaagacctaaaataaaaaaaaaaatccataaataaaaagacatagttttgtttacttcaaagttaaaatatctatataatctacaacagcatgtataaaatcaagagaatatttgatttataaattacaaaaaaaaactgtcaatatataaagaatctctacatatcaacaagaaaaagtggaactagagctactatatcacgtatttcaggctgccactcccattgtcctctctgtaaatcctaccgaaaaccacacaaataataccaatgggcacagcacaagagaggggccacaaatgtcctttaagtattcaaactcactaataatgaaggaaatacaaattttaaagagataattttttacctaaaactttcggttaaaattttagattaataatatctccagtcagggtacaaggcaaatgctggagtcttacatggcggcaggccagagagctt

SEQ ID NO: 59 - DNA, 2429 bp, Homo sapiens
gatcttcctggtgtccgagtgcgccctgatgctggcgcagggcacggtgggcgcctacctggtgagcgtcctgaccaccctggagcgtaggttcaacctgcagagcgctgacgtgggtgtgatcgctagcagcttcgagatcgggaacctggcgctcatcctcttcgtgagctacttcggggcacgcgggcaccggccgcgcctgatcggctgcggcggcatcgtcatggcgctgggcgcgctgctgtcggcgctgcccgagttcctgacccaccagtacaagtacgaggcgggcgagatccgctggggcgccgagggccgcgacgtctgcgcagccaacggctcgggcggcgacgaggggcccgaccccgacctcatctgccgcaaccggacggctaccaacatgatgtacttgctgctcattggggcccaggtgctcctgggcatcggtgctacccctgtgcagcccctgggcgtctcctacatcgacgaccacgtgcggaggaaggactcctcgctctatataggaatcctgttcacgatgctggtatttggaccagcctgcgggtttatcctgggctctttctgtaccaaaatctacgtggatgcggtcttcattgacacaagtaacctggacatcactccggacgacccccgctggatcggagcctggtggggtggctttctgctctgcggtgccttactcttcttctcttccctcttgatgtttgggtttccacagtccctgcccccgcactcagaccccgccatggaaagcgagcaggccatgctctccgaaagagaatacgagagacccaagcccagcaacggggtcctgaggcaccccctggagccagacagcagtgcctcctgtttccagcagctgagagtgatcccgaaggtcaccaagcacctgctctcaaaccctgtgttcacctgcatcatcctggccgcctgcatggagattgcagtggtggctggcttcgctgcctttttggggaagtacctggagcagcagtttaacctcaccacctcttctgccaaccagctgcttgggatgactgcgatcccgtgtgcttgtctgggtatcttcctgggaggtcttttggtgaagaagctcagcctgtctgccctgggggccattcggatggccatgctcgtcaacctggtgtccactgcttgctacgtctccttcctcttcctgggctgcgacactggccctgtggctggggttactgttccctatggaaacagcacagcacctggctcagccctggacccctactcgccctgcaataataactgtgaatgccaaaccgattccttcactccagtgtgtggggcagatggcatcacctacctgtctgcctgctttgctggctgcaacagcacgaatctcacgggctgtgcgtgcctcaccaccgtccctgctgagaacgcaaccgtggttcctggaaaatgccccagtcctgggtgccaagaggccttcctcactttcctctgtgtgatgtgtatctgcagcctgatcggtgccatggcacagacaccctcagtcatcatcctcatcaggacagtcagccctgaactcaagtcttacgctttgggagttctttttctcctccttcgtttgttgggcttcatccctccacccctcatcttcggggctggcatcgactccacctgcctgttctggagcacgttctgtggggagcaaggcgcctgcgtcctctacgacaatgtggtctaccgatacctgtatgtcagcatcgccatcgcgctcaaatccttcgccttcatcctgtacaccaccacgtggcagtgcctgaggaaaaactataaacgctacatcaaaaaccacgagggcgggctgagcaccagtgagttctttgcctctactctgaccctagacaacctggggagggaccctgtgcccgcaaaccagacacataggacaaagtttatctataacctggaagaccatgagtggtgtgaaaacatggagtccgttttatagtgactaaaggagggctgaactctgtattagtaatccaagggtcatttttttcttaaaaaaagaaaaaaaggttccaaaaaaaaccaaaactcagtacacacacacaggcacagatgcacacacacgcagacagacacaccgactttgtcctttttctcagcatcagagccagacaggattcagaataaggagagaatgacatcgtgcggcagggtcctggaggccacttgcgcggctgggccacagagtctactttgaaggcacctcatggttttcaggatgctgacagctgcaagcaacaggcactgccaaattcagggaacagtggtggccagcttggaggatggacatttctggatacacatacacatacaaaacagaaaacattttttaaaagaagtttcctaaaataaaa

SEQ ID NO: 60 - protein, 655 aa, Homo sapiens
MLAQGTVGAYLVSVLTTLERRFNLQSADVGVIASSFEIGNLALILFVSYFGRHRPRLIGCGGIVMALGALLSALPEFLTHQYKYEAGEIRWGAEGRDVCAANGSGGDEGPDPDLICRNRTATNMMYLLLIGAQVLLGIGATPVQPLGVSYIDDHVRRKDSSLYIGILFTMLVFGPACGFILGSFCTKIYVDAVFIDTSNLDITPDDPRWIGAWWGGFLLCGALLFFSSLLMFGFPQSLPPHSDPAMESEQAMLSEYERPKPSNGVLRHPLEPDSSASCFQQLRVIPKVTKHLLSNPVFTCIILAACMEIAVVAGFAAFLGKYLEQQFNLTTSSANQLLGMTAIPCACLGIFLGGLLVKKLSLSALGAIRMAMLVNLVSTACYVSFLFLGCDTGPVAGVTVPYGNSTAPGSALDPYSPCNNNCECQTDSFTPVCGADGITYLSACFAGCNSTNLTGCACLTTVPAENATVVPGKCPSPGCQEAFLTFLCVMCICSLIGAMAQTPSVIILIRTVSPELKSYALGVLFLLLRLLGFIPPPLIFGAGIDSTCLFWSTFCGEQGACVLYDNVVYRYLYVSIAIALKSFAFILYTTTWQCLRKNYKRYIKNHEGGLSTSEFFASTLTLDNLGRDPVPANQTTKFIYNLEDHEWCENMESVL

SEQ ID NO: 61 - DNA, 1969 bp, Homo sapiens
gatcttcctggtgtccgagtgcgccctgatgctggcgcagggcacggtgggcgcctacctggtgagcgtcctgaccaccctggagcgtaggttcaacctgcagagcgctgacgtgggtgtgatcgctagcagcttcgagatcgggaacctggcgctcatcctcttcgtgagctacttcggggcacgcgggcaccggccgcgcctgatcggctgcggcggcatcgtcatggcgctgggcgcgctgctgtcggcgctgcccgagttcctgacccaccagtacaagtacgaggcgggcgagatccgctggggcgccgagggccgcgacgtctgcgcagccaacggctcgggcggcgacgaggggcccgaccccgacctcatctgccgcaaccggacggctaccaacatgatgtacttgctgctcattggggcccaggtgctcctgggcatcggtgctacccctgtgcagcccctgggcgtctcctacatcgacgaccacgtgcggaggaaggactcctcgctctatataggaatcctgttcacgatgctggtatttggaccagcctgcgggtttatcctgggctctttctgtaccaaaatctacgtggatgcggtcttcattgacacaagtaacctggacatcactccggacgacccccgctggatcggagcctggtggggtggctttctgctctgcggtgccttactcttcttctcttccctcttgatgtttgggtttccacagtccctgcccccgcactcagaccccgccatggaaagcgagcaggccatgctctccgaaagagaatacgagagacccaagcccagcaacggggtcctgaggcaccccctggagccagacagcagtgcctcctgtttccagcagctgagagtgatcccgaaggtcaccaagcacctgctctcaaaccctgtgttcacctgcatcatcctggccgcctgcatggagattgcagtggtggctggcttcgctgcctttttggggaagtacctggagcagcagtttaacctcaccacctcttctgccaaccagctgcttgggatgactgcgatcccgtgtgcttgtctgggtatcttcctgggaggtcttttggtgaagaagctcagcctgtctgccctgggggccattcggatggccatgctcgtcaacctggtgtccactgcttgctacgtctccttcctcttcctgggctgcgacactggccctgtggctggggttactgttccctatggaaacagcacagcacctggctcagccctggacccctactcgccctgcaataataactgtgaatgccaaaccgattccttcactccagtgtgtggggcagatggcatcacctacctgtctgcctgctttgctggctgcaacagcacgaatctcacgggctgtgcgtgcctcaccaccgtccctgctgagaacgcaaccgtggttcctggaaaatgccccagtcctgggtgccaagaggccttcctcactttcctctgtgtgatgtgtatctgcagcctgatcggtgccatggcacagacaccctcagtcatcatcctcatcaggacagtcagccctgaactcaagtcttacgctttgggagttctttttctcctccttcgtttgttgggcttcatccctccacccctcatcttcggggctggcatcgactccacctgcctgttctggagcacgttctgtggggagcaaggcgcctgcgtcctctacgacaatgtggtctaccgatacctgtatgtcagcatcgccatcgcgctcaaatccttcgccttcatcctgtacaccaccacgtggcagtgcctgaggaaaaactataaacgctacatcaaaaaccacgagggcgggctgagcaccagcacagagtaccaagacattgagactgagaaaacctgccccgaatcacattcaccttcagaagactcctttgtgagaagctgagggcctggc

SEQ ID NO: 62 - protein, 639 aa, Homo sapiens
MLAQGTVGAYLVSVLTTLERRFNLQSADVGVIASSFEIGNLALILFVSYFGRHRPRLIGCGGIVMALGALLSALPEFLTHQYKYEAGEIRWGAEGRDVCAANGSGGDEGPDPDLICRNRTATNMMYLLLIGAQVLLGIGATPVQPLGVSYIDDHVRRKDSSLYIGILFTMLVFGPACGFILGSFCTKIYVDAVFIDTSNLDITPDDPRWIGAWWGGFLLCGALLFFSSLLMFGFPQSLPPHSDPAMESEQAMLSEYERPKPSNGVLRHPLEPDSSASCFQQLRVIPKVTKHLLSNPVFTCIILAACMEIAVVAGFAAFLGKYLEQQFNLTTSSANQLLGMTAIPCACLGIFLGGLLVKKLSLSALGAIRMAMLVNLVSTACYVSFLFLGCDTGPVAGVTVPYGNSTAPGSALDPYSPCNNNCECQTDSFTPVCGADGITYLSACFAGCNSTNLTGCACLTTVPAENATVVPGKCPSPGCQEAFLTFLCVMCICSLIGAMAQTPSVIILIRTVSPELKSYALGVLFLLLRLLGFIPPPLIFGAGIDSTCLFWSTFCGEQGACVLYDNVVYRYLYVSIAIALKSFAFILYTTTWQCLRKNYKRYIKNHEGGLSTSTEYQDIETEKTCPESHSPSEDSFVRS

SEQ ID NO: 63 - DNA, 2431 bp, Homo sapiens
  misc_feature (1)...(2431): n = A,T,C or G
nngatcttcctggtgtccgagtgcgccctgatgctggcgcagggcacggtgggcgcctacctggtgagcgtcctgaccaccctggagcgtaggttcaacctgcagagcgctgacgtgggtgtgatcgctagcagcttcgagatcgggaacctggcgctcatcctcttcgtgagctacttcggggcacgcgggcaccggccgcgcctgatcggctgcggcggcatcgtcatggcgctgggcgcgctgctgtcggcgctgcccgagttcctgacccaccagtacaagtacgaggcgggcgagatccgctggggcgccgagggccgcgacgtctgcgcagccaacggctcgggcggcgacgaggggcccgaccccgacctcatctgccgcaaccggacggctaccaacatgatgtacttgctgctcattggggcccaggtgctcctgggcatcggtgctacccctgtgcagcccctgggcgtctcctacatcgacgaccacgtgcggaggaaggactcctcgctctatataggaatcctgttcacgatgctggtatttggaccagcctgcgggtttatcctgggctctttctgtaccaaaatctacgtggatgcggtcttcattgacacaagtaacctggacatcactccggacgacccccgctggatcggagcctggtggggtggctttctgctctgcggtgccttactcttcttctcttccctcttgatgtttgggtttccacagtccctgcccccgcactcagaccccgccatggaaagcgagcaggccatgctctccgaaagagaatacgagagacccaagcccagcaacggggtcctgaggcaccccctggagccagacagcagtgcctcctgtttccagcagctgagagtgatcccgaaggtcaccaagcacctgctctcaaaccctgtgttcacctgcatcatcctggccgcctgcatggagattgcagtggtggctggcttcgctgcctttttggggaagtacctggagcagcagtttaacctcaccacctcttctgccaaccagctgcttgggatgactgcgatcccgtgtgcttgtctgggtatcttcctgggaggtcttttggtgaagaagctcagcctgtctgccctgggggccattcggatggccatgctcgtcaacctggtgtccactgcttgctacgtctccttcctcttcctgggctgcgacactggccctgtggctggggttactgttccctatggaaacagcacagcacctggctcagccctggacccctactcgccctgcaataataactgtgaatgccaaaccgattccttcactccagtgtgtggggcagatggcatcacctacctgtctgcctgctttgctggctgcaacagcacgaatctcacgggctgtgcgtgcctcaccaccgtccctgctgagaacgcaaccgtggttcctggaaaatgccccagtcctgggtgccaagaggccttcctcactttcctctgtgtgatgtgtatctgcagcctgatcggtgccatggcacagacaccctcagtcatcatcctcatcaggacagtcagccctgaactcaagtcttacgctttgggagttctttttctcctccttcgtttgttgggcttcatccctccacccctcatcttcggggctggcatcgactccacctgcctgttctggagcacgttctgtggggagcaaggcgcctgcgtcctctacgacaatgtggtctaccgatacctgtatgtcagcatcgccatcgcgctcaaatccttcgccttcatcctgtacaccaccacgtggcagtgcctgaggaaaaactataaacgctacatcaaaaaccacgagggcgggctgagcaccagtgagttctttgcctctactctgaccctagacaacctggggagggaccctgtgcccgcaaaccagacacataggacaaagtttatctataacctggaagaccatgagtggtgtgaaaacatggagtccgttttatagtgactaaaggagggctgaactctgtattagtaatccaagggtcatttttttcttaaaaaaagaaaaaaaggttccaaaaaaaaccaaaactcagtacacacacacaggcacagatgcacacacacgcagacagacacaccgactttgtcctttttctcagcatcagagccagacaggattcagaataaggagagaatgacatcgtgcggcagggtcctggaggccacttgcgcggctgggccacagagtctactttgaaggcacctcatggttttcaggatgctgacagctgcaagcaacaggcactgccaaattcagggaacagtggtggccagcttggaggatggacatttctggatacacatacacatacaaaacagaaaacattttttaaaagaagtttcctaaaataaaa

SEQ ID NO: 64 - protein, 655 aa, Homo sapiens; identical to SEQ ID NO: 60

SEQ ID NO: 65 - DNA, 146793 bp, Mus musculus
  misc_feature (1)...(146793): n = A,T,C or G
aacacccccagaggtgtgctgtctaggaggctccaaatccaggctagcagatgatgaagatcgtcacacctccagtcccagttatggccttcaccctgcacatctcttttacagcctgcatctgtctgcttctttctcctgacctacaccaacgaatgcacacccagccccttgagggtgcccctgcctgcccttgtatccagcctcctccatccctgcttccccatgtttccctgccctgctccacacttgcaggatgccccatggctggaggctcctgacactctgggcacaccccacagtgggcccacaggtgctgattttaccttgtcccaacccctatgttctccatctctctgtcactgcccatagcctaccccaggcttcaagcacacacttgttcacctcgagtaagatcaaaaataaactctctggaacctgttcaaaggctaatgtgcctcctctcctcattattgatttgtttattacagatgcttgggtaggatattcgatgaggctgccgtgccagggctcctttaacaatcctcgccctttgccgggagcaagctggcctgatgaaatcttggaaaggcttaccaaggtactagggagatctatcaatggaaaagttttggactggctagcttgtggtcctggcttaagcctatgctagccccgactccacctagagaccacagccaggtctcccctcctgtcttttcttccctctagtgataaacttactgtgggaatacaaagagacagttcccctgaaaagcaaggcagcatctctttcccttcctacctcactagggggcagctgaatgtaggaagtggctgtactgtttagaaagacttaggttgaagactcctctgataggactctagctgggtaaccccggacaagtgactgagcctctctgaaccggctttctcatccataaagcaaagcagttatgcagattcaaggacattgtgctcataaggagtataggaagtgttgtgcatagaagtcagtcactgctttgtggtcacaattgtcaccttattcattgtcactgtcatcctgcctgtcttcatcccaggatcataggaatgacttacttataaggcacagcttctggatgatccccgccccctcccagtgacatacacagcagagccctggggaaactatgacatcttcacgaaggtcaccaggtccctgccggcagggctatttggacatagaccttcctattctcccagcagaggctgtgcagggggaaggtggcttttgtcaaagggagacagggacagtgtttaggggaaatacctctggcctgtctttcttaagtcctgagagggattcttgtatttgagacctggaaggaggcatcatgcagtgtccccaactttggggtatcacttggctttcattggctggatgaacccatggagcctgcatgcatgtttccaggctgggcatctatgaccttcatctcaaactgcacattcattaacaactctgggaactgaccaggctgcagccagagctcagcagggccaggtccacacctatttcaaccttcgctcccttcccaacctccatcccggaactccccggggctgggctttttgttccctggttcccaggcagtgcagctggtgctgtaggctggggagggggcggaggacgaagcagaaagtctgtgggagggagctgtctcttagttccaaaggcgagcaaaggctgtaactgccccctcctcccaacatgatgcttcccctaattcccacactggtgtctcagcaaataaggctaatttttttccccatttgctcatgatagctacttaaatgtgtgtacgctgctcctagtaattgtcagagctgcgagaaaattagagcagatttggtgtattcctagttttgagtcccagttctgttggcagatatctggtctcgttttctctgagcctgaagaccttgggagtcatcccctcagtcctcagagagcttggattcctattctgcttgtagaggcaaaagccaggatggcttgtcctgaggaggaaggtcaaggtttgggaggaccctgatgcagaggccacagaaaatagtagaaagaagggaagagagggctttgatgagttagattctgagttgggctgatcatgcaccctttgttatgcagcttctaaaccatatagcaaggacgtttgtgagagacagctatgggaatacccatcaggcggggaggtgtctaggtcatcagctagcacctgctggaatgagagtttgaactgggtttgcttagggccgaaccacacactttattctccttagaaggaagaggagtgatgcctgctacgaatggaggtgtttccttgactttccatgcctgaggaatcatgaggtaagggaatagctgggtagcagttaaggagcaacacgctaatggaacgtcctgtaagctgggattagtggctgtcaagtggatggtgctgagtgttctcaggctgttttcatgtgtcaccatattaatccctgtgatccttagtcccccaagtgacagagaaggaagtgtcagatcagaggaacaaagttgcatgttcaaggcgacaaggcccaatatgttctcaatgctaaatgagtggatcagttatagaactaggcccgaaagccagtgttctacagtctgagccaaaggctcagggccaggtcagggggaaggtgtgatgcagacttctcagcagggagcaggtgctgagaaggtcagttgtgggaggtggtgatggcagagcaggagcctgggagctgagcaggagtgggaagggttggcaggggagtgtaacagggtatagtggggaccccaggagttgaggagggctgaattgggatgcatggttcagaagaaagctttagctgtttgcagggatgaggacatgtggtaaggatgctgagcctgggctgtgacccaggaccaggcagaaagtgcaccaagggtattgtttctggaatctactctttccagcctttttctgactctgagaacagagccacagagctttctgtgtctagaagccccctgacatttttcctaaccatggtgaaatctgtcgttctaggatgggggcagtagtgagctactccactcaagtcttccgttcttaacttctcacagagatctgtatgagctttcaggcagctcaagctttcactacatcaccccgtcccagatgtgcattgtcagttctggaggtaacagcaagggaggctctgagaagatacaggctgtcacaggtcctgtccttcctgcacttgctggtaccctcctggtccctgaggacacagacacagaaccctgtcatgtgaccggagagacagagaacagcaggtgtgtagagcaactactccctgaccttcctttgcagagacccttagcatgtcctcagcaatgctttgaggaggttgctcagtcagtacagagattttggcaagatggtgaaccccggacacttccattttaaagcctggagtagaaggactgcccctccggggatcaggaaggctcccagactccccacctctccctttgttattcttggttctcttttctgaagagagaggactatatctctggatgcccttgggttggattaatgagagggaaatggccagatgctcccaggagagctgcatgtagtgagtgtagagagtgggtgtgggtgatcctgaaagttgggcgtagcccccaggcctctttattcccactagcccctgtcaaccatagactgccatagactcttctgggaagcttactcctttggcttttgattttactcgagaaacagaacacagagtgggagacgcttctttcctgaatgccccgcccaccagcatcatctgtgggttgccggccacagtgagcatttccttatctgctggggcaggacctaggtgacacactggctggtggcagctaccatcacgtgcatgtgcagcccctcctccctctgctgcattgatttctcagtctcaccccactgttcgcagcttgcaatgacttggcaaggcttgtcttctataatagagaccaatgccacctccctatttagagggagcaataaacatgacaactggcatgggataggatcaatatctgttgtttagggagagatgcagccctgtgtactctgccttgggacccaggacttgtcagatgccctctggtagcaccaattctgaggtttagggatagagtcgcagagcatcatgggtgttgccagcatcccatggcactggcagtagggctcacaggcttgccaggaacttctctgcaactgtaagcgaggtgagcttgggggggggggtaatgagttccaccatcaatgggtaccagctgccgatacttctgggctggggccgtaaagcccttaaaactctcaaaaggagaaggcaaaagccagcacagtatgcttactggagggcaggcatggttcaaagcacctttctatacctggtgagttaaagacagttagagaagtggaaattgaggcatagagcctatgtcacagagacttataggaagtaagtttaactctcagcgacatgatgctatatttagtctctttatagctttccacttcttgggtccccagagttggatcacttgaagcctgtgggatttaaagccattgaagatttgaatgcattgccacatttggagtgggggagacctagaaagctgtgatttttgaagtatagggaaataactgaggtactccgctcagagaggtaggagggaggccagcaaccctgtaccttgtagaaaagacagtgggtttagcatcagcaccagcatggaagcttcatttcagattgaagactattggaggagcatggtggcttggaacaaggtgggaggctttgggtaacactgaatttcctgtccctgaggatgttcaagcaggggaggtctgggaacaggagtattctgctgagaaaattcctgttaccaagtggggtggctctgggtgagggaggtggtctgtttcacccaacacgggctgtgggtctggctttcagggtagctaaaacagggtgcagcctcacccagatgtcagtggaaggaccaagaaaaccatcaaggaatcttcttcaactgacaggagtaagagataaggacaccccccctccccatcaacaggtagcttcaaccccccagtaggtgtttgtctaacatcttagaacttgagttggggtcctgaactggggtgtcctgtgcttaaattttcctgctttgtggggcttactttgatgctcaacttgtccaccttcacagattcattttcggcatccagatttggctgaagttctctccttggcctccgactttatgaatagcattgcatgttctcagtctcttgcatgggcacctcttcttctagcacatgacgaggtctgtctcttccagcacagctcttcggaacaacaagttcttgggagcccaggcctcccaccgtcccctcaggtgttcctcagaactgccattcgggaccattgctcctttctcagctcccactgagaaactgggtcctaaatcggctcaggctagaaagctgtgcagcatagcttctcggttcagactgatattgtaggagtaaggcatagtgggtggagtaaggtgtaggagtaaggcaatatttagggtctggcctccatcccagaaatatggccactggctcagaagtgtggagccattggaaatggggatgtggcaaggtgaaaagggtgatcattgtgtgtgtgtgggataacgggggagtcttagaaagcactggttgtggggtcagcacactatgttttttttgcttcctgaatttctactcccttcctaggtacagggactttgagctgctttgaatccttcctcagaagttatgggcattcatagtctggagcggatttctttaagaaagagacatgtgcttgatttctgtagataaatggggagcagaaggagctccgtgccctgttaggcagccctgtctgacctatacggttggagatttccttggaacctttggaagcccttggcatcttctttaagcccttgcatctgccttgctgggaaagctttctaagttttacattttgtacagggaaacaaacaaacaaacgttgttccttcttgtcccttcttggtcagcagggggttggagggttggtgtgcactctccagcttcctcatttaggaaactccatctggcagctgagaagatggggacagattatcctgattgtctggatgctgagatgagtcatatgtccaggacacagaggccacatactgggaattcaggatgatatgacaagtccttcttccctgtcaaccaggacattctcagcaagatgacagcatggtttgaatgccctgggtacctgttgactgagaggagagtgtctgtcccagggactctgtcctagccccttacccatttctggcttactttgactgcttttctgtggcctgtaggcgtttcactgatagtggaagtttaaagatctcctctctctctctctttctgtgtgtgtgttcatgtttatgcacatgtatgtgggtgtatgtggagtccagaagttgatgtctggtgttttccttgccctattttttgagacagggtctctcaccgaatcttgctggccagctaatacctaacaccagagatcttcttgtctctacccccagcagtgcacactgctaaataaatccattttttaaaaacatgggtgccgagtcttcatgcttgtgtgatcaatactttattgatgacagccatcttgccagccccaaagttctgtttttgcaggcacccaagacactcatttattctaactggatgcttctgggaacctacatggaatccctgttcctttctaatgagtcccttcatccaaggcttgtggagaaccagagatgattcgagctgtaggggctctgaagctgcccccaccccatgcctgtcaatcacctaggggaacttcttaaaatgtttggtttgggaagtctctgatgaggtccaaggagttgtattatctattacaagctggcagggactgtggatgtcatcagttaaaggagagcaaagacctggttccatgtggtcatttcatggatttgaaagctgaggcccagagtgtaagtctatttgttcatggtcataagtagaactctgctctttccacttgcattaaaaaaaaagagccttcttcatttttaagctttactttctaagtgggctcagagctcctagcaccttaccttcatcctatccacggtcaagaatgaaagaccttttgtccaatcagagtcccttgcttcacagcctgaattttcactctctgaagaggtttccaaagttttgctttgaaacccgacttatggatagcatcctttctttgcaggcagtaataaaaatcgtccttgtccttaaaaatgggcggggcaccctttaagacacaactatgctttctccttgttggagctctactaaatcccctcaggcagtcagctattctgtctccctggggtagtctgggaaatgcttcctatttctcctctgctatctctcaagagaggccaagttccagtgtcctggctacaccttactctccctgcctctcagagaaccctaaagtcactcaggatggcacttgaagtgtcagggagattcccaatggacaaggacatcagggactggcctgaagccagtaggttctggtttgagagtctaaggctgtctccactctgtcccctcctgctggcgggagggcaaaatgccattctggggacaaggccatcatggcgacagggtgtaaaagtctcactggggcaaaaggaaggcagagtgtaatgagaagtcggggaaaatgccttttataggcatgctcttttcttttcctcctttcacccaagtttactcccagcaaaaagtgttactgcaagccatcgggtctgtctgtcggtggcactaggggcaggctggtggcaccgcaataccccttccccccatcttgcctgcaagttgcatgacctgcattggaatccacaggggggcgggggagaatcctttcagatcctggatgctgttgaattcaatgtattttgcttccttgcctgccctcacccaagctcggggaggagagcgctgctttcttctgcgtgtgaatgctgtagtgtgtctgcctgctcggattcccctaaccctttcttctcctttcccacagcaaaatctcaggctttctcaggaaatagctcgcatttggcatatttacatttgcattttatttttaaaacaatcctatcaaggcaaaaagcgggggctatacttctctccccatcaggtctaaacttgcctcgaaggctgcacctgttttgagcccctaccaggaaggggtgtttgtgggggagggaaagaggaggttctgtgccccccaaatcatccggagagagcagtccgcccaccccctcaccaggctgccagctcggcgcacccgagggctgagcccaagaagctggcctccgacggtgctggcgtggtgcttgccaaaaaatgcccttcgcatctcaatttcctggccgcttctttcgcatgaatcgctcgccctgggccacctcggttctccagcgcagtcctgcaggcgctccttccctctttctctccttctctggtccctgtttgtccaaggcggaacccataacgcaccgccaagaaggagcaataggctcaggggcactcagtgtgccatgccacgcagtcccctcccaagctgagcccagctcccgggactcttgattacccaaatgagtgtcattcagatctaggtctgcacgtctgcggccggcgtccctggctgcctcgctcgggttcctgtgcgctcctgattcccgtcactgtccgtgagcccgagaccctcactcaggctggggagcatcccgggtcacctgggccacgctcatttcgcttcctcctgcggaggagattgcagcaaaaccgggcagcacgagggccaaaaagtggaagggagaacgcctttcgtgttgctcagtcagcttgccaactctccctccccaacgccgaccctcggaatcccaactgcaacttttcctttccgtctcgttttcccctcggctgcagcgagcgggcgcgggcgtggagcgggcgggcagcggcgcggctgcgggtggcggtaccggcgagagccgagagccggcgagtgggtgggtgggtgggggannnnnnnnnnnnnnnnnnnnnnnnnnnnnnnnnnnnnnnnnnnnnnnnnnnnnnnnnnnnnnnnnnnnnnnnnnnnnnnnnnnnnnnnnnnnnnnnnnnnnnnnnnnnnnnnnnnnnnnnnnnnnnnnnnnnnnnnnnnnnnnnnnnnnnnnnnnnnnnnnnnnnnnnnnnnnnnnnnnnnnnnnnnnnnnnnnnnnnnnnnnnnnnnnnnnnnnnnnnnnnnnnnnnnnnnnnnnnnnnnnnnnnnnnnnnnnnnnnnnnnnnnnnnnnnnnnnnnnnnnnnnnnnnnnnnnnnnnnnnnnnnnnnnnnnnnnnnnnnnnnnnnnnnnnnnnnnnnnnnnnnnnnnnnnnnnnnnnnnnnnnnnnnnnnnnnnnnnnnnnnnnnnnnnnnnnnnnnnnnnnnnnnnnnnnnnnnnnnnnnnnnnnnnnnnnnnnnnnnnnnnnnnnnnnnnnnnnnnnnnnnnnnnnnnnnnnnnnnnnnnnnnnnnnnnnnnnnnnnnnnnnnnnnnnnnnnnnnnnnnnnnnnnnnnnnnnnnnnnnnnnnnnnnnnnnnnnnnnnnnnnnnnnnnnnnnnnnnnnnnnnnnnnnnnnnnnnnnnnnnnnnnnnnnnnnnnnnnnnnnnnnnnnnnnnnnnnnnnnnnnnnnnnnnnnnnnnnnncccccaccccacccccctctcctctcctcctcctcctcttttttagaagcagcgatcggagatggatgtctctctttgcccagccaagtgtagtttctggcggattttcttgctgggaagcgtctggctggactatgtgggctccgtgctggcttgccctgcaaattgtgtctgcagcaagactgagatcaattgccggcggccggacgatgggaacctcttcccctctcctggaagggcaggattcagggaacagcaatggggaacgccagcatcaacattacggacatctcaaggaatatcacttccatgtaagtcaggcggccgctacccagcccgccccccacccccgccccagcttcgcgtctccgtcttgcccgcccgcggcccgggaactggccctgcgctccccagctcgcctctgttcgcagcccgccgggtgcgcatcaggctcgccctggctcgggagatgctgtagggctgcgtgtttcaggtgactccagccctagccaggcgtgatttgatgatgctggtgggtacctctccctggagaggacccttccgggcggagtgcacccgggcccagctcctgtccccgcccccaccctctgcctgctcgtttcgagggtgcgaattgggttctatgccccccactaaatagcaacagtttggccacgctcaagtggaataaagtagaggcgtctcgtttccctgacaggcggtggcagatagcggcggcagaggcaaagcttagcctagccttggagggaaggtgacagatagggactgcttgagaaccaatcgggattttttaaaaaaaaaactgtttccctttggagagagcaaaacatgccaataagtaaacaagttggaagctggcttctcccgaggagacttcggacgtgttctggccgtcatggacgcctacctctttgcttttcctcccccccacctcccgccgccttctccaaccccattttgggcatttccgagacatccccccctttcccaccctcatctgcatctgggcgcctacagaccctttcctggcttgggcttccataactgcccagggtaattctgagtcaggttgctggaggcaggagagagaggacgacctgggttttgggaaggaaatttctttcacaattctgcggttccttccccccaccccctttctctcaaaaattgaactctgcgtggcgtttggctggtttgccccggctgagtgggaccctgtgtagtggcctgctcttttcttgttgttgtgtttctttggtagggatggggccagaggcctgtgaaggagtgaaaggaagagtcagggccaggagcctgcatagcctttctttcattcttcattcttcagccaggtgaccaccacccctctgacctctctgccccaggaaggagaagggtgtggatagctcttggatgctcggagggcagctcattggtttttgccccgtgctctcatcccttgggagccccaggactgactaggacggtggccaggctctgagggagacgtttagggtagctctttgccttggggacggactagagcaagaagggacccagtgtgctgtggctactgccctctcagtgtccaccccctcccctctttgctccaaccattgcctcaggactacaaagcctgaaggaattggagtcaggctctctccaaagcccaccagttctcttggtataagagagaccagcttgtgttcttgcagcttacactttgagggagatgaacagccccagaagatgtccccgactcctggagacaatcctgacccatatcttagctctgcctttcattccttactacctccaggatggtcaaggatgtccagatagacagcaaaggggtaaggggaggggagaagagagcaaaggagaagcctctacccacttggaggccagtgtctgtccaggagcaaggtctggaggaatatgtttcagggaagcttggcccctggattgtagggatggctgcaaagagcttagtggcctgtgctctggagttgggcatggagattttcaggtgattggatgtgccaagggctggagagtttgggagccagtgagctgtgtctgccttgttctctgctctaaggatgtgtatgtccctgggaaccctcagggaggcaggattggtcacaatcagataggctctttatggtcacgaagaggtgtcacacctctcaaaatgaggtttggggaagcggttctatggggggggggagtaggattagttgttccccggagacattggtgggaggaggggacacagttggcctcttgctcctctcctggcattagaggatcccaggagagtgcctgtggcgatctgagcagggagactgggagccgctcagtgggaactggactcagcagccatcaggactctctcctaaacccatctgacatcaaagagaaagtggtagggaaggtcagaggtcaggggttagatgaccctccctcaccccatcttccccccagtgtcctgttatgcctgcgtctggtattgactaaactcaagaaggggctcagactcccactccagaggcaaggagtcccgaggagggagaggattcatgttcatccagggaagaacatgcccttgttgctctcttactctttaagacatggaagattaagggaaaaggtagcctttcccaagcccgccttccatcggatcttagcactgaataatgggctatacaacatatatcccaggtccccaacccaaggcctgctggtagaggtggggcttaaagaaagagaagcacagggcaggagaggatccaaccctaggggggcctgggaaagtgtccttcagactcgtgtgtctagagatccagggtcaggagggggcatcgcctgtcagcctggagctctgggtgatggcgtgcggctggacaaattctaggcatggagagacggcgtctcctcaggttcttctcaagtatccatcctccgagagtgaactctttgtgctgagtttttagacagacaaggttttgtttccttgtggccccaactcttgtggtatcattctgagtggtggctgtgcccatccagagctttgggtagaagagaccttgttaatataaggaggaaatcagcagcaagcatcagggcagaggggtagacctcgtctccatctcatcatagtactccaaagagtccatagctgcgccaaagggtccttcctgccttctgtttgttccctttctgttcaaaagggcagccctttctttttcttttttcttttttttttgctactgtagctcttaatacaccataaactcttccagaagggtccataggcagccacacccaactagactctgacgtcacaaaggcaggagggtggtggccaagatggtgtgttgtctaggctgcctccttaggccgggcctacagggttgtgttggcttgggatggcgtgtcctttgaatggtggaaagaagatggaggtagagactgtggcatcgctgggtcagatgttcttgaggtcgctagcctgggctcgcaaagaccatgtactctggactggggcaccgagccgccatttgtataccagcctgaattgccacagggttccaggtgtttggtgggcttttagtttcctgtatttccccttcccctggagacactttgcagactgaaggggtcacctgggggctctgctctctaggcttttcggttttaaggaatgggtgggtgacccagccttggcaaaggtcagtgagaactagagtcctagctaacatatgaatcagggctgtaaaggccccacagcaaagtattaagagccccaggattggggttaagcctaggagaggtaggcagagcagaaacaggccttggaggttctacttgaaagcaagaggtaataggccctgggtagagttatttccaggctgaaagctggggcggtggacttctttggtggcaggattttatactgaggccaggttgttgttgggtgtcagcatctcccatgacccagaatcctcagcttcagtatgcccagcaggttccctttgggggccaaggacattagctctgagactacctgggaactgagaacatgatagtttgggcaaatccagtagaaccctgactatagctttgagagttcttgtatggtgggcccaggagggttgatctgagtctgggagattccttagggtcctgtaatgttccaattgctctctgtgtcccgtcttgaagccctaattgttgccctgcctaaccgtgccagctgacccttcccatctggaaaggatgctggccccaactccagatgaatcttgggtacatggtatgtgattatccatggccctttctgtgtatggcccttaccagtgttgtgacattttctctgtgaccaggggtctccatctcaggttctccattgggaggctcttacagggctgttgtgcctttgggggtctaggaataagaaaacaggatacagtgagttataacctggatttcccccatctgccttgagatattctggagggctgcagccacttcgaacctgtaaatctaactgtgaatccaggccatgggtcagagtgtcccttccaacatggatgtctgccctctcagcaccagaaaacatcccccaggaaggttagcctcttttaagggtctctcttgtggaattagaacggccttgtgataccactaagaggagggcacaggtgagtccaccctggatgtgagccactgtcattctttccttccccatgtctagaaatgtcaggtcaaccagaacttggctgaatttgtgacacaggatacaatttttttttcccattaactgcctggaccaaatgtgtggatctctagattgtttttagggtccttagcctttccttagaggttgggcaactgactctatgaccctgattcccagccctgggctcaggcctagaagagatgtccttgctaagatgtcatctgtttactggagggaggcagctcccactgcgtatgggaaaatattagaacatctatcgcaaattattctgtcgcctacaacaggagagatttaatatttaatgtatggattagagatatcccagcatatgataatttaataaatatgagtgtttgggtttgtgagatatatgtttttattgctaaatcatgcataagcagaacaacatggtgcccctgttgcaagtgatgcacattgcatttggaggggacgggacaggagaggtgacttttgaatctcttctcccttttactcagttcttggctgaaggcatttgtgagccagcatgggtagatgggatataagatgggaccgggctgagtgggcccaggagtggttcctttctctatcataggtttcaatgctagtcctccccccaacccccgccaggagccaggccgtcattcaaatgatgccttctgcagtggacacatctccctggagttgtccaccaggcatttgtatcactagtcccagtttgcagttgctcagctgttttttttgcaagaactatttgagtcgaataagcagggctgattattcccattttacagattcatcaaacaaaacaagagcagaactgtggtcttgggggattgagttaccatggagtttccaacagaaaggatgagaggtgttgggagagctggtcgctattttccagtgtacctcccctgttggtctgcttcccgtggctccattgttcttgggctgaccctctcattagctggataccctattgacctgtttccctaaagggaaatgtggaggactttctgccagaaagctctgttgaccaaagagcagcattacagaagcactctgttcttagggacttggaaagggtagctgaatgttgtgtatctggtccaagcctggcttggatggagggtatgtcacccagatctgctggtgacccagagtgatagctaagccagagtcaactgtcactctctgagccagactctggtctggcctctgctttggaaagcataagtccttgttggtggccagtcatgggcgcagacttccttaggatggcctgcatcatcaagagtgaccactcaagtggttccctctagtgagagttctctggaatcttcccccactggaggagggatcaccagaacttttgcttctcttgagtgtaaggtaaggctccccaaagttggagtgagagttggggggctggaagactgtaggcatggccttcctcatgttcccaagaattcagggccttgagaacaagggactcagttgggttgcctagctagagtattgggaaatttctttttccactgtcactcccaggtacttggtgtggcctcctgcactaccctgcctcctgtttgagggaactttgtcaaatccagagtctcctccattcctgtgtctccctctggggcaatgtttccaaattcagggtccccagaggcagcaactatgtgaaagctggcagccccagggctccttggagcctgcagcccacgccaattagaaataaactcagagggctctgctgagctatttacatggatggctggggaacggggtactcagcaggtctgggagtcctttcccctggcctcaacttctgtctctgctgcctctgcctggcttgtactgccacaaagggtcgtctggtttagagtggttgaagattcaagattctaactccaagcagacatcattagacttggagatctgggcaatttctatctcccactgctctacccagcctggcttctctctagctatggacaaatccctttgctcccatgggcctcacattccttatctgtaagacaaagagaactaacataggagagcactgttaaaactcagcgtccagtcacagcctggcaaagagagaaccgtgatcacgtgatcactactactacgagccagctcttactgagctctctcagtaactgatcacagtattaagtactagataattgattatagtaaggactagataagtaatgataattatcatttactcaacacttactgtatcccagaacgctgctctaaccttgtgaattaaatatacactagtcttgcttacagatgggaaaactgagtctaaagaaggaccttgatttcatatagcctggcattttaaacattctggcttttaaatattaaggtgattgtctatacccttctgtatgctgtggatacataaatatatgcaattacatggccaggtaaacaggcacacataggtgaatatattactattgtgataaattaatactaaaataagaggctggacaagaaggttctcaaggctttattccctatccttctagttccctgggtgagaactaccctggctggtattttaggaaaggctggcaggttgcttgtgaggaaggtgttcatgaaacaacaaagcctcagacagacctctaatggagacaagaggctttggtttctctgctggatctgttcccaaagtactgtccttcctggaggaggctgtgtcccaccctttttccaggcacccttggcttccccacactgtcctggcctctgagatctccagaccccacattagcccaaggtgcaagctgggtcaggcagggattctgggaactgcttgctgggcagtagtcatcccctctctgggttgaaggccaatgctcctgatgttcacgaacagagagaacctggatagaggagagagggctgggtcatgtctcttagagctttagggtatcagaactgtctttggctacaagcagaaaggtgtgtggtggggaatttgaagagctggtcagctagagttggcagctgatgttgggagtatcactcctgagtggggaggtctaggtgttcccgggcctccattttactgtctacataaatcagtagccttcactacctccagtccctgcctcttgctcatagatgtgtcatctctctcctgtagggataagccaggacctttagagatgacaaccattgttcccccatggagacaactggagagtcctgcaaaaacattgctgggcaaaccctattgctgctgctccatgactgtatgaacttgctacaccatagaacctctctggcttgtttctactcttgcagtggggttagctaactcgtcttttctcgcagggtcacattattaagtggtatgacagacctccttcacaggttctgtgaagagtctaacgctgtgttggttgtttccatttctggatgactgggaggacttgaattaggaagaagatcaagactttgagccataaatcaggaaaaggaggtggagaataatttgggctagatccaatttttttttccccaagaggaagaacttggcagacagatgaattgatatgtcccagcccagtgagctaggagcacaaagcagacacggatgctgggccttgctgccctaggtctcctcccactgccctttggtgtctgtaccagaggctcagggattgcagggggcaggaaagattggtgagtttccctggagagggaaacgaagggagcggtgttagactcgcgaagtcctagtacaggcttcctgaagcagtacttggtgctgtgtgtgtgtatctgggggcgtctttgtacacgcacaagtgcctctcctcagcgttccctgcacatcacgtctgaggttgctgtaaacaaaccttaaagccgctggcttattgcttgccgagattgtctgtgtgtagactcctggtggccacaagagggcagcatgatgcacgagtcgattcttggtggtttgacccagggagagctggagccgggatagtggcaagtcgattgccagcctgggcttttggatcctgccaggagtcagggctaagcttctggcagggagggcgtctctatagagccggccctactctggttctatctgtgtggtctggggatgcgaggctcccaacctgtgtattttggcttaggagccgctagctccctgggagaaagctgtagggagcctctgatagagggaacatcctctcccccctcagctcagtctcagagggcgcatagcttttggcttagacagtggaaatgaactaaagggacatatgttcctggccaggaaaatcccaggcttggtgggacacagagagttggtagtgacactggaatcagggtcttggaagaagtgagcttttactttccgactgctcaggctgttggatctgctggtcagagccaagtaggtgctcagttaacatggcactctggctctttctagaggtgggatcttggtggcttgtgttaactcctccagaccctgggtgaatgtgcatcagtgggtatgagaatgtcttactaatgggtcattttgttagtggtgcctgctgggagtgagatgcattggcccttcatcattccaggcaggtcctgtatttgagcaggacgttggatatcatgtgctcttgagtccatctgtgacttgttaccagtgctggaagctagatcatctgctctgtgctgaactggtgggcctgggacagctcacagctgcctggcccagggatatagatgaggccctctttcttgtgacccatctttgcccaccaacttctttttgagcaatttttcaaggccatgtcactgagaaatgtaggagtgggtttgacatttacagtactctcagcgatctgagtccttcccatgaaggaccttgtattgacagcaatgacaacatgacgtttctgattgtgaccttgccacttctctgtgggaacctggactggctatttaatttctttctttctttctttctttcttcctttctttctttctttctttctttctttctttctttctttctttctttctttctttctttcttccttccttccttccttccttccttccttcctccctccctccctccctccttccttctctctctctctctctctctctgtttgtttctttttttggtcttttcctcatctgaaaatggtgatgataaagaagagcccagggttgctcgtaagattgcagtgaggatgtctgtgggatgggaaaggctctgaaagccgttttcctccctcttcccatcagagcatcccaggctggtgtcatcacaagcaatggtattttcaagcccttcatctgttcttcccacttctggtatttcccacatcctgctcgttttacacatcccaacagattcatctcctcttagggggttacaagaattcccatgctcccagcatttctgttgtttttttccccctgagaggcagctcagtggctccaagagatgtggggttttgctcagtggactttcctgcctctgttgtctttggacccaggtaaacccctcaatagctctgagatggaaactggatcagttgggttgtgaggtgcctttcctggaatgggtacccagagtctggctggtgtgtggaccttgtaggaggtggggagcagtaacattttagagatatggattaaagaatgttgtgagagtagccagcacctagaactagatgcaggaggcagtaggagagtcaccatggtgtacattttaggaaggggactaagtagctgaagcatgtgtctgtcaccaggacagggagagtatggttcctactgatatgacacctgcctgacctaccaagtgccagcatgttccaggcaaagccttcgccctgactaccttccccatctccagcaccaggagtttggatgacagaaacctttgaccaggttaagttaggagtacctagcctctggacaatattgtcccacacggcttcattgctgtcctttcccatatcatttgggattcaccagtaggtttcctgttggttactgtaatcaaatcagcttgccagccacagaggtgactccaggacttgccctggtaggaagagtttagatattaattatggtagggagcaacactaaatccctccagcccaaacataccaatcaagtatattagcttcagttccatattaagccacaagagggcactagaccacgatttctgctgtgtaggtgctatgtagcctattgtgattgctcctttgagaactgtccactgcacctggtctcttcccagaagccagcaactttgaagtcatggccaaccggcttgatttaactgcagctcaccacactgactgaggtttcgagggaggtctatttgtgcagtgcaaaaaggtcattgcatttggtgtcaaaccaagggttccagtttgtgcccttcttgcaagcttaaatgatgaatgaagttactttgtttttctttgtatgtttttctccccccaacctgaaaggtgagatgttaccaggaggtgtggttgtgagagaagctgccacagggattaaattgcatgatgtgtggaaagtcttgaacacagtggattcccggtgactagcctgactttttttaggaagaaggataaagttaggtcacaacccaggaatcctgtgggcttgatggggtccttttatctgcttctttgacaaatattctgtggttccaattcactgggggagcagcgctatgcagtggctagaatggagagcagcaagtattgggcaggtgttggacgtggttagagtcagattgggacaggctctcggccaggggataccagatttagaggatccattaatgggctttgcactgcttaagtttctgactgctgcggattatttgctgaggatgttagcacaatgatagctgttagtggtgttgtctggacctgtaggaggaagtcacaagtggactaactttattgtcaccaatcaatcttggcatcttggcatctaatttcaggcctttcttggtgtttcctcgggtttctctccctctctctcccttcctccctcttcactacctgtctgtggtggatgttcctatcttgggggcatgttagtacattggctttgccttggttaagagactggagggtctgtggtcagtgcatctatctgaaaaatgggagctggcacggttggttagacggtacttccagggtgattgtatattctttgcttggtgtgtgtacggtgtgaggtggggtcaggtaacaaccgtgtattaatgacggctaaacttccagttttgctgttgatgcacacagcttggaggaggtcggggtcttctctcagcaaagctgaggctggaacagaggtatctctggattcatacccctcttagcctctttatggatgtacctgagactcaggagggaacattggcaggcatgcaggctcaggaagttatttaatatcagctttgctccagattgtgtttctgactccctgccacctcttaagtggcagtcattttaacaaatgtggtgagaagacactgagtgggaaataacatgaaggaagggaagagggacaaagctatggtgggggaggagcaaggctatggtgggaggggcaaggctatggtgggaggggcaaggctatgggggtgaggggcaaagctatggggtgaggagcaaggctatggtgggaggggcaaggctatggtgggaggggcaaggctatggtgggaggggcaaaggtatggtgggaggggcaaggctatttgggtgaggggcaaagctatggggtgaggagcaaggctatgagggggtggagtggggaggagttatatttcctgggcagacactttgatttgaatgcacccaggaagaagtagcatggaaggggagcaagggcctctcagttctgagtgggaagagaactcccaggaagtgtctgggtcttagggttgggggggtctcctggtatacctctccctcattcacagaaggttcttgtgttctattggagtgtctggctctgtctttgggatagatgttgtgactgatagcgatcatctttccagggacagttttcaaagtacacagcagacaaagagctcaaggggcctgatgttgacactttagcccactgtgaatactaggctgtccttgggcatagacagtgtggtacccaggtatccggcactggccttgttgtccagacccttctagcaactgtactctggaggaagagtagacagatgttccaacagggccagctctgctctgccaggtgtaggaaacagaaaagaaggagtccagtttttgtcatgccagcctgtggcaccagtcacagacctgacacactgctaagccctggggtccaacttcatgaaaataatcattatttatttttccccattgaatcttaaaattagacagatgatctgtggctcttcagaaaggagatttcagctaatgaaaaaagttcaaaggaaagtgtgtgtgtgtgtgtgtgtgtgtgtgtgtaaaactatggattccctgaggtagacagggaatgatgttcctaaactgaggtttagacattctccacttgcctgccccaggtcccttgaatgttggttatcagtgttgtgagatatcaggttattattacttcttggctataacgttgatccattggtcctgctgttacccacagaagccttgtggcattttaggcagacaaggaaggtgagttccagttcttctgggtcacactctgtctatgtgaagcaaagattaggagacaagtagtttgcttagaaggcaatcccaggaatctagaggagagaggggacacgaggacaccgaagacctgtgtgctctcgggtaggcagatgttccttgtgcttattaattctcttatctggatatttactcatcgtgagggcttgtgatgggccagtcgctcttgtggaagccatggagacgcaatgcaagggacatgcagacagtttgtattatctctgttgttttaggatgtacaaggttaaacatcaactctctaggctccttgcctttatccctggacactgccacttgggatttacattaaaggataagagatgaccagaggtggccaggccaatcctcttagactctcagtggcaaatttttgaaaagaaaaaaaaatccatcagcaggtgcgtggagtcagaaaaccaggtgggtggaggtgaacctaggtgagaggtgcatagagtgggataagagatgggtctcacgtgctattgaagaatgggactccagcgttcttttccagcatttaggtacactttgtagcctgagtgaatctgagccccccaactcctctgcaccttgatcccagaggaacaaacttctcctgacctccatctacgattagttttgtggacttagattccatcctcctgaaaatgactatttcttggtcctcgagctccactccagggctgtgactgctggcccaccagctcaactcctgttctttgtacagtctgggctcttctgtcctggggctttctggacagtgttcactctatcaccctctattgtgaatcgttacctacccaggggggtcaggggacagatgatgttgacatggctcctctgttctatccccgtagtgagctcctaagagtcctataaattagagcaggctcacctcatgtctccgatttctctacaagtcttctcaggttggtgatgctgcacatgtgtgcctgtccctggatgttgggatgacaaaatagaactttcattgctttctatacttccatggaccctgagttctactctccccttattggaaaaatcttctagggaaatttgaattcatgcacagtgatagggaccgtgttccaggagcaattctaaggctaagggtgctttcagttcaagcctttcccaggatcctgagacagactctcgtctagccatacacccctcctctgcagagctcgggatcacaagtgctttgagtctcagacagctttcagccatgagaatatttgcatatatataatgatatatcctggggctgagactcaagtctgaacatgaaatacatttatgtttcatatatgcctaacgcacatagcctgaaggttatatatactacatttttaataattttgttcatgaaccaaagtttcctcatgcagaatttttcatagctggtgtcatgctagggatccaaagtttatgattggatcattttatatttcatatctttagagtaggtgcacatgcttgtgtgtgtgtatgtttgagtgtgtgaatacatgtgtgtgtgtgtgtgtgtgtgtgtgtgtgtgtgtgtgtgtgtgtgtgtttgcacaggcatatgcaggatttctgataccaaacatctgcttctgacctgagaatttttagtgtggaggagcacagactgcaggaacatagccatactcggagtgtgactgttcactcctgtgcctctcaagttctacagtctagagtgagctcaaaggtgctttcacattttgcataagacttttatgaatagtttctcagactgttagaagtcttaatgccgtcctcttcaaagaacaccagcctacttcctaacaggttctgacaggattttattatggtaccagttttcttctgtttcttccttccctttgtcttgtacccgaatccagcttgacctggcccacgtccatacacctttcctctcagggattcacacaacctgaacccacctagacatagatggtctgatgtgtgtagccaagggataaaagagaattgtattttaaagaattcccttcctcactggagaagcaggagaagccactgtgtagctgcagttcgggaggcttcattggctccaaatgatgataaagaatggagttctgtctgcatttggagcctttcaggttagagcacatctctgtgatgtttgcctcccatgattctctcagaggaatcctggagtccttggccaacccaaatgaccattccctctccattcccaagcgtgtccaacccaggctgttggggtctggaagcttctcctgactaagcagatctctggtcttccttctgctcacttggacacttcccatctctccagtctcaccttcaagaatctctttgttcattaacaacaatggatttatgaaattcttggacaaatggaagtacctggaggtacttagtgaggtaacccaatcacaaaagaagccacttgctatgcactcactgataagtggatattagcccagaaacttagaacacccaagatacaatgtgcaaaacacaagaaaatcaagaagagggaagaccaattggtggatacatcattcctccttagaatagggaagaaaatacccatgtaaggcgttacagagacaaagtttggagctaagacaaaaggatggactatccagaaattaccccacccggggtatccatcctacaatcagccaccaaacccagacactattgcacaatgccagaaagattttgctgaagggaccctgttatagctgtcttgtatgaggctatgctagtgcctggcaaatacagaagtggatgctcacagtcatctataagatggaacacagggcccccaatggagaagctagagaaagcaaccaaggagctgaaggggtctgcaaccctataggtggaacaacaatatgaactaaccagtacccccagagcttgtatctctagctgcatatgtagcagaagatggcctagttggccatcactgggaagagatgccccttggtattgcaaactttatatgctccagtacaggggagcatcagggccaagcgggagtgggtgagtaggggagcaggatggagggagggtatagggaactttcgggatagcatttgaaatgtatataaagaaaatatctaataaaaaagaaagaatctctttgttctccagacccctggttttggattattccctctctccactcctgggagcacatagtaaaagcagttgctatctgttgactgctttctgtgcccctgccacagttgatctagtagtagctcacttaatcaacaccataaccacatatgggtggattgttctcattttgcagatgaagaagtaggagacaagagagatacacactgttgtgaggctatcggtatagatggctgagaaaattcagacccaggctcaccgcagaagctgggctcccacatttgtcatagcagcacattcaaaggcaaagtggcgggaaataagctgagacatcaccaggagacatttgaatccagaagggagtcgtgtcatcgtgaagtaatggactcctgtaggaaagaataaacttggtcatccatagagtaacggcaatctttcacaaagcatgccaattaaaaaccactacatgctatatatgtgtgctggctactttcatgtgacttgacccaagttagagtcactggagaggagggaggctcccttgagaaaatgcctcagtaagatggggctataggaaagcctagagggtatcatcttcattagtgattgatgtgggacggtccagcccattgtgggtggatacacacctgggaaagttgtcctggtttctacaaggaagcaggccaagcaagccatgggaagaagccagtgagcagcactcctctatggcctctacatcagctcctgcctccaggttcttgccctagttgagttcctgtcctgacttcctccaatgatgagtagtgatgtggacgtgcaagccaaacaaacgctttcctcctcaacttgcttttggtcatggtgtttcatcatagcaagagcaaccctaaccaagacgatatgtaaaagatcaccgtgactaagagcgtcaatgtactgtttatgatcacagttatgtggcaaaacaaggcaagtggtaaatttggcataagccagtttcacaacttggtttcagggacggagaggaaagcagggtatgtatagggtcttaaggttatttagcttgttctcttttaattttgtagtgctggaaacaaaatctagtgttttgagcatgctaggtaagcacactgtcactgtagctgcatcttgaaacctgcttttcacttctcaacttgaaatcatgtctcattaggttgtctagactggtctgtattccaggccggctttgaacttgagatcttcttgcttaccctcccgagaaatggcgaatgctttcactctgaacagcctggcttctcattgtttatcttattttatcttagcacccagaaaatgacaatgctcaaggtgataggtaggtaatgctttcaacctataatccttcacttttcacatctgttaaaatagaaccctagaaccccgaaacaacaaaaacattacacccgctatgtctgaaatttcaaacaaaagtaacagtgaatccactaaagctgatatcccatagcctaagtgacagaaatgtgtttccccatggtactggaggctggatatccaaggtcaaggtgtcagaaggaccatttccttcccaggtttctgtccttggtttgcagacagccaccttcctgctgcatctttacatggtcttctcttgataaacatctgtggctgagaaggagggggcaggcatgtcatgtaaaaagcctagtgaatggggattttcatagagttgatggagaacctacaagctcccttgggacacacctatagaccagtgatcgggaggtggaagcaggatgatcagatgtttaaggctagctttggctacataaaaggtttagggctagcctaagctacagtcttgctgtgtagcccagtaatcatcttacctcaggctcccctatctggcttcatggtacttccctgatgtatttcagagaaatggtgaaatgttagtaaatgctgcttacatacttgaacatgtataacatctagctaaagtgtggtagtgttttaacttcaggcactgttaatatccggtgaaattcttacatcttcagtgtctattctctgagtcttccccaatgcatgtgcactgtggttctcacatccaccaagatacaggacactaacaacctccggaaagttccctcatgccccttcctagtttgtttctgccaccacctcttcgagagttgaccactgttttgagcttgctaacaatagattacttatgtctgacccacagcttcatacaagtggaatcatgtaattcccactgaccaagaatgatgcgctgctgagattcagccacgtactgtagataacagtatctgattcctttttatggctacatagtattatactgtgtggccaacctggatttatctgttctgtttttggaacccgtgggctgcttctagttttggacttgtggctaaatccactatgaatattcttgtgtgagccttttggaagacatatgtttttgtttctcccaggtcctgggatgtacgttgagtatgtttaacttcctatccatcctggcctctttccttaggagtcgtaccaggtgacatggttgtgacaagtggttgacttgggttaggagaggcttgttcccgtaacttctgctgagtctttgggcccaccgagtctctgacttgcagataagtagacaaagacagctctgctcaaggccacccattagcaaaatgacagagctgggattcattctgataaaattctgagagttgctgggaatacctgtcagcattcttagcccaaggatagatacactggtgttcttgaagcccatttggacactcttgacactgggaaaccagggccagactggcagtaggtgcttcttgaggctattccccctcaggggaggtgcattccagcctggaactgtacacccctatctagaggccaaagctggatccatatgtatcccagaaggaagctgtacaagtcccctgggctagagtcttcttccagtgatttagttgggagtcctatgggaaagggcccgttgttaatcctagggaaacaggaagtctcagagggttttctctgttaaaggaggtgattttgctttaacctaagagatgagtataggctgggcagaggagggtaagcattcagggattccttaggaaggtccttcatccagggggaaggtacatggaaaacatttctaggcgatgagagagctaaactgtaacctagagaatgagcagacattagccactcagagaggtcagatgcgatggatgctattttaggtagaaagaaaactggaataaagagaattgtggggagctgaaggtagctcatccaggctggagaagaagggagcagacatcacgttcagcctggtgactatggccctctcatagagaagtgtgagtgccaggtttggtgggacatgctataatccaaacagttggaaagtggagaaagaagggtcaagagtttaaggctagccttggctacataaagggtttggtatcagcctgagctagatgaaatccctaaacaaaaaacagaacaaatgattgtgagacagttgaagaatggggtagggtcttgtttgtatatctctatccctctagtggttaggacatgtttgactaagtaagagctaggataaaccatgaatgaacagagcacctgctgggagcaggaggcctggggatgtttgcagggtcagggaggttgagaggcatgctggaatgtctaggggggatgtgctaagggatgtctattttctcttggttggaagaacaggcttcttgggatagtgcagtgatctctaccaggttttccaacacctggcagtactttagaagacttagctccatctgaaaggcacctaggggcatggtgacagaattccagctcaggaacactacttgctaaaatatatttgtttattcagagatttaattaacatgtttaaatattaaagagtaaacaaaatgtgtctagtgggactcaacatttaccaacaggagctctggcttatttaattatttgtgttttccctgccctaagactcaggtttctggcttcgttctaggcagacagtggggagtgtaggctcctcctaggacaggacagagaagtgagcctaggaagtaggaaagtagggaggagcggaggattgggaaggaaggaagcagggaggaggagggggcggaaggaaagcaagaggttttctcaagaagtggagatctcccagccaaggaagccaatagctggtatttatttggtacaaagaagagagtgtgggtctctatgctttcatggattgtttgctgataaagtccaccagggcagtgggagcagagacaaagagcaggggccagtatgttcggaaaccctgggagtgtgtagagtgaataaccacagcagaaccagctatcaggaggcagatcaactttacttagggtgactcaagtcttataaagttttgggggactgagggtgggaacatccagggtggataaaggtcatcattggttgagggtttagggtacccaaaatgcccaactagcatggggaaacatttcaggaatggttgaagatgttcttatcaggagaaagaaaatggatcctgtaatctaactgagtctatgtgatattcctcaggtagaagtgtgtgtgtgtgtgtgtgtgtgtgtgtgtgtgtgtgtgacttagaatttcccagacaaggtcagagaaggggaagctctgttaatggagtgtgccatattgcgccaagcccagaggcaatccagtcatggtggacatcgaccttaattagcagagttttcccacagagagagtgagatttgaggtctggagagtacatccaaggtgcaaaatgagatggctggagacagctgagcattcttggttgcaggaggactggagggtcttgagataatctggtgagataccaacttgagtctctctgtgctgattttatgacagcagtgtctctccatgattcctcaagagcctgcagactggacagtggctggctggacagcagctggagaataattggcattgcatcactatgttgcagacacagggagggaaggttccccagccagatctgcaggtagaactcggagatggaggatctgcattataacatcaccacaaatgaagtcctagctgctgagagattacacccggggttatttattggcaatgtgctctatggttttaattttttctttttgcttattcaggctttagctccagaggaaaatagcctggggtggctccgaaatagattctctctgccccattaacttattcagtgagtttaatggtcctttctcccctcagccttgaagccatcattaagaggcagagatttataaagcaaagactgagctttagtcaaactttgattgtgggctgggggagagcaaggggtccaggcaactgggcaccctctgtcccgatgatatgggtgtggacatgagcgttaatgaccttaactttccctggctctccaagggcagggtttgccatggattgctctgaagtggctctgcagggcacggagttgagtgtcttctgttccattttatgggacattccttagctcttatcatagctctaggtcatagcatctgccaatggtgtttacagaaaatagacttctcagaagtcagccttcagagcagttagttcctttcaaatgaaatgacttaaggacagctgtccaacttaccagtgagaaaatggctggtcagtcaaccagccagccaaccaaccaaccaaccaaccaaccaaccagcaaaacccaaacaaaatcacaatagactaaaagcctgagtactggatggtttgctaaattctccagaactttccttcaagagatataattattgaatgaaggtcaagtcaaactacattacctcaagattggtcaatccagctcaatccagttcaccacacttgacttcttccctttttgtgcatctgtggggtaaaacgcattctgctgaggatacaaagtcaggtgagttaggtccaggctgatgagacaacagcaccagcaaagagattgccccagagcagtacaacgtggggattaggtgacagcttgggaagctgaggaaagagacaatgtgtaatttggtgcataggtaggatctgggtagggagggaggtgaaggaaggctgctttaggttgaaggtgcacagaaatgatgggtgggatggaagaagtgcaaggtccctatttacgcaagagtagggaattttgagaaactaagagagctgacaacaagccctgagactcacttggggatgaccaagaacatcactagcctctgtactttgttggcttaatgataggagtcactcaagggttggcagataaatcttaaagttcaggcagtgttttttgtttgtttgtttgtttgttttttggtttttttctcttatgtttgtgaatgaaaaaaaacagtgatgaaaataggaaaataaattattcatatgtttagcaactctctctctctcttcaatagatttccattacttttcttagtaaagttgattctagaattagtgcacaaggcaaaaggtggcctttgaagagactttaattcctggttgaacacagtgagatatgcccactctgagagacacacagcagctgaggtgagctgaggcacagttacaccacagtgaacaaactggatgtggtagcagttaaagcagctactggttcgttctctgtcttcctgggtgaacagaattgaatttgcatacactcggtatgtcgaccagacaagactattgcatggcgactttgtgtatgtgtttccatgcatccaagcagtagttttagtttgcattctaaggatagcctacagtacaacacggactgaagaagaggaggtgtggatacaagtggaagaaactaggaggccattgcaaaccccaatgtgatgtggtnnnnnnnnnnnnnnnnnnnnnnnnnnnnnnnnnnnnnnnnnnnnnnnnnnnnnnnnnnnnnnnnnnnnnnnnnnnnnnnnnnnnnaaaccaaccaatcaaccaaacaacaaaacaataacaacaaaaaaacccttaaccaacaaaccaaccaaccaaccagccagccaaacaccaatgaatgaaaaaaaaaacccaaaacaacaacaacaacaaaaacctcaatcaaccaaccaactgaaaaatcctgattgtgcgttgagggcaggagatagcagggttagggagagctgtaatccatgatggaaaagaagagccagcaggccgaggccctgtgccttctgtttgggacatattgagttgatggtgtttgcgggagaggattgagaagaaggctaggtgtggcttgagtaattgtttctgattggaggctttcttagtgaagtgggtcaccatgggaaatcagccggaacagcttgtttgagaagaggctaaagacttgttctccttccggagctccttctgctgtgtccactggcagccttctccatggctgtccatggcttctcttgtgggagctgcatcaagctacaagcacatttcacctgtgtatttgtaagtggcttctgctttggtgtgccttccctttccactcttctgcctctcgaaggcttatctcagtatagttacattgtgaaataatatgaagatccaaacaaggtgttggtgtggagtgaagagaagacggagtgactcatttggggattcacaaccatccatagctccagctccaggggtctgataccccacctccatacaggctttgaaagcacctgcactaatgtgtacatccccatacacagacatacacacatatgtataatcaaaaataatgaaaatagaccttagcgaaggagactaggtgtcacatagttattaacagtgaccaggaaaatgaaaaggatagttacttacttatactcacatggttttcaacatgtagctgtttgctacttcgtgaggaaggctggcaaaacttgattggtccattgtacaaagaagacaagatctggctgcctattagtgagttaaacagggttatatccatattagtcagtcttccatggtcatgttctctgaacccaaaatgacacatacattggagaggtgagatactttggaaggattagtgttccatctatagactttgaattattctggaaaatatagtatcagtatagtatcatctgtaggaatcctccttggtgtagaagtacttgcagtgagatgatgaggaagaggaagaagaggaagagaaggaggatgaggaggaggaggaagaggaagaagagaaggaggaggaggaagaggaagaagatgannnnnnnnnnnnnnnnnnnntaggaggaggaagaggaagaagatgagaaggaggaggaggaggagtagaaggaggaggatggtggtgatgataatgaccgagatagtagaagtgacaatactaacaacagcatcactttacactgggtgctatgtgccaagcactacattgtgcattttccgttcagtggctttgtgaatttaatgacattacaactgaattcggtatctacgactatccccattttgtagacttgaatacacgaagccacacagcaacatcaataaaaggaagagaagtcaggcagtctgtatccagaatccacgatgtcacctgcacacttctcactgtcagcccatgttcttgctgtcctcttcaacacctggaccacccaattctggaccccagctgcgttataatgtggttagattttctaagctggaacaaatgttcccgatgccagttcaatgagaaattctgctccatgcttcctaggttacattgatttattcacctcggatagaataaccatgtggtgaactagataaaatatttgtaccattgattgctttatttcacacagatggcgggggttgggggggggggagaggagggcagtgaaaaagtgctgtaggcaggtgtgtagagaccagctaggacaggaacccaggctgccagtgcccccagggtattgtctgttatttgcaggtctgaccctgactagccactggctgacccctctggggttccctttgacagctctagttacagtgaatgttagctattgaccagggcatttttggctggagggtacccagggcatctcactacagaaggatatagccctttgcagcattgctacaaagtcacatagaaaacattacaataaagtgggtggcttcctgttcaccaatcactcaataacatcagaacataatctagggggaaaaaagaggagaccaggttaagatcgggcagattctggaatgtgtgtgtgtgtgtgtgtgtgtgtgtgtgtgtgtgtattcaaaccatgggttttctccattgatagcctctgggatgttggataaggctataatctcattgaatgtcagtttctcatgtgagaagtagcaggctgaagttagagttgcatgtgacagcgtatggacagacagacttgtatttggatacaagtaactgaaaactgacatgaatggctgagatgtgcaagggcttaggttttttaatttatattttatatttatttatttatttatttatttatttatttatttatttgtttgtgtgtgatgaaaattggaagatgcaggtttgggtgatgttggttcagcagctcaaccatgtcatgagcactgtcaatgattctcttggcttttctcccaccactgcaaagtggctgcagctaatatgtcctggtaacatgtaggcaatgagaggaagaggtaagaggtgagtccatgtggaaggtaagatcctggaagtgacccaacagcatcccgtacagccacatgaatcttgtggtccacaattgcttacttctcggttcctgagaggcagagtggatggctgcatggcttttaatgtcagtagtgaggcaggaggaggcaagttgtgtgggtaggaggggtttgtgtgggtgctgccatgaggggatggggggctggttggctggtatgtggtgggtgttcctttccatgattttggggaagtcgtcttgaggaccatgatggctcccacagatagctataacacagggaggaggtgaggagttctgggtatcttttaaggtgtttccttggcagtctgtttttgcccatgtgtattaggaagcctatgacaaatgacaaccagtcaaaagaaagggagaaggaaggtgattgaccaagtccctggaggactttgagtgcaggtgtggacagaactaatttgggttagggatggtactgaggagtgtagcagacatgaggggatgtggagattcggtgggagatctagaatcatctctttgtggagggatgaggattagaaactagaggaggagtttttccatctctttttggaagcaggagtgaggacagggtcagtcaagaacaagatggcacgggggacccctggtgctgccaccaggggtcatagtttataggattagataagtgggacctttgagggatgtctgtcgactagaaggtgggggagaaaaagtgtggtgacatggtgagagtgacctctgggttaccaagtgtaatagctaccgttgctgtaacaaaatgccagggacaggaatatagacagtggaagtttacttcttatggtcctgaaggatggaggtccaagctcaaggtacttgcaatgttcttttccttcgagacaactggtgatggcttcctcttctctctctttatgggggagggacattttctctccttataagaagatcagtcatacagagtaagggtttaccttattttagttaatgactacctcaaaggccctgttctcaaacaaaatcatatgttaagcttctggggttccacacaggaaggttagtgacaggaaatagtgtggtctgcttgtttgtctttggttggttgttgagacaagagcttgatctgtagcccaactaggtctccatcttccagcgttcctgctttggctccccaggtgccagcaccatgggtgaccgttactatacctatttggaaatgcatttttttaaagtataggagagctgtgattgagggaagaaggcaagttaggggggagtgggatcaactggatagggaggtgacccattataaaggagttggaagagaggaggtgagggccacacactgaagctggtatttcctggaaggccaggctgtacagctgtgcagctatgggtctagcctgatagcagattttcaatgaatgaaaaggcatccgttatctctacagaagggaggaacgtgtgaaagatatgagtttgtagttacatgttcatgctttggatggaggggaatctcacaccctatgtcccagatcctttcagtgatatggctggaagagctccccaggcggggcaggataatagtggaacaggaaagacaaccatctgctgacgtgagcgtggtccaaaggcagtcacggattcagtggaagtttgtatcggctgcaggtgcagcccagcccagagttggctcagtgctctagtgtgtgggaatcgggacaaggtaggcggacaacagggaggagagacttctgagcatgggtacccttcacccctggatctgtttgtgtcctaaacaatgggaggtaactccaagaagtagaggttttgagtgggggtcccttctgatttgtgggttgtcctactatcccccccatgcagctctcattgttgagcatccaagagggctgacttgtagcctgctggtggtctgctctttcttacaaagccacactatctagtaggtacttctgaggtcctatcttggtgacgttccagtagttgtggctcctgatctctttgcccatcagagagccagcctgagcccagtatttgctatgagctgtatgtgtgcagatggtgtctagaggtctatgtatgtcaagcgtcttcctggattactctttatcttgctgtttgggaagggtcttttgatgaacctggagcttaccatcttggcttcaccgccagcgccagggatccagctgtctccggtctctcactgctgggattacagattctaatgttggtgctggaggatcaaactcagattggcatgcctgtaaggagaacactttactgacggagccgtttctccagccagggttttgtttttgcttgtgttcatatcaaagatgctatctctcaagcaaaactctgactcatgttgacaagcaagggagtgagctcagagctggggatctagtagggtgtccctgatgcagcacccttcagtttcatctagagtcatttctcctgaacacgctggcattgcctgcccccaacccccaggagtgtggtcagctagccactgctctctgccaaacactatctttcttgtatctttttggtgctctcttgtatttaaatgaaaagacctccctaagtactaagggagaacaaaatggagataattacaggaaaaaaaaaaagaaagcaaacactatcaaaatatagtcagcctttcagagtgctgttgctgtgacaccctgtcttccagagagtttaattctccagctcgccctacacagccccacggctgctttgcctttgagatgagggctgtgtgctcgtctgcttccctgcccacctccacagtgtcgggataatttatggagctgcctctctgaagagactcaaggttagcaccaggccgggcttatcaggctcaccccttcagcctcgagtcattcccagtaggcacctgtgctgtgtggtctgggataagggtcgtaggcttgatagcaggctgaaagtcacggcgatgtttgtggcagcttctgatgattgaaatcttggtacactccaggctctgctgaatactgtatggagatgagcttcaggagcagttacacttgtcagaaattgaccccaccactaactccctcccgtgggctgatagggaaattgaggctcagaggtttgctagtccctcagctgggctataatagagtgtttggacccagcttgttcaggccccaaaagcatgaggattgtctgtgtgccctggtgtattctgtgcttggaagcagagctttctagatttctccctacttggtatccgacctcagagtctgctggccaacttcccttctggcctcaactttccttctaggttaaggtttgggctctggaattgtaggaatcaccccatcacccccttttccatgctctgcacttgggttcttacctcaagcccagtgctcacacagggcccttcccaccttgtcccacttaggacaaaagtccagactttggacttcatagttcctataccaactttgcagtaacatccttgatcaccctgggtcagaccctgtctccagcttcagggtgccatgtgagcctcctggctcatgtgagcattgcctgggggtcagccttgtgtcctgttaagtctgcaccttggaggaacacagggatgagtgccaccgggttaagcttacccagttttcagtttcatagcccatgacctcctgactatgctccctcagtgttctctgtctttgtgggtactagttttatttcttgttcccactctgagtcttaactcccacttttctaatgccagtgccactctctgctcagcacttccctggaatactaagggtttttgcttttgcgcagtagcccatctcttcctcctagcttgtggtccagcaaagctgtactatttacttgtcattgagccaaaattcctaacaagaagtgacttaatggagaaagggctgatttagctcacagtctgaagagagacagtccgtcatagctaagaaggtatagcagcagaaggttctgcggcaatggcagtgtgcagctgggactccttatctcctctcaccttggggacaagaagcaaagatgggacaggcagcaggactaggctataaacttcaatacatatccctcctctccctccagcagcccacttcccctggttagagtccgtttctcaaggctgaatgtttaaacacacgagcctgctggggaggttggttctcctgtctgagaccatggatatagggtagtagtgctgcctgtgtcacagttgctcttatagaagcctgattcagtcctgcttcaaagtgtcagggtaaacgcacatcctgctttgggaaacatactgcacaccagcccccgacttcacggcttttaccatcctgtccctgatgcggtcttttgtatgccagctgctccttcaacctcatcacacgtggttagagatgagctttggggaaaacagagcaacggggcagcaggtgcacagctgtgaccagcactcatgcttcgccactcaggcccctgagccctctcgggtggcttcgataggatgctttgccctgacaagctgatcaaggacgttctactaggttgaacagggtaggtcactgtaggccttgggcccatgtgctgggggtgttataatgggagctgctgacatctgctttatgctgagccccagcccctcccacccgcagctctagcactggagattaagggaggcaagtgatgtctctctgcagctgcctgccctcccgccaacctccttctcctctcctcctgttcctcccagccttgctccccgttcctcttcaccctgctggttgctcactgaatgtgagttcagcagacattcagtgaggtatcccagcatcctccaaggattgatcctgtgtgtctcacagaagctctttagtctccctcaaccattacctgacagtgggatgtctgttgagccatgaagcctctctccctagatatgattatctgttgttgctatggctggaatgtgaacctaagagttcataggttgcaaagttaatggcatatgtggcagtgttagaggtagggcctttgagaggtgatgaggtcacaaagaatcttctctcatcaatggattaatactgttatcaaggaagtgggtccattatctctggagtgggctccttacaaaagcatgggtttggccctttctgccctcctacctctttcttttgtacattcttgcccttttgccttctgtcatgggatgatgcagcaagaagacacttcccagatgctggaaccctgagactggactttccagatcccagagcaatgagatgtcaaagattttctaaattacccaattgtggtcttcagttacaacaatgtggagtgatgaagacagctgtcaataacggcacttagctcacgggcggttgtgtacagcatctggcactccatctcctggaagtgggagctctggttactgcttagaattactctttttaggagcaataaagtatgcccaagggcccatatgcagctacctttggatagcagtaatggcagctttacacagttcaacctgacgctgttcatcttaaacaacctaaatgtttgaggcaagtctttgggttctgtgtgtgttggttttcctaactatttaaaggctagttcgcaggatggctaccagagttatgccaaacaggactggaatgtgctttgtagactgaaagggataagtaaaatggacacttattttattttttaaatcattatagttgtaatgttgaaaatctgtttcatgtgtggatgtgcagcatggagtctgctttagtttgatttctctgcctgtgacttgctagtgacagctctctcttcgtgtctcctgatctgtaaaatggggacagtaatggtgcctacttcgaatgcatcttgttgagagccttgagtgtgggtttcatggcaggcgagcccaggaggatgtagaattgtgagatgtcattttgggaggcaggatcacaattgattcctggattacagggtctctgagttcagatctgtgttctaattgcttagcggtcagccctggcagctccccatctttcatggggtgaaaagtttacttcccggctcaggcttctatgggactcctggatccaagagattcagatgtaaataaggtgtgcaagaaaccgcccttcacagagggatgctatctctccagtgccacataagccatattgataaattaatctcatattgttgggaccaaacagccctgcaatttttctattgttcagcttaattggtctctacagctgtgtcattagcttgaattccttgtaatctagtcagagcctggggagccattgaataagatactccgtgacttctcggtttacccagtcgctggggtcgagactcagtattcccccatcttattcctgactccccattaagattgcgagctcttcattgaagacgtgagcacaaacctggcatccattcttactctctgcttccctaacatgttttaaatctcttaggctttactgttttaatttttgttcattttaaaacaattttatttttttaaaaaaagatttatttatttatgtatatgagtactgtgtcttcctgtacattctgcatgacagaagagggcatcagaaccactcatagatggtagtgaatcaccaagtggttactgggaattgaacgcagcacctctgtaagaacaaccagtgctcttaaccactgagccatatctagagaccctctcataattcactgtaaaagaataaaattctagtgacatcagaaaaatatttaagataaattattaaatgaagttaagctagggctacagttgtctacccacctacatcttatccagcaagaatgaagacagatatatccctagtgttagccctcaggggggctattttgggggaaagatgattgttggtgactttgatattctttatatgttttcatttgcccccaattttctacaatgagtctgtctgcttttcaaactaggaaaggtgtgattgaacccaagccacctggggtcctctgagatagttgatagtttccttatttgtaaaatgaaagggttgggctaactttctgttttcttttggtatccagagaactgattagaaatgccccatcccaagggtagaaggacatacttgatactctagactggggtccagaggctgccaaatgtcacacagataagggacagagcctggtttgatgccgcttctatgtgcacaacatggtgtttacttgccaggttggtggcctttgaagtccctaatgctcttctaggaagaaggaaccaggaatcttggctccttctaccaaccagccatttctccttccctccagcaggacctctgacacagggatctcttgagtgcactgcccccagtcctgtagcagcccaggcatgtggcctggcgtcatggtcccctgtgtcatcctggtcctccctgttaccctggcagttggtatatgtcttcttttcctttcctttcttttactttattgcattttggtcttctgattatatcttcctttaaagcaaagcccatttaactgtagtctgatttactcagggatttctgcaggcatttgaagctctcccctctggatagtaaataactttccagccagtctggtcgaagcaaggaaggtctttctgggttggtatgcaggttttctagagggggctgcatgaccttgggccttggcttcactgtagcacaggtgcagggaccatggcccaagctgatatgctacccatactgtctggctggctctcagagggcttcacggtgtgttatatatggcccatttattattcttttattctcttctttccagtgctagttattaaacacagggtcttatggattttagcaagtgctacatccccatctgcttttgcccttgtcaccttaacgcttcccgaagcctgtccaagtcacctactccaggagctttggttttcctgtgggacacattgctttgcaaatactcttccagagctgtgctgatatgttctggttttagttgactttgttcagggctagtgtcagcatgcagaatctggcccagtgggagggacacaggcagtcctgtattctgggcttatggctggctccattactgatgtccatgaaagccaggaggccagaattctgtcctgaaggcccagtccctgagggtgggtgtggattctgggaccccatcagtgcggcagcattctagctgcttcctgaagctttctgcctggcctgggtctctgggtatcaggggctgccagttaccaagcatcagcacattggtggctgccacacagctggctggagaagagaaagcttaattggctgtaggtcagagagatttcagccctctcttgtctgtttccactggcctttcttttctgtgatacggaaggagagagtctggctgggtcagtgtgcttccttctgtgcctaagccgggtgccattccacataggagtgtaccaaggtcctctacagcccttgttccacacagagctgtctgttgtttacaaatctcccatcaatctgtggccaagaggttgtctgctgtcgttgctagggctgttgctatggcatctgtcatgcaggctccaatatgagagagaccaggtgggtgatctcatgtccttttaggtacagatggtcttccccactggtaaggggaaggcctcactgggcctataggctgggctacaaacaggtgcgtttagatgagaatgaagaattagtaggctagggaggctcagcattataggcccagagcccagaagagccagtatggagcagatattataggggtatggcagatgcaggttctggggatggtggtaacatcattaagcttttgggcaccttgggagatggtgatacacaatcagaatggccacctctacctgggaatgacatcttttgcagaccctaggccctgccccagactgtgatcctgagccagaggcatgggttctttctgacacctggtggttaaaactcagctccattctgggctgtttttgagcaagaactatcagcccatgtttgacagagaaggaattgtagagtagaaagacccagtacgtgatgcaggctccctaagctaatatgtggcagatatggtctaagtccaggtctgtctgggtccacagcttagatcttcctcatgggacagttgctgggtactttctctttggcaggtttctggggaaaccatgtagaagtgtccacaagagacctctctgtggtgctctcctttatgctgaagccagatggttccactttacagatattgtatcatgtgaccagcccagagacatgaagtgagtcaggttaaattagaaatggtttcttgaaacacagctatccttggcttgtgggaacagagccctgctggagctctgagaactattcaggagaaaataacactcctatctctcatgtggtttttcccaagatggcagccattggtggcttgaagagtttgcatgagatttttcttcacctccaaattacagtaaacacacataacaaagttgactatcgttaccattttgtttgtgtgagcagatttgctatgcgtgcgtctgtgaaggccagaggttggtgttggatctctctctctctctctctctctctgtgtctctctctctctctgtctctctctctctctctctctctctctctctctctcttcctctcttcctctccctcttcctctctccctctccctcccatcttcctcccccttccctcccctccctctctcctccctcctcccctatgtgtcagcccctcttgcctactctttcttagactggatctctcactaaacctaggtttcttcattttgactaagctggctgccctgggagcccatagaatctgaatgtcttcccctgcctctgcccctggccctgccccggcactggaattgtagatacatgtcactattcttgggttttacttaggcactgggggtctgaacgcaggtcttcaagcctgcacagcaagcactttacccaccaaatttcatctggaccatttttaagtccagtcatggtaaagtgtatttgttgtgcttctagtctccagagttctttccatcttgtaaagcagaaattatgcatatattaaataataacctcccctctcctctacatccctccattccctggcttctgtgtgtacagatgcctcatgtaagcagaatcatgtaagaagtctttttgtatgtggctcacctctcagtaccacgttcttgagatatagtcacattgttgggtacgtcaggattcccttcctttaaatggctacataataaatataccagtatgtgtgtggcatgttttatttatcttttgagctatacttggattgtgtcacctttggctattgtgaatgatgctggctatgaacatgggtgcataggtacctctgtaaggctgcctttaatttggacacccatccaaagtagaattcctggatcatgtatgctttctcttaatgcttttgagaatctgtcacagggcttttcacagaaactgcaactttttccagtcttaccaatagtctgcaggggttctggtccctccacatcctcaccaacacttgctactctctcctttgggcatcatgtgtgtggggtggtgccttagatgggttgtgacttgtagcttctactgagagagaccatttcacaggccatcaaacttgctctttgaacatatgctgacttcaaactctcagttgtggacacagcctcattctcccgagactctggagtcctcactagatccacagtccttatgtgaaatgatttgaagatgacagacatgaggggttggtggggaggacgggactgcatcagccatgctctagcagaggaatgaatgcgtattgcctacactcagcgagtgagtgaacagggagcagagggtgtagaaagggaacaggttgccggggatgtgcttgcacagggcaggccatctcacttcggttcattcccggtgccagctgctctcttttctcaacacccaagggtgatgctctgtttgaatttggatttgtcagggaagctgtgaacaaattgggatgttttccctccgatgagcttccattgccaaatttcagaatgacttctagatgaaacgttagctcgcaaatacaccgcttcttgggtgccaggcacatggggcaggaggagcggtaaggtaacccagataccttgacaaagtgacagtttccttcgcccaagaagagctctggattaatcagctgtgggtctgtgcgtgcctttctcaaccttcaggtgtcaggagcagggaatccttctaaatgctacctttgtctcactttgttggtgagtgtctgtttgttttcactgtgtctacatggcactcggcatgggtgccacccttgaatgctgacttgccagtggaaggcagacctgcacccctaggcccataatgtcaagatggcagacttgtactcttcctccttagaactggcatagtgaggaagagcctctcacctaggagagaaagtgcccacttgtatgtctctcaaactttgctgactcttcaatggtttcctggaccaaagagttcctcacagcctccatatcccttgaaagaagcagtatggcttaatgactgcagtgggtcaaatattgtcccccacagttcacactcatgtggattcctttgcacacagtgtctttgcagatgtaggtacttgagatgaggttgtaccatgctgggacatgtcccaaccccatgactggagtcctcattaagaccatttgaagacttagacaagccaataggatgcttgaactgagactgaagtaagacatctacaagtctgtatgggaaggctggacagaaaccacaaggagatgctagaggcaagggaagttgctctacaactctccgagagaacaagaccctgctcacaccccagttccagactccttcagaattgtgagatgcactcttctgaccagcttgtgacacatcacatggcagcctcaggagcccatgcaggattctagggacatggatgcttggctatggatacctagccttatttcaattcccatggagctgagtggccttaggggatgctcatcgatcccttcaagtcttgttttcatctctgacagagagataggtattttcttacagggctgtgtgagcattgaagttactcagtgaatacatggcatttataggacctggcacacaggaagcatttagcagttgggattgttattgcaagtctatttacatacttgcctctgaacccagagctctctttataccaagtgatgctaagtggtcaagttttgtgtctggctttgcagtctactgaacttagagaaggcaatgtgctatgaggtatgtaggttactaggcacgtgggctactaggcatgtgggctactaggcatatgggctactaggcatgtgggctactaggcatatgggctactaggcttatgggctactaggcatgtgggctactaggcatgcgggctacttgccctcattttcttgcctttgtcctcatacctccttccatccaattcagattccaaggataagagataagagaagttggaagttagataagaggtaaaggaagcttcaaagcatctcaacatagcccaggctaccctcaagagcctttgaatttcttgttctccgccttcaccccctgagtgctggtataagcacatgagctgcatctggtttgtgttattctagagatccaacccaggattccatgcgtgttagacaaggaccctaccaactaggctatactcctacctgaggcagctgtcttctggccaggaaagaactgtggtgctttgagtgactcagacctggtggaacccagtttctttatacatagaatagaaatgatcatcagaggcctgtgtgaacatgctgggaagtatgagaggaccctaggtagttgactggtaataaatatccttttgttctttgccatatcctgggaatgggaagggtctggatcagaatgacagccaggcaggtctgtgttggaaacaaatatatccatatgattaatttgtaagtattttataacttattcaccttacatattgctcacttccccccttatgatcacccccttccacatccctttctcccattttcctctccccttctcctatgagcaggtaggaacccccttgggtatcctctaggctcatcctctccctctgaggccaggcaaggcagcccagctagaaaacatatcccacatccaggcaacagcttttggtatagcccatgcttcagttgttcaggacccacatgaagaccaagccgcacattcagcctgtggatgggaacagaaatatttttactatggcctgaacttagatggacagagccaagtattactgttgtgatgtcaagtgccttggatagggtctgccattgccctgccttgctttcatgtgggtgtttgtgatgggatgttcaggatttctctgagttagactagtgcgaggttaggtttgctttgcacctcaccccatgcagggcatcagctttcccactagattggcttggtatagaagcctctggaggttcattgttatcctgctcagcccaagacagttgtaagagtggagcacactacaatgcaggcagcaagggtctggtgcaggaaccaaaataacttctccaaaaaatggtaccagcctggggttggggaatgctgcagccaggcataggtcccagtgtgacagcacaggtcatcaacagagaggttcctggtacaccaatgcccacagtgacaagagcaggcatgacctattacctgtctattgtctaaagtgtggattgaatcagtgtgtgaagtgtttgcatgtgtcaaaggggtagggtggaagctctcaggggcctatcttctcagagaagataggaactgtttgagcttttggtgagtgctacatggctgtttcgttgggattctttgcgtttgattcatgtgttattttgggtatttagaaagcaatgcatctgggctgtattctcgtagctttatcctacaaaattgactttattgaattacagtttaagtgcgttcacgatccatatagagttgattaagaaaaaagaccaaaaccactcatttgaaagcacgtttctttctattgcagggatatagaaaatacattttccacaatgtcacacaccatcttcttacaaggatccatgttatttagatgcccttctggacttaatgacagaacaatgtttatttctaccggtggcttcatgtaacagtttttttctcttttcactttagcggccagggagtgtctgcttagtgcttgatggcagggcgggctcctcatgctcggctgtgagcatgcacttctttgtttcactgtagtggtctattttactttgatcctcccctccgcttttgctgttttatgttctttcaaatcctttaaagacaagcagaactccaggtatgtacatgaaaaattaaaaatgtgtaatcaaaccatagctcaaacggagtgtctatagcagcattattttaaataataagcgaaaggtgggaaaacaaatgcctgttacctgataagtgcataagcatgttgtattttttttataatggaatattattcaactgtgaaagggaataaaattctaattcatgctgcaaggtggatgcaccataaaaatgtcaattggtcacatacaccagatacacagattccactcaggagaaagactcaggatgggtaattctagaggagatgggagactgaatatttaatgtatatgggcttagaactgatttggagctacaaggaagtgtttgaatggcattgagaatgtcttaaatgacattaaattaaacaccatgaagactaattttgcattgcatgaatgttgctgcaataaatacactgcatatactgcatatatacacacatacatacatacataataaatacatacacatatacatatatatatatatatatatacatacatatacatatacatacatgcatgttcacacacacacacacacacacacacacacacacacacacacacacacacacacaatgatggggttggagataagatgtggctcagtggttgagagcactccttgctcatccaaaggacctggttttgatttccactattgacatactagttcacaactgtctgtaactccagtaccaggcaatccaacaccctcttctgtctaagcaagcaccaggcatgcatgtggtacacaggcatacatgcaggcaaaacgttcatacacatggaataatattttcaattataaaataattttgtaagtgattataatagaagtgatactttatctataataacaaactccctgaaaatctgtgttgggcccctgctagcttgggcagaaggggcaaccccctcctctcattgctcaatgtctgtcgcaaagcttctctccattgaagatggccacagttccagcgtcatccaaggccacagagtgatagtggctatactgagttgttctctcaggtccatccatcatggctcttgactaagggggtgtgctggaagagcttcccagtgccggctgtgtgagaatgggcttcagctttgtatgtggcttccacacaggtgagctctgaagcatttataaatgacttagttctcaagagaagttggcagggtgtctccagtgtcactgcccagatgagctccctctggctggtctggtcagttcctaaccactaagtgaaactcaagaagggactttaggaactgcacaagatcagaacacacgatcacacgattgcacctctttccttttctttttttgaaaacctgggcctggggtggtttggggcttcattttatactgttttctcatcctcaggatactactttggaattaacttctcctttgactttcttccctcctggggcacctaggctactggtgccctcaggtggtctacttcaccttggcctttctaggccaggaggagtctcttccttagcatgggtcccctccaatactccccctctcccttaaagcagtgcaccctgagttttggtacctcactgtacatagggaaacagatcctggtttagcatcataggaagaatggaaagtatttgcaagtagaagtagaaacacctgtttggaatgcctcctcaggttctgaagtcgtgagatttgctctaggctaagacagtttcaggaagaggaaagagatgaaagacatgctcagcagcttctaccagtagtccccagtgaacctatgatttgtctatgagtttctggttcctgataggcagtcctccttttgttcccttagcaggtgggctccttgcagttgctttctctggattgtattgtgttacatctggctttatagcaagtatactatgccaccagtttattatcagatttcctccagataatactctttccatttttttctgggaagactctgataaggctcatggttttgctgtaacaccagtcagtaacagaaaatttgaactggggtttggggagatggctcagtagttaaagtgcttgtcaggcaaggacctaagtttgatccccagaatccacattaaaaaggtctgggtgttgtagcatgctcttgtaatcccagtgctagagagaagacagggagatagctagagtttgctggacagccagctttgctaaattagaacattctggataaacatgagagcccctcttgcaataaacaaggtggagcatgattgaggaaagccaccaaggttgacctctgatctctacacacatgcaatacatgtacatgtgtacctgcctgtgtatacatgtaccctttccccatgaaaacatgcagccaatgaagtcaccaatgttttgcatgttcaccttccccgtcaagctacgggagcaccaagtagcttcttagaattcagaacggatagctcagcaccccattgcagtgaccaatttggaagtctctgcttattcacagaggagacaactcatgacctatctgaaaccacagacagtaccaaatccttcagatactctgttttcactagtcttacacactcatgacagttttatttatgaagatggtacaaaaagagattaccaacaactaatagtaaactagaacaattatgaccttgtactgtactacattcaccccttatactgaggagggatcatacagttcctgggtaacgagatgcattgagatgcatgatttagggattgttgatgtgttcgctcaacacaggagcacggagactgagcatcatgatgtggtcctgagacagtcgaacccataattcagagagttttgaaatgactgtcaaatgtatagcacatctgagggtctggctaggcaggtgccagtcagtatctgttgaatgtgatggagccccgatggtgtaccaagcaggtagcaacactttgctgtctcttcactagcagctctgacagtgtagcatggaggcatgtgtgttagggggcttctgtcttcacacctgagcagaactgacatcctgcaggaacttttagcaccttctgtggtacacacagagtgaaaaggaaaaggtttttcttggaggagataatggcttctgacaccaatgtaaaatctgatagagcctgaatgtgcagttggctctatgaaggatcaccaagggtcaggtcagccagagatgactttgtggaccatgtaacatctgaaacaggctgattgtaggataagtagaaatggtcaaacttgactttcctccattcccacagtgtattacactttatggtgtcgtcccccgattggggactggtttgatcatctaaagaactctggaaaacagagcttctaaacactagctttttttttttttgagacagggtttctctgtatagtcctggctttcctggaactcactttgtagaccaggctggccttgaactcagaaatccacctgcctctgcctcccaaatgctgggattaaaggcatgcaccaccatgcccgacaacactagcttttttaaaaaattacattttattttgtgtgtatgtgtgtgtatgtgtgtgtgtgcatatgcactcacatgggtttgtgaagatgcatgtgagacataagcatgcatacagaggacagaggacaatttgtgggactggattccttcttctactatgtggatcctggtcatcaggtttgatggcaagcacctttatctgctgagctgtccagacctttataattgtggtagaggagtttagcagagtgagagaaaatgcaaggaaaggcatgaaacctggaagaccaggttgttgacagcagcaaaaggttgtgctccagagctgggatcctgggtgatcaagttagtattctagagaggggagtttgcacccaagctgcacattttgtgttgaagattacccaccctctgaaagccttcatttagagcaagaatgatggcaatgattcattgcaatgggtagaatcaaaataagactactaggggcaaatacatcccgtggcatagagtgtagttctcattccaagttggagtccaagctataatgtttcaaggctcacatttacatagattctgtgtctacagctggtaggtaaaaggtgtcttagtttgggaatctcttgaagagattctaaaagagtaaatccatggatggcacatttatagtttgggaggaaatgtcaggaagtccacatgaagttgtacagaactgagatagagtcataattaggattctatggctgtgataaaacaccaggactgaaggcaatgtggggaaggaagggcttattttagcttatgcttactagtccactagtaagggaagtcagagcaagaacgcaaggcaggaacctggaggcaggagctgaagcaggggccacgaaggaatgctgacttgctcaccataacttatgcagtctgattccttatggctcccaggaacacctgttcatgggtggcattgctcacagctgagctgggcactcccatatcaatcatcaatcaagaaaacgtaccatagggctgcccacagaacaatccggtgggggtgttttctcaacaaaggttcctttgccccaaatgactcttggttgtgtaaagttgatataaaacgagacagcacagttaggaagtcataggggtgtgcaccacagtggctgctatggtgagccagctagggtttattcagaaagaagctctgtggagaggggaggaagcaggacctcagggatatcccatcaagtggaaccatgggaaaaggggtctggtttgtcccatgatcctccataggggtcctttaggtcaagagatacagattctgagtattgtacattacctagcatcataaactaggaggagggtcagcagtgagacccacctagtgtctatgttaggaagttcttatgttgtaatctataagatcctggttgctcagagattcctggtagccatttgcaagcttgttacatagttcatgttaggtttcctctttgcatctgtggggttgcaccttggttctccagaggttggaaagaaacagctgggaaaggcagagagaattaataaagagagatgtcaattacacatgaggttgggagacactgagcaaggctgccaagttacagactggtgggaaagaaagtctgtcctgcctccttgccagggtgacagtcatggcagagcacctgggaggcaagaatcagaacaggaacaaggtactgactggaggcagctggggaagaccattaaggtatgtttcaataaatccagccctacagaggatactagaaggaaaactccaagacatggaggttagctacacccaagaagacacaggaaataatttcatgcaagcaaacacacacacacacacacacacacacacacacacacacacacactaccagcaccaacatcaaaataacaggaattaacaatcattggccactaatatctcaatatcaatggactcaattcaccaataaaaagacacaggctaacagaatggatgtgatggtggtgggagttttttgtgggttctttagatttgaactaaggtccctgtgcatgtgtggcaaacattttacacactgagccaaatctccagctcctgagataacttctaaatgcctagagatttcattgactgattgatttgtgtgtacccacttgtgcattcatgtgccatggcacatgggtggaggttcgtgggtaacttgcatgagtcaccttctcttcttctaccatgtgggtcctggggattgaacgtgtatctgagggtcatcgggcttggaaagcaagcacctttacctgctgagccatcttggcattccccaaatagttattttttttaagttagcacttacagaaagtaatagacttcattatgactttttttcttaatgctcgtgtgccattattcatctttctccatcactccaattcacttctccagatagcgcctattttaaatatcagttccagctctatgacaggggctttgcaacctgggaaagggatcccaggaaaggatattatgaggtagggacacctgggatgagttttgaagaacaaggagccaaggagcttatatgtcagccagcatgtttttctctgtcctgttttgtgcatttctgtcctttcacattgaacttcagcctattcctagaccttggacagctcttctctgcttctggatggagctagcttctgctccactctgggactccctgtgtggtctaaacactctcactgagctgagccgagcaccgaagtgcaggagacaggaggacaaacaaaataaatagaaggcatccgtctttgttgtcaaggaatttttgctctcacgggggaagccaggcaaataatatcgagtctcacaggtgacaggctcgaatacgtacatcagcagccgcacagaaataattccccagtaattggagggtgatgctgggatcacggagtgactgcatctgggtggtgatgggtggtttgataaaagcttagtggagaggatgcatgtatgcatgtatcagaagcccagaagatgttcagccacacagacgctccctggcctgaaaacctaggggctgccaggagtaggagcatagctctaagggagcataaacatatcagatctgggcagcaggtgtgtctttgtctagcatgtaaactggaggctgggttctgagtgggggaaaatgaagcttggtagaatcggacatagaggtgactgcatcctcatcacagcctcagccactgcaagctacacacagaggcactagaatggttgctctttaccatcaacttaaatgaatttagagccacccaggagtctggggaggctctttccaaagaaggttaactgagaagggaatagctactctggatgtagatggtatcacccacnnnnnnnnnnnnnnnnnnnnnnnnnnnnnnnnnnnnngctgtgtgcttagatggaatggaaggagggaaagagtgaggccaggtgagttccagcatcctttccctgcttgaccatgaagaaaccttttgccacaagctaccgctacaatgatgtttgtgtacaggcccatgcttagtgcactgaactctctgataccgtgatccataccgccttcctcttttcagttgtttctgctgatacagtgacccaaaataacaaatacagtcattcttcctgccatagtggcccaggtccctgacttcgattcttacacaatccatgggccaatttcctttttggaagagaagataaacattgtttgaactctagcatattaaaggtgacatgctgggactgttaccagcactgtttaaattcatccatatgatgcctttatgagatggcactactgtttccattgtatagaggggaaagctgaggccacaggaggtgaccttgtctcatcagtggcaggtgagagttaagatcactgctggcaccaaagctcatcaaattttcactgtgccaatcttctttaaaaagtccagggaggaacaggctttggaggctcttggcaggctgatgtctctgttgacgtgagcacacctccctgagtagcttggctttcatgtgatgaaagggagagaagatagaggaaggagtgggagaagagtcacaaaagcctgtcgcacaagtcccatgacagctcctgactctcagcttcactgtggatctgcaccctagggaaccactgcagttgtgcaggtggtacacagagagctggaaaagctgtcactcccctccaagggtctacagctccttacatcaaagagtttccaacaggtttagagctttttaatagaaattctactttagtgagagagcaatttgtttgccatcagggaggtcttgagcctgccaggaacatgttcaatgttattttgagaaagtggagccttagaagagattacaatatgaagattagaagttgaagggtctgttaaaatatcactatatgcttttgagcataattgtctcagacacaaagattaaataaatgattagaagtacaaagaaggagatactggtgggacttgagtctgggaggaaagatgtcagaaagcctcttggatagatatgatttatagatggtactctcattgcccctctatatactgtgaccacggcagacatcactaattgatcatagtctgtgttccatattctactacagattcccgaattcagcagtcttgctaactcactggcattgtgctatgttagatttcctcatagttcctgctgtgctggtcaggaggactcagagaagtattggggagatttcagattttaagaacaagctgttttgttcatatttgctttctgaatttgaggggaatgtgtatagtgataacaagaactccaggacaggggacaggtatgaaggggacaggcatgaaggatgtagattcagaattggaattaatctctaattagtagtaactgaagccatgtgaatagagagaccatttccaaaagagtgaacatatggggaaaagaacagatggtttattgctggaggggaggaaaatggttacaaggctagagctggggagaaaggtcacagaacacttccttcacttggtgaggaaagaagcgcgtcttctcggcttcctccatggagcccttagaaacttcagcactactctgaaaaaactcaattccttccttcccttcagattctgaatgaaaaccaatgaatcctcttaaagcatcttaaagcttctggaacagcctccctcttgcaggtcgtgtgtatccctcttctgttgaggtctatcccattctgcattccacttatcattttttttttttttttttacctctttggcctgctcacatttcagcctcatgtgtgcagagcagagagccaagaaccgtgaatggcatcttgtctttctgatggttaccttgactaatcactctgacactttcaggttctgggataattattcttgcaaagtcaaggttccccccttcctctcagtgacctggaattaccctctaacaataaaagcgccctgagctctggagtgacttctccacattaactctgagacacagttgcagtgagaaaatctacccttttaatgggggaaaatattgccctcgtaagtctttatgcaatgcacttgagcttaatgctcacttaccaattcgcctttataacttccatgttgagtgaattaagtcctccatgcgggtagttattaaggaagtgataagtgctttataatttagtaaagggtggcctggccatttcatatttttctaaggaaattgaccacccaaaaggcagcgctcttagaacccccgagggcagctgatcttaggattagagctcacactgtcacatccctttccaggcagctgcttgtgccggagtgagactcatcttttccttcaggctttctcctccagggaccactgaggaagaagggtcagagtcagtgactgtgctctaccatgagctctgtccatcctttttctgtcctggttcaaagctaagatgactaacagggtctggtgttgaatgacccagtttactcttatctccacagaggagttcactttcctgggacacatgaattccagcctctgatctcaatgcacaagcactgttttgttcatgtttcagtctctttagacagctggaaaagatgctgatgcccctgaagaccttggtagccagagctttttcaagatttgatgtagggtcatcatgttctgagcgggaacagtcagttgtttatgttttctgatacatgccagaacctgggctgctttaggttgaacaagacccaaattgtgtttgctttcctggaccttgcactccaccacaagagaaacactatacacaagaaactgcaaaagggagggattgtgactaccacgatgaagcgaatatgtagggcatcgttatacagtcttggtgctattgacactggaggttgaaaaaaaaaaactttgttatgagggattatcctgtgcactgcgggcctttacccacgagattacaatgccacttcccagtaaaggcaaaatgtctctaggcattgctatatgtttgcagagaaacacggccaccctggattgatggctattcatctagtagaaggttatagcaaatgactgttgctaggttggccacagcagccagtgacatgttaggagactctttagtgacatcttagctaaaggaagcagccaatgtaaaggccctgctggagggagggttcttgtggtcctggagaaaaggcaggatgccactgagggaaaaggcaattgagataagagggagctttgtttgagttggggatgaaggggtatgagtcacatcacatagcactttgttggtcttcatgaggtctgaattttatcacagctgtcaagtacagaaaataaaatcactggaagtttgagtccttgtttgtttatgttcaaatttatcatgagtttcaaaaatgctcatgcaggcttctgtgtagaagacggatttactcaagtgagtggaagcaatggctgtgttttggagagagtgatctttgtgagaggcaatggtgtatgctcttaattggacttactgacagcttagatgctgtgatggtgggcgtggtagagtttggtttgtacaactgaaggttgctgatgcaatttactgagacagagaaaactctgaagtatcatataagggctactattggatccgataaactacgatatgagagcctgaagtaagaaaaaggtcttgctagaggcagccattgaggcggtgacatcatatagatggcacttacgacaagcacctggctgagatcatcttggccatgagggaaatcggtgaaaagaagaaccttagggtaagacccagaagaatctggcatttagggatgtaagtatagaggatcaacaaaggaggctaagaagggaagtctaagacaggcatcaacccaggactgtgcagccaagactgccagaaatacagcatgtttcaagaaagagaaacaatggtgaagagtcggttggagtcaccaacatgagaaatgctggcagccttttcagtgtggttcctatagtgcagaacagagacaaatgaagttgaaatatcaaagagaggggaggaagctgggtctctgactgtggatgaatcttttgaaaatatttgccacaaggaagggtatagggcatgaattggtggctggggaccatggcctcagacatagactccagaggcagctgtgtatttgagtctttggaagcttcagggctatcttctttctgttccttgctccatgatccctcagagtccctgccatatctaagacattacttcagcctatactctaagccacatcgttcttaggggatcatcagggtaatgtggggtcagacttgagctctggtctactcaagggatcagaaatcagggccattcaggcaatcagcattgggaccatctgtgtgtggaggaagggggccttcatggaggcttttgaggtacgtatttaccctgcagcagcctccctgatttgagattctggaaataagtggaaaacaagacagatccaattgctgttcccatgcattatggttctagtgtagatgcctttatgtcaaaatgtaataaaataatcaaataagactattatacatggctattaaggccacaaaggagacaaacagagcttgtgctcgagaagaactggaggagagatgggggctgtgagcacagaggcgtagagggctggcttctctgagcacgggagacttcagaggagacctggaggaattaaaggagtaagggaagtactccctgtagaaggtcctggtgggaatactcctgcttcatagcagcagcagaagccaggccagtctggctggagctaacccaacaaagggagtgtgtccagaggaagggccccactggcatgctcatggtcttgcgtgccacggcctgatgcttgggattgttgtaattgtaaaaggaagccccggaggctttgatccctctggcatatggactgatgaaagaaaagaatgaaaacactggaggagattgaaagtggtggtattttggcatgaccgtaataggcaagctggggtcagtatgccacagcaacccaaatgagagcaatgggaacagagatgcagatagactggggaagggagaagatgtcagttagaccaggggttaggacagaagagtctggactccaaagagaacaggttgactggctggtaaaatctcactctggggagttaatctgtgttagtggggaaacagagggaccatgctcctcgatcttttcttgttagggcatagcacctcagcacctgaagagcacaggtgtgcacacatactttcttcattcctggcacgggctttggaaataatcaggaaaccagaacagatgctgtctctcccatctgttagccttaggatccgaatgcgcttttctgtatctgagggcgggtcccagatgtggggctggcttgccatggttcctggcacacacatgcttgtaggctggtgtgctaatatcttggcatgctggagtcaccatctcaagacaccctgctccccacatcccatgctcccctggctcttgtgtctggttctccaggcatccaatttcccactagcagctctcgagggagagagctggttgcttggctagtatgctctcaagcagttcctccccagaccccttgaggcctgaacttcatggagctgttgttctgggaaggtttgtttatagtgctaaacataacagataattgaaagctaagctgctgtctggatcacgaggtataatatggctagataacaaacaaatcaatttccttattgccccataagccttcaaagtcaaataaatgtatggcacattgtgcatatgtagaacctgacacacatgtgcgcgcgcacgcgcgcgcgcacacacacacacacacacacacacacacacacacatggatgtgggttctaatgctgactcattaggaagtaaacttggaggctcatctccccagcagccaacttacatttccggtcaggccccactattggaacaaaacttagtggaccttgggtttatctggagatggcctagagagaagagacatttgtatataaccttggtttttgaagttatttagttctgtgatggaggagtggggaacttatatatgaaaaaaaaaaaaaaaaccaaaaccaaaaataaacaaacaaaaacaaaccaccaccaagaaacaatgattttaactatccctttccaggagaccaagtcaagaatagatacaataaatgcaatgatagtgagcctagttatcaccagataaatatggattatgacttcacctcctggaaaacaccacttatatggaaacctcagagatctagaaagagaagggaaacaaagaagtatctagtgttcgtgtgtgtgtgtgtgtgtgtgtgtgtgtgtgtgtatgtgtgtgtgtgtgatttattttcaaattctttgaaaccctttccagatcatatttattcttagtgagcatacacttccatcattatcagtagcacaccttggccgtgtgcatttagtcttgagtcccagcacactcactgctctaaccatcataccaccaacttgccatagggaatgtgaggactactgaggcttgtgcttctggcctacagcatcaaggtccaagctctgagactgttgcctgtctaggccagactacctccatccatcagcctttagctactgtgttccaagaggctgcagaggagactagccacgatgcattgggaggaaaggggctgcttcagggcctctacatattaggatatcaaataaacaactagaaaagtgctaaaatgaatgggcttttcaagacggaaatcctatgggggaaaggccatctgaggcagggggatgagttctgtgcatttgaagaagcttctgaaggctttgaggtgtcagagcccagcagacatggttgctgtggtgtagggttatcaagagagtgtgactcaagctctgtgtgctgtcttggagaagtcagagagatatggtctgcattttagggagaggggaaaaaaagatgtagcaaggaacttgacaatgtgaaggttttacatttaaatttagttgtctggaaagtttgggtctgaagaacagctcattaatagcggtgtgaagtcacgttgaaaagaacagcaatgtgacagaaagggaggagagagaaaaggttggaaaagaggcagtgtggggccactgtgtctgcaggaagggtgagaccaagtccaacccaccaacttcctgcctggggagggtaccctgcctctcttgtgggcttccttgcaccttcttttcctctggttatatggcagcagatgtctccatgttctagaattttctggatagatgactatagacattaaatactgggatcataaaggaaacaggacatgttttttaaattaaaatatggaccaccatgtctgtaccaactaattttcagactcttggagaatgccaggtcatttccatattggctcaagtgaaacagaaagcggaaaagaaagagatgggacaaaacaccatctaatttattcaagcacaaaaggtccgtgtatcctcaattagtacttaatttatgctttgttgtattccagaacaggatatgaatcaggaattcatatcccttggtcctgggtctctaggattcagagatgctattgtgcattatggagaggggttaggtttctctcatgctgtggaggagttgcagtcacctcttgactatactctttccaagccatatcttatgagatccatcttgactccagtgggattttctgagctgcacccgtaagtcctgtgtgagtcctggagtttgtgttgtcttggacctccacattttgtcacactctttggaaaaggggtgttcacggggtcctgtcagagttttgcagtttcatgaagagacaatgtggaagcttaggcctggaaactgagatgaacgtgagagaaggctcttggcaggtagatctcattgataacttggtcatccccttgacttgagagggtcctgaaagccatcacttttgaatttccctctgagactcactggtataagagcaagccttttgttttggcccatagtgtttgatgcagagcagtcatttccaaaaatgacattttaagccatgggactctactagcttcgatgacaacttgggcaggtgctttatgtgataaggcaaaggtcttcctctcagagctggggatttctgggacacatactttgccaacaagggtctattctgtctgtctcattcccctacccaccagacattagtgttattctttccccagttgtgacaatcaaactgtcccctgggaggcaaaattacctcctcttgagaattttgctgtaaacttaataaagtggaaacaattgatataaagtgagggagagagcccaggttcagttctttggtttctcgctaccctctctcccttgctactgattggagaagggacacaagtagagaaacaggaccgtgggtccttatgggggccctaattgccatatattcttttatcttccactatcactgaaatctctttgctcctgaccctacagcaagctttgtgagacatttgtagggagagccagtttggctcctgtcactcctgcaccacagggtttacttaagtcccgaccttttaaaaatgtatatgtattgaactggaatacccagaaaaagcaatggacacgaagaaccccgtgtactggcactgggcgctgcctccccaatttggcattaacaaaaccataccaattgtagtctcttacctcatcctattcatttattatactttgaagagccagccttttccactgatacttgtggccttctaatagcagtcagcacagttaccataagtgacttgccttgtttggtaccaagcaatgagtcatagaagacttggcaggagccggccaacgtcattcgcaaatgtcaaggctgcaccttccctggcatgcatcttctctctcctgccctcgcccaccatagggattttctttcttttaaaagtcagtatatgtatatgtatatattcatttttgatgttgttgttgtataacctggtgcatgtgtgtgtgtgtgcatgcacgcctgtaaagacaacctagaagaattagttccccccttttcatcttgtgtacttctagagattacattcaggttgtcagactcaatgccaagtgttctgtacctggtgattcacaagtgctttctcgaggttgttttcctggaagtcacgaatgacaggttttctgtccttctatcctgccatgatgggtcattaaagtcaaagatgaccctactcttttgcaataaaaaaaaatctatggccaagaaaagacaacttctaccagaagcatgacgctgtctgtactcaaaaactaaggaacgatgtctcataaaatccccttagcttatgccttccagggacttctatgtccccagccctgaaagggctcatggttgttgttgctgatattgcttaccagtagtattttgtggtactgggattgaagttggggtcttggtcttgggtaagctagatgaggcacagggcttcatccccaccactcagccccttgtgagctcttcaagacacatcttcagttcccatgtcattgttatgaggcaggcagtttattacccccatttgacagctggtaaaaggaaggcacagacaggtgaggtggctgggacagggtgtgattggtggagcactcctggggctaggattagcactctggtgctgccttgctcttggcagggcctggcaacccttttccccataaagggccagaaagtaaatcccagccttgtaggccatatggtctgtgcagcaacgatccaactttgcaacttgaaaaaggctgtagacgacagtgaagagatatgagcaaagaaatgccgatttttatctagttctcacaggtcatgatgtatggttttcctttgacttaaaaaaaaacaaaatatgaaaatgaatcttagttttgaagctatacaaatgcagacagaaccctgacctgtaaccagtctgcaatgtggctgcgatactgctcttccctgattgaggagcactcggaagcaccagaggatgctggagatattatttaatgtactggaggtctccgtactgatgcttcactaacttgtcacttctcagtgtatgtaggagtcaggaagggtccatttataagcacagatcataaagactgaaacaaagtttcaggatgtagggactgacatctctgccaccatcaaaacacatttatgagatgctaataggggccaagaaaagtgatttcacttatttaaacaatctgatttatagctacttgttagaaacagttccatgtaggaagctgggcccccatgaatgctgtacaaacattgtgatctccttggtattggacatggcccatggcccggggagatacactggagaggcttagtggcacaggtggtcttagtcctcttggctttccttacatctgaaatgttgtcagtgttcctacctcggtgagaccagggcatgaaaactgccttgaaaccatgaggcttccagagagaaggcattagagttagaggccaatgccaacctggccacctggtcaatgtccccagcaaatgccagtgcttctggctgctccacgggggctcttggagaatgtgtttcaaaatgggctcttggcataccttgtcactgtgcagctctgaaatgttgccaggagttctggcagccacaggcacactgcctttttggctctagttggactgggcggcagatggcagaaccactggtgtggtcgggcaagggaggggctgtctggggaaaagtaatggtcacttttctggccagattgtgccttgagtaactatattctttaatgaaatggtgctgagaccttttatatatcacaacctctggttatggtggcgggaggagtcaggtcctaagagggttgggatggatcatttcctaggatcttctgctacctcatggaaggtcatatttcctacactattagaacaacaaaagggtcttggtgatcaacaacagaatggttttcaacttggacatgccaaaagcagcaatgaaggaatatttgactcttgtcactgtcaggaactaataaaaattagacacatatttatgatgaaacttctcttcataacaacagtcttgagtttctttgctttgagctgaatttttttgcactgggtggttgacactggtttgcatgtattgataaagagcttcaattaacagtgacttttttctctgatgaatctgagaatatgaattaattattacttaataaatatagtcttcttgctagacacaaccctctttaagatggaggtctcgagggaaaggcctagaaagagatcttggtggtgaaaagaagaggagttgaggtggtagggtacctctccttcgcaaagaaacaggagactctgattggttaatgtgcatgcttaatcttcattcaagtctcagagatgaaacttgagcctagttgccatggcaccctcttcctacctccccatggtgcctctgagtgccccatctctggagctgcttttctgtgcatttcaatccactggttttcttgagctccaaatggaacgaaccatggttatgcagactgagtgttcgtctgtgccctggtgggtgcatatgccacatatgtcttcttctttatcttgtttgcacagaagccatgcccttaggcaagccacaccccctccctaaaccacatcatttatattgtatttctgtgcaggcattaagaatatgaaagagtctaaaaagagcccgactttagaaaatcctgaatagaaataagagggaagtaaattgagtcaaaaatttgaagaatgggtttgaagggttctcgagctggggatagatgctaagcactctgtccttaggctatacacttagaagccatgagtccttcactcctatgtggaaccccaccatccagaggggagaagctgaactcagggttaattggtgatttgtcagaagtcatggctcatgctccaggcttcaagctcatgtctgactctaaagctggtatgccacctcttgctgtagcgaactgaccttttctgtcttcctgcagacacatagagaactggcgaggcctgcacacactcaatgctgtggacatggagctctacacgggactccagaagctgtgagtacaccagggtggcttgctaggagacaattgggatgctgcctgtcatccgaagtagtagtaatggaaagcctgctgtttcagtgtttcttctcatgaatcctttttggggatggttggcatcacccattttgaggatgttaggagccaccttggtccaaacaggcctgggggcttcccaaggttaggatttcaaggtttctctgctccaaggcattctgggaatgtgtttatccttcagctctgtgcttggcgcaaccctacactctatccccagccttagattcccactaaccactacagtggagttcagtgtttcaaacatgggcaaccaaaagtgaggagaaagaggagaaagcataaagagactgaagcctccttatctctggagcaccaggtaccctgattctcaattgctggttaaaatgggtagtggttagcacccagcaatgactgcttatatcccaaccttcacctagtcaacaaaggaattgggtttatatctctcattgagcccacatttggcaatctagggtcattagtaatgaaagggtcttgccttctttctggctataacccctgggtttatgctaatcatcttttttctctgttcaggaccatcaagaattctggactccggaacatccagcccagagccttcgccaagaacccccacttgcgttatatgtgagtagaactgaaattttggagagggtgacagggtacatgcaaggaaatagtcctgaacgatgaagctggctttgatatttgttgtccttggccaaatcctttaactttcttaggcctacagttttactttgggatttggtaacctcagaaggtttcagaaggaagccagggctgagtaggtgagcctccaggcttccacgtgtctacatttttcataaagaaatttgggattttatgggaatgtaaataacagggctcaatgtggacaggactctattgagagtatgtgtaggattttaggtatgtgtttggaattacagaaaaaaggaaagcaagaccagaccaagtgtgcctaagaagagtttaggttcagtaagagctgggagaagtggaaacatccgcataagatcacaggcctcgatttgagatgggacagaggagacatgctcttggttatctgtctgcttgtgcctccctcaccctgacttccctcctggctgtgactgactagtgggatggcttcttaggacagtggttctggtttgaccttgcaggaatgacatcatctatgttgatgcttcttctccaagtctagatctgggtaggtagactataggatttggaaggaggaaagtcatttcttgtgaagcaagggagcatgaaaggaagcctagtaagtgatcagggacaagtcaactggcaatactacagagatacacttgctctctggttcagctctttctcaagaagaatagccatgtggaccttcagttggtttgcccccaaagagtagagagtatacatgaactggatggtgtagcatctgctacaagtggggaagaaacagaagacctcctggcaggttgactagtctttcttttggatactgatagttggcaatgataatggaagagagcttgctgggtagaaatcttgtatataagaaaagcagagcttctaaaacatgtggtgaagaagtggagagcaggagacttgggggtggggtccatagagatcctgaagaatatggttggggcttggtttcttctcacagaggtcctggctatactcttgtgttttcccaacctcagaatgaatagttatctcttttagccacctctgttttgtgttgaactttcttcctttcctctggaagtagcaagctccacagctattgggtgtggccatttatactaacaatgggggactgagacctccctctctaattcactcttgcccctcttgccctgttttatgccccatggcacgagtctcctgatgtgtgtgttcttcgcagccagcatagctgcaaccagagaagggccttggaccagatgttccaggtgtttattttattgagggatttgagtttcactgtaaacgttcccagggggaacgagcttttgacatctgaaaggtttcctttttcacaacatacagaggtcatgaaaccacatggccatggcagatcaggtgggaacagttgggggctgtagaaccacacgacagttccagctgactactgttatgtgaagtgcagcccaatgtcaccagacttcttgtttatccaagatgagcaggaaaagcagcacccaccgaagtggctttgttgacacagccgagacttcagaagagcctgaaggttacacacagcagagaccagagggcaaggtgtacagtctggctcattcgtgggtatgatgagcaaactttgttcatttatgaagacacaccccaaatccctactgagtaaatttcccggcagctttgggacattttctcctggcaaatggtccaggccctactgctctctcacatcttctatttctgtcttctaaatgcatttacaagtcttcaggccccagctgagcaatcacaaggcgatcacttactccaacactaattgccaagccctggcttggcagctatttctttcttttccttctccctgccccttcttttcttttttcttttaaagggaaatggccaagaagactttctcccctctttgtacagaataaaaagcaggtattcttacccaagttatctcagtcattggactggggcaactgcctctcatccctgaactgtcactgatactaatgtaattcttcctcacaccagaaaatgagcttgtgacgccaaggtcaagttttggcagcaaacgtggccgggcgtcagaactctaggtttccttcaaggtctatgagttactatctcggattgattgcttcagttttccctcttttgctggatgagggaaaaaatggaatattggtgcatacacattcaggaaagatctttctgactggatagcttttaaccctcctgtttagacataggaggctcaagaataaggacttttcaacttaataggaatatatgagtgctaggctataaagtgagcataaaggagagtgtctgttccaggcaaagactccatgatcaatgtatggcttttagcccagcaagtagagtttagaaatagtgcttgctgataagataatgtgttctgctcttgccgttgctggagatccaagaacccaagggaagggataggatggcctcaggggcttccccgacctccctttggatttctgttctacagacacatttcagcttcctcatgtgtatagtatacctgtcttcaatatctactgtctgtttttcttgaacagggacagatcaaccttgatgcatttctctcttttctctgcttagtcccttttgctctagatctatctagaccagtctagatagtactcactgcaaggaagagctcagcagtggacgcgcctctaacttccttatttctgaaagtttagaagtcacatctactaacactatagaatacggagcatgcccctgtcgtcggaggttcacttctacagctgttcttctttttccgttaagaaaggtgttttctctagcatggctcacacacagatttggtcttggggtgggggtgggtgtcctcatcttcagagtaatgtggatgccttctgtgaactgtgttcacacccacaggtcatcacccagtgatggtgtttttctttagccttcagaatacttcctggttctcagggaactttcatagacttcaccccaccaagttctcatagccagtcaggtggctggtgttggaggaagttttacttcacagacctagaggaactcttattggtagatgatagaagcagaaacttgccttggttcttagattctcttcccagaaatatttccattttacctgtgggtgaagagatcaccaccaccaccaccaccaccaccaccaccaccaccaccatcaccaccaccaccaccaccaccaccaccaccaccaccaccatcaccaccaccaccaccaccaccaccaccaccaccaccaccaccactgaatcaatcaaccaagccaaccccacacccatcaaaaccctgagatgcttagcaaattacattaagaagacaagtctccagggaagagcttgcttagctggcaaagtgcttgccgcgtaagctcggggactcgagtttgatcttcagaactcgtgtcaaaaagccagacatggatctgtaatgccgacactggggaggcagagccaggcagatctccaggccagtgagagagcccatctcacaaaaacatcagaaacagctccagacaaatgacatctggaattgtcccccggccttcatatacacacatgtgtgtaaacacctgcatacataaaccatgcacacatagaagcataaacacacacacactcccttatacacacacagatgtacagacagacacatgtgtcagaaaagaagagggacaggctaagtaacactcattaagaatttactatgaatcaaggaatgcctttgcaaataccggctcacttcacgttgaatagtctctacctgagaactgctttgtagttgaatcccattctgtagatgaatacactgaggctcatgagtcacagctgatttctcctaaggccctactgtaagctagtggagtagtcaggctgaggattccaatccctctgactctgaagcctgtgtactttcttaaatccctcgagtgtatcttctctctggttttctcagcaagtaattcttggaggagggatgcggggtctttaaagttttattagagagctgcaatctctccctggagatttagcaccatccagcctcaaagagcttggttgagaaagctgtttagtttctttccctattcaggtcagatcttgtaccaacagttgcattactaactgcatatctttattgtgaaagatttcttagcgctagcctatggtctgctttatttccaggaatatttaatgtcatattccagcaagtcaaaaggctttatttaatcccttggagttggttgtggtgggatctctctcatgtttacttgctggctttttttattttttcctaagaagctgaggacaaccgactgtcctcacactgctgtaagcagacatttgattgctctgttcagctgggaacgttggctccctccgccctgctttgatttgggaatgcttgtggcaaggagactatgttttcaaggagagaaggtcaacagtgcttaggtggatggggatagagaaaatggctggaggccccatcctcctggacactggctggacagtatgcaattcatttctccttagggagcagggatgaaaacacggtgaagctgatttactatgtattacaaaccaccagaggttgaagtagtctgatcctggactccaggcttctgtgctgatattttaatagcaagtgttcacctctctgcctgccccttacctctgcactgagactttgtttcctacatctcagaggggtgggtgattggtatacttgtcccctgactgcccctatgcaagtgaccttcctcctctgttccatgcggagagcacactcaattcactactctctattactgatggtaatagaccaagggctttggaggtcatatctgagatttccacttactgctgttgaccttagggaagctagtgaacttctgagagtttggaaggaagggcaagaggccctcctccttaggactgttctgaactttcagtaagacaaagcgtgcaaagagcttaactgagaacattatgaaaggctcagggcactcgccctccctgctctctggtatccaatttcagagattgtagtgagttaacctggaagagctgctagaactaattcccaaattccgattcttatccctgctctctcccttgcctctcggctctctgttccacacccctatgtgggtggctagatcatatatccagcttaacttagccaaagtgggattcttgcaatgtttggtttggttttgggacaggatctcaccggactgctcaggctaccctcaaacccacagttctccagcctcagctttctaaaagttagaaggacatgcgtagtccatcacagccgcaggattcaagccatggcttctctctctgtctagtttccttgtgctttctctactgtagccttgagccttctcacacttcctggatgtgccaggctcactttccaccttgtgagtttttgtatctactgatccttctgacccatggaattcccctgcctagatctctgtgcctactcctcactcagcaccattttctctaatgtcccttgcttttgaggcttcctctgacaactcaaacttagtggcctttctgctctttataaacccatcatcttttagtgtagtatatggtctggtcatttccttggacttggtttttatactactgaccatttgaaaaataaccatttagtcatttgtgtaatagtttatagcagatgggctctacttgaatgtaaacttctgtgggatggagactttgtattagtcacttctctgttcccagtacttagggcaaggtgagtagctgtcccttggtcacccttcagatgagaagatgtcttgaagatctccgtgtgtaagagcaggcacagggcaaagactattcccaatgtggcattctttctttctcattatcctaccatcttcccttggatcctatctagccagagtcccccagagttctgtgtgtggcagaagccattgcagtctgatttaaaaataaggatatatgtgaatgacggacattctaagaatgtggtggatcagggcagtaattcaatggtaaagaacttgcttaaggtgtatgaagccttgggtttgatgcccagcataaccaatgaaacacagcacactacaccaaatcaacaagaaccaggaggaacaaaaatgaacactgtagagtcacagtcagcaacatccttctgcaggccacatacacaaaacgtcagtgcatctctgagctttctcagctctgcctgttcagaacgtccaccaaatcacctgcatgagttattgcctcttactaagtgttatgatgaatgggatggtgttggtgagcaggtaagagtgtgtttttgagatggattgactgagtttggattctggttctgtcatatatatttgagtatcctaggaatgtgacctcaccatccttcgtatcagtgccttatcttctcatctgtaaaatggggataatatgcttcttagcaagatgagacaagctaaaccttatcaaagtatcgaagtgaatgtctgggtcataataagagtcagtataagttagttgctgtttttcttctttgattgacagtgtggtggtcagtctcttgttacatgacttaataaatgtgcagtaaagcgggatttaaggagccttcatgtccccttaaagtgctacatgcctaagacaatcaacacacaagttgtgttcctgtccctaaaatttaccatctcagggacctggacaaagtcaaaacagtggcacctatttttattttaatccttagagagaatgattaaagctataggttttacctcatataaggggatgagaatattgcttagtgaccatttgcccagtttgtaaatgactctgtgtacaatccctggaattccccaaataatacaagtacctatcctcaatgaaacactctctctatatacatatagtgtacagaaaatctcagagctgttcagactgtttttctacatgagttaaggtctcctttggaaggtgtactggacagagatgcacagtagagccatttaaaaaatacccttcctattagatgtagtggtgcacctctgtcatctcagcacttgggaagtggaggcaggaggaccaagagggaaggcgtttgtcaagcaagaggagtagagttcagattcccatattccacgtgaatcgtgaatgcctagtaggcagattggctagtctttaagtgtagtcttggaaggtggaaggggggatcctagagcaagtgagtgagatttgcatgttggtgagctctgggtgtgattgagagacctggtctcaaaaaataggatggaaaggtgattgaggaatattcctgatagtgactttcatcctccacatgcttgtacttacacatacatgtataccagtgcacacatgtatgcctacatgcatgtgaacacatcacacacacacacacacacacacacacacacacacacacacacacgacaagaaaagaaaagaaaagaaaagaaaaagaaaaaaaaggaaaaatgaagaatctggagctgcaatgtattatacctcaaattccagcccagccaggcaaggatttatagaaaaactgtcttcacccagtcaactaaacagacacaaggaaaaagtataataaattcaatactatctgagacttagaaaaatgacatttctattgtaacataaaaatgtttccatatttattatctccatcataatcagataatttagggctgtactaggtatgggggctttcttgggaataatgaaatttttataaagttgattgcagtaatgcattacatagttctgggaatattctgaaacactttgaattatactttgtgtgtatttgtacgcatccctgtgcatagacacacgcacacacacacacacacacacacacacacacacacacacacacacacaccttgtgctccttcttggtagaagctttgagactttgcatgaggcccactgtgtctcgtctcactttgctatggagcagaaggcagcaatgctctagctgaccactgctccattagcctgaatctttctgggaagatgatgggatcataccacagctgaccttccctggtcatagtaggagagagaaacaaacatttgttgtggtcactagaagatgaagaagagaagccataaatgacagtggctctactctctacttgaggtggatggggcaccaggagcctacaacacttttggacttcttcctccattatgctggaaatagactccaattaaggggagcactcttgtaaggccagctttgagccttctatcacttaaatacatgaacttgcagagaatgaacaggttaaggttctgcaacttttgacaggctgcacagacagctgccattctctggatcttcccacgtgaggtgctggaggaccccggagacctcagagactgttagtcagaaatagtctgagtggaggaggtgactgtggagttggatttggaagggctgagggtttgggtgacaaaactgttgagggcacagttgctgccaccatggatatgtgcagccacatccccttggacttccttctagagctgtttagatacatggttctgcttcaaggctgttgtgtctggccatcagtaaacagcaagagctgccaatagaacatgacttgaaaacacagccatttgcccatgggataggatccccacgggtacactgatttgaggagattgagctgggaaacatatgaaatggtgcatctgagaggtggcctgaagaggagcagagtgtggggagaaggctcaggaggacagctgccggtgtgtaagaggtactgtttggatagagtggttctgggcaactctgcctcacacagtctcttgtttctctctactgtgccatgatcttggataagctgcttaaacctattaggtctgtttccacaactctaaaatgaggtaccatttaatgaccctgtcttgaccttacagcattttgggacatttcttcctggaacaaaggtctgagctgggacacagctggaaccatggggggcgggggaagggcaagaccagaagaaagctgttgtcagtttattttggcattacccactgccttctatccacctatcttgtctctctggaggataagcattccaatccaatgacttcctaggatgtggcttctgggaaccactgctgtgtgctgaacctttgctgatgcacttcatatgctattctctgctcctaatagtaagtgtgtgcaatcaccctccccattttactcacagccagttgaagcacggagagtttaggcaacttgcctaattacacagctaccaaatgtcagaaacagaagccaaccacaagtaacctgcttctggggctctagagcctgttcttataatagccccattccagcctgtttagccctggctgttgtcccttctcaggaaccaggctggagaggaaggaaggtaataactgcctaccctagaatgggccctgttgagggaaggtccatgagagaccactgaaggagcaccagcagccaattcctgctagttacctggtccctaacagtgtgtgggtgaatgggcagtgcctcttagcttgctagttgacattttgagggctgttagcaattatttacactgggtaggttctcagcaaagaaaaggatccttaacgatctattgagtggagactacctgttctgagccacatggttgcaggaacccaagacttccatttctggggctgatttctctcccctttcctttgaccctgtctcaggcaggcccatctccgtgagtgctcacctcactataacatctgcagtaggagacgagaaagagaaatgttgatggcattgctccagcctcctgtgacttcaaaccttacatgtgcaacttgggcagttgactcctccccagtcaagctgtatgagccctggagatgggtgggggtccctttattctttctgcagtccaggccccgtgatacttgatgacttgaagcacatcttttcttcttcctcttacacagattatcttattgaacctcagatgaatttgtgccacagaattcaccaaattgcagattcccaacttgactttctcggcggctacacatttatctgctgcctgcgaagacagtcaattcccagtgcactgacaccattagttgactggccaattgcctctcttggggccttgtgtagaaatgattccttgctccctagcgaggcaggtggcaagtttcctcaattgattttcccttttcacgtccatttgtgtcttttctccagtctcctgtgggcttgggtactcatgtcctccctggtaatttctctatgtttgctgttttcgtggtcagcattctgatccgctcagggcagggctgttgtgacctagataatgcagccatggtctgctcttgctggcccactgcatgcttccaaaaatctttcacacagccctcttagaagaagagtcctaaaatcaccttagatgccattttttcctcattccaggcatctggggtctcaggatcccctgagctaaaccattaagacttttcttataaccttgtcatcttttaatgttgaaatattcagtctactgctgaataaacattctgggctctggtctgcatggctctaagccttgggaggttacacggtgcattcatattttccagttttgattattctcagtagattttcttctctttttttccccctcccctaaggcttcattactttccatttgtccacatctcttttgtccatttctcttgttaaggacagatttagaaaatgagtttagtcccttggctgttttggggtcatcattaatctcagttccactccattccttagcaagcttgcgtcttgtgtctcctcccttgtttcttgttaatgaatttgcaaaaaaccccctttctcccaggttaacccctctgtctctgagggttttccttggctctgcagagcttctgcctttcctgggtgggcttaggtgacccagctgctttaatggccctgagcttgaagggaacccgggtctctcagatggggtaaactgtgcactggccccgggttgacttcatctctggttgtgcatgggatctccctcaactccctcagaaaccaatctaagaagcccagtccagaccctaaaataaacctgtttcttccacagtgccaagcatcattggcaacaaggatggagtctccttaaatcagctttcctcagtgttaagagagggtctgaagaatgggtatgtgactggaacatgtgaaggccagtgaggtcatgagcttcgagttagccatgtcactggtttcctcatgtcttggctgaagaactaagtccaagggtttttcttgaaacactagcaaatagttcccataggagagggattgatactagccacaagacaccctctcctgtggctgcatagagtaggtgctcactcagtgctatttcctggtccccatagctatttcagaagttcagtcagtaagtcagtaaggtctaacaagcacaaggtctaagcacctggctttgaggcttctctaggattctgaccttgtatgtgtgtgtctctctctgtgtgtgtggtgtatgtgtgtgtgtgtgtgtgtgtgtgtgtgtgtgtctgtgcgtctgtgtagtatatgtgtctgtgtagtgtgtgtgggtatctgtctgtgtggtatgtgtgccatgtttgtctgtgtgtatttgtgtgtatgtgcatgtgcttatgtgtgcacttatgtgtgtgtttctgtgggtgtgcatgtgtgaatgtatgtgcacacacacacacatgtgtgtgtgtgtgcgcacagataagcaggtagggaagtagggatgtatagtgggatctgagtggagccaggtgtgtactctgcaggccctctaggaagtttctagcacatacatccttgacagctctcaagaggtgttggtgcagttaatgtcatggagagagtgtatcaatgtgctattgtcacatgagggacttgagacagaagagtgggagatagtgacccagggctgtatgtagaatgtgtggttggttgctaagcattcatcctgcctgctgtagtttctttttttaagtacagatgtttctccttactctggtcgttactctaccttcaagtttacaaccctctttcttttgtcctaaattttatttttattttacttattcactttacatcctactcactactccctcccggttacccctcctagaatcttccccccttctcctctatgtgggtagggcccccctgggtaggtgcatctttttccactgaggttagacaaggcagccagcccatctagaagaacatatatcatagccaagcaacagctttcaggaaatcccctgttccagttgttcaggacccacatgaagacctagctgcacatctgctatatatgtatgtggaggcctaggtccagcccatgtatgttctttacaaccctctttccttagtgtggccctttctatgatttgtcccctactcaggataacactcatcagatttgccatcccatacatcctattctgacgaagctgaagtcctcagaggatctaagattcatgggaccctttaaagacacatgactttctctgtgaatcagtagaggacatctaccttgcttattttggggactttactgaaagttgaggttaatttggggactcacttcttgtttgtctaaaatttcacagtaatagggatccaggagtccttgggaattttacagcaggtctctttggagcttagattccagaatgcaagtcctgaggtataggtatctggacttgtcaatgtctttcttgtccttgttgatagatcccatgttgttgtgggaggaatgaaggagtataaacgtctgtaaagagtgaacagatgccctcttcctcttcacaccttatctatcaaatgggtctagtcctatagctttgactttccacacaccccacttcattgtggagatgaagtgaattaccttgggaaaggactttgcaagtatctgagaaagtattttggggggcatgctgtattccatatttgctttggaggaatgggtaatgttgggccagggagttgcccatgtccctgggccttccattttcagtgtttagaagtagaggttactgctgggtgagatcttctctcctcatcacagaacagaactctagggaaacaactaaaatgtgttgtcctcttgtatttggctaaaaatgttgatcagtgtacattactgtctcagtttgaagatcaagtctaaaagattttgaaaagaatgctgttgatgagtgtgacattaaccttatcccccaagacaagcttgtgctgtctttagactgtgacatttagctgttcatacttttgtgctgtagagtccgacaaagcccatccacgatagtccttggagtcatggggcactttttaaaagaaatatgaatacattaatttcctctaaggatctctattgtggttctatctgccttagacaaagactccagcaccttgtgtttaggacatcgacttcatggagagaatttggggtgggaggggacagtgaagagacagttaagaaataataagatgaggactgagatctcagatcatttagcaaaggcagatgatgtggcttttgggaaggggaaatttatagcagagacaacttcttggagtgctgacaggtatcctaaaacccaccaatatgtgggacttggcatctggagaagagttagtgaatgtaatgggaactgctctcagtagtgggcactggatgctatatgtccagaaccatgatgtgtttatagggccataagcatgttggagctgacaacacaactcacagctattctgttgctgtgaagagacaccaagactatgacgccttttacaaagaaagacatttagttgggctcacttaagtttagtccattgtcatcatggcaggaagcatagaagcatacaatacagacatggtgctggagaagtagctaagagctctacatttggatactgaggcagcaggaagagagagactctgggcttagaatgatgtcttagttagggttctattgctgtgaagagacaatattaccaaagcaattcttgtaaggcacaatatttaattgggactggcttacagttatagagattcaaagcattatcatcatggcaggaagcatggcagcatccaggcagacatggtgctggagaaggagctgagcattttgcatgttgatctgactgtagccaggagagacggtcttctccttcttccccttcctcttcttcctcttcctcctcctcctccttctatttaaacaatttttattagatttttcttcatttacaattcaaatgctatccccaaagtcctctataccctccccccgccctgctccctaacccacccactcacgcttcctggccctggcatttccctgtattgaggcatataatctttgcatgaccaagggcctctccttccaatacatatgcagctagagacacgagctcagggggtactggttagttcatattgctgttcctcctatagggttacaaaccccttcagctccttgggtacttagagacggtcttctaggcagctaggaggaggatcttaaacctcaacccccacagtgacacacttccttcaacaaaggccacacctattccaacaaggccacacctcttaatagtgccactccctgggccaagcatatttaaaccaccacaaatgggttctctggaacctcaaagcctacccctattgacacactttctggagcaaggctacactaatcctttaaaatagtgccactccctcatgaccaaatattcaaatctgtgagtctatgggggatcatttccattggaactaccacaggccccaaggactgttttgcaaaagggttagaatctttgggtttcagttacttttttttttttttttttgcactgagataaaataccgaagagcagcagcctaaatgtgtgtgtgtgtgaagattcatcttggattatggttaaggctctgcagtctgtcatgaggattaaatcacagcaggaagtagcttcagctataataataggagcctgtggcttgacctgtaacactgggatatattaggaagctgtgtgtgtgtgtgtgtgtgtcagagagagagaaagagagagagagagagagagagagagagagagagagagagagagagagagagagagagagaatactagttccagctaaaatcccaaggcctgtccctcagccatgcatgcacttccttcttcagttaggcattgtctctcaacagttccacaacctcccaaaatagcactgccagccagctagggaccaagagatcaagcacaggagcctgtcgggggggggcatttcccattcaaaccataatgcgttgcttctaaggatgacatgactcaggtgggccctgtgatctgacacccactcactggatcagtagaactgttcacttctgagctcaaagacgactcagcgctgtagaagaacagagccggttctcttatggatacatctgttgccagtcacatgcatctggtgcctctgtgccccattccataaggataccttggcaattccttaccagggacccagcctctctcacacatgctcagctgtttaaagtgtcacagtaacataaaggctgtccctagagctatttttcctctatttctaagtgcaacctaaaggttttaatatcaccctcctaagtgtgtctctgatgttttaaagatatgatccacactctctgtgtcagtctacaaggaaattgtctagtccatgcagagtcctgcttgggatagcaccagagacgttcaagaaagccttgtgatcatcctgacatctatgccatgccttttctggtgctctttgtcctggctaccctgggcgttccagtccctcaatgtattatgctacctcttcctaaacaatagtctttacctggcttgtgctccttctttgggattttcactgtccagccctagcttgcttcaccttcaggtttcatttccagagcaattgaaaaggttctgaagccaacatcatctgtgcaaagctgcagagcgatggaaaataagctgcttagcatattctgagcccactgagcctgtctgaagatggtgtcaatgcctctcagtcaggtcaccagcagtgcccaccccacaggggaattggtgtgacctcagtgcttacactttctggagaaaaggggcacataggttgtttttatcctgctcagtctctggtaagtctctctgtacttggagtgggcggctcaactctctgggtggttgtaggactgtctttcatcctcccactctaggtaccaaatatccctccacagctaaggaactccttctgataccaggaagggtaatgtttgctaagagcaactgtgtactccttgtttgttgtgtggaaaagaaaacaaattaagcccttgtaattatacagtcaggcatgttcttaaataaagctcaagcagtcagaactccatttaggatattaataactgcatccctgagccctgagccctgagtcccggcagctttctctccctgcctggctcatctcagccatgactgttccatctctcctttgctgcagacgttttcataaccccagccattttaagcaaccccaaccccagcaaaacctggttttctgatcccacaacatgcagtgcccctagtctgggctttgcaaagattatagatggtgcattttaaggatttcgtgggtatggggctctgttaggatttttctttgtcctgctagcactctcatatttttgtttgatgacatgagtatgggagctgagcagaactgggttttgtttccagccgagtgctatctaactcgaagactttggtcaagttatctaatctccctaagcccctgctaacactgtgtctctcataggcttttatgggaacctgcctgggaggagtaatacccttgaattcctggcatatcgtacatccatttcttttccatacctctgggcgaccccttgtgtcagcattctagggaagtgtcttgtttcctttggtcatgattcatgcttttctttgatggacttcaaccaatccagatgcctgttagatatggtaaagaaactgcagaatgggtgcatctgtttgggagcctcaaagggacacagagcaggcaccatcatgcatgctgagtggttttatttcatgtgctgttctgagggtctccttggcatgcttcctttagtgtccaagggttaattacttaagtaacacactgccttaatcaacaggctgtggtcctttatgaacatgtgtcccaaggaccatctcattctatatgcagtactaagatgaaatagccattgctaccaccattgtcccatcagggaggaatctgagtgagtgagtacagtagctagagttagtgcagtatggatagggacctgggtctctgactctgaatcttacttcttttctggtgcattgggccatttcctcagccacaaccaatacctaggagggcagccacctggtttctagaattgaggctgtttcaaggctttccatgggccagttaccacctttcacttctttctgtttctatcccatgacttggaaagcataggacagatttcactggtggtattgtgacagttgagccattgctggaaagtagcttgaaaacagaagaccaattcaaagttttcatcacacagttatgtgaatagtacatcaataggctctgtgaaaggcagggggacaggtgccttggaaatgactctccgtggcaaacctgcgccttggggtgggagagagaactgaggacactgaagcaagatttggcccaggcagagttggggtgttcaatttagttgtgaagataaaattagctttcttaggctagtgacgtcaacatattaccatctgctggatggtgctgaccgttccaggctgagggattcttgtactctggagattctgggaaggatttcaggcttgttcatgaaagaatatttgtagtagtgtatagaaagagagggagaatgaatggagagtgtgtgtgcacataaccacaagcaatcagggagggaagccaaggggagggggagagactgtgttaagttccaggctaggtattttcctaacaataactgcataattggtactttccctgttttactgaggagtactgggggactctggaactcagcagggttttgtaacttgcccacgatcacacagctagtaaagatgtattgatatttgttaatgcctgctctagatttcatgctatttctgttgtaactggtaaaacaaagtcagttgccctccctaagcataactaggaatccagcgtcttcaaacagggatattttaatccccctacccccccgtcaaaaaacactattcctatgctcaaactcaagaattcagcaccatggccagggctcgcgcccaaaccttccctcacctacggggtaccagtgcaaggcttctgagctgttcacatagagtaggcaggcaccctgctctccatttgccagcctccctgatggaaagcagacctacaggaagcaggggaagagctcttcccatcatttacttagggataggccagagaggggcaaggctgtcatgtaggatccggattgacgtgaacagaggaatagagtagggccattggattctgaaaggtagtgagccaccatgatcctttctctttcaggataaaccctcagggtgaactttctgtgtttcttctgttcagtgggggtatggagaaagtgaacttggcataggttttcctacaggaatgggcaggggaggccaaactgtcagagcagctcagcagagctggtttagttatgctgtctgtagtgataattttccttccttcttggaaggctttcttctacatgcaacaaaacagtcttgatctagagatctagacatcatccaacatgtggatatgtgtgttcccacatgcatgcatgcatgtacacacacacacacacacacacacacacacacacacacacacatacacacacacagagtattttgatatgtacatggtgtgtggattttggacatagtggaatcggattctaacattaccggctttgtgaccttggactagcttacctcatctctaagccatggattctttatctgtcagatgaaaaccaatcattataataacacggaccataaaatgttgtcaggaagagtcaatgaagaaatatctttaaagcacatagtagttagtgcctaacaagcactcaataaacgttgctcattatttcaatttccctgaaaatgatttctgtatcccaattttcttcagtttgctcacgtgattattattactaactatgggaaagtccccatggcagagaaaatgattagcaagataattaattgttttcacttcagtacaaagggcaaggttttaaatgaagttgcggtcagccatagtagactgggaagaagaatcccaatttgttcccttggccagtgaagatccgaccatgcctcagtgcataatttaatttgtttcagcagtgatcatgattggcatacagacatccttctcctctgtgccaagaactttgtgttagaattttaatccatatgtgtttatggtcactccatgatgaccgtggcttttacctgggcccatgaatccatgtgttttattctctttccttccttgtgtctaagttcagttcaaagtgcctcctctccagagtggagtgtggtgccacttaagggcagaggcagaagacttttaagttcaaggtcagattagggattctttgtgaagactcaccccctacccccatcctcccaaaccaaaaagccaaaacaacccaaacaaccaaaaacattggatctggaggtacagctcagttgattcagagcttgcttagccttgggttcaatgtctaatatcacagaaatctggcatggtggtgcatgaggtgtataaaatgacatcgggtaggaggaccaggggtcccatattattgttgaccacatgatagtttaaagccagtctgggatactgtgagatcccatctaaaaagacaaaaaccaaaaagtcctcccaaactcagttcctatttctttctcggtgtgaagtgaagaaagaactccctggtaacgtaaccaagtgtgtagtggtgggtcctgtgttccaaatcttcaacaggagatgaaagtattatcttgtttctcccttgcaagtctccctggaactgccatgtgtgttggggcgtggacttgcttttcccaaacatttttgcagaattgggcaacagaggccaaaagcctgtgcttggtataaattacagaaaacagtgctgtaatgacattgtttggtgaataaattaaaccctgagtcatgagggcactaacagagagagtagagaagtataattaaagaagaaaaggagaggctatcagctgatgcctggagtgagacagagccgagacaggactgcatgggagggtagcaggtctcttcccacagctgcagctcagaagaggggccatggctgctacttacagtcagagaggctaaggaaacaagccagtgcttctgacactcaggagattgtatgggaggtgtgtgtgtgtgtgtgtggggggtgttagtgaacactaaaccatgtgggctttagaaggtctcaaactccctagcagctggggataagcttgggcccaaggtctctattggtagatgggactctgaggaatggggacgaggtcaggggtggagctgggattctgtgtagttattgtgttctaggactcgtttttttcccaccatctcttgtatttcctgtgggcttatcttgtgaatgctttctgactttctcattctaacagtctaaagacaagcatctcagggcaacgattcctgtatatttgagtgttgcaaccaggctatgacactatactgtcaacaaggagtggagactatggagaaagtataaattcttgtctggtttggacaagacctcttctgtggattgttctagaaacacagctagtgaaatgattgctgcagcaaaccatcatagctccttcacccaggacacccagtgactggcatttcccatcctggaatggccacccagggagaatgtgttggatggtggagtaagtggagaaagcctttatatacagtgaaattttgctgacactagcactcactgctctagaaaagtcactttcctttcttgtttacagatctgagtcagcacttaggtgtgtgacacacagtaggcactcaataaacagattgatcttagaacctgatgtccaagataggacatttagtggactagcccagtgggattccagaacaagagagcatgtttgggcaaaccaggacatgcggtcttctgtcgttggtatttacttggatgtattacttttgtgtttctgggctgtgtagagaagaacaatcaaggccttaatctttctttctttttctgttttgagtctgggtctttcagtgaagtccagactggcctggaacttacgttgtaaccaaactgtccaggaggttgtgaataccctgcctccagctcctgagtacagggcttataggcatgcattactgggtctggggtcatctcttttctgttttttttcttcatcactttcatgtgtgtttgagtccattccacagatatttactgaagattttatgtcccaggtatattgataggcatccatgacccatgtacatcaagagaagctctggatttagacttttagggtcccctttatcgaacaggaatctagatgccatcttgagatggcagtgtgacaaatgccaacttaaaggaatggataaagtactctgggagcttaggtggggaaatgagtcatctagaggtggtggccatggaagacttcccaccagaagggtgcttctgagagttacagaaggcaatcaagaactcagaaggcgttctgggagaaggtagagtgttgagccacaatccactcaacaccacgtttccaacaccactattccgaagggtagaatgatgataagataggtggatgcttgacccacagagcacactgactgattgctatctgatgtgaatcatgccatccatcagcgctgttgtgggagatgataatgtgagtccagaggaggcggtcctgctgcaagcatacagctttgcatttcaggggccaatcttggccagggcacaagaggagaaagaaaagatttccagacaccaagaaccaagaagaggtttgccgtgaccctaatagtggtccctacgccattcagtgatacagtgtctagcatcttggacaacttttttgcctaggctaaccgaagggccacagagctggccaaaacagcaagaccatgtgcagttgtagcaaggccacaggtctccagggtatttctggaagtgagagatggataatgaaagggaacaggaaaccctaggaggaagttggggctttgcttagatacagcccatctgcctcaccatccatggctttgaatgcagtatgaaaatgttcctcattattttccttggatgagtttgctatcctgatgatattaattattcttaaaggtcaacagcgctctttcgaatccccttctgttctatcatgtaatcagttaattaattggaaaccatttagccgcatctgctgagcgagtttgtgtagtgcaatggttgctcccgtgacgaaggttctctccatgtgcctccatttgaaaactagagtgcaccgccccccttcttcctgccctctctgctggctgattcccattcattcacagttgccttcagaggtgctatctcatcagatttcctctttgtgcatccttacaggtaatgggctcttaccactgagtgcctgtcagatgacaaggactatgtggggtgcctgtatgtgctgttttatttgatgctcgcccactaatgtggtagagctactcctccattcagttcaggggagaggagagaggcttagcttggtgaatggagctgtccaagaatcatagagctagaaattgtgtgagcaggaatggaggagagagagagagagagagagagagagagagagagagagaaagagagagagagagagagagagagaaccttacatccttgtttgctacagtgctggtgtttccttgtgatcctaggggaggtgaattggactgttagtacagttctcatttactctctcagtcctgggctctgcatttgacaagtgacagcccaggccttttttattgggcttttatttatttttttcctgatatctccaaaacctgatgcttgccacagagctgaaaccatgtacctgtgcttatcgataagaacagcatggtgctatcccgcaggtggtgacaggtgagcgtcatgtaaggaccagaaacaagaatcttagtagcaccctgcctcctcctgctgctgctagcaggaagcaagaccaccaactctgaagccagggagctggggtgttctgtccccctttacagctgcttacctggggtcagttatgtgcattcttcctgtccatccccactccttcttggatgtctgtcttaggacaccttggaccttcctgatgtcccctctcatgctctctagtttacaactcctgcttttatcctctaggttcacaatctgtggagttcacaatggtatctttcctgggggagtgccccctgccccagctttcataaaggttcccagatggaaaacccagagcttgattttggggggaagaaaacctctgtgaaaagtccctaccccacctcaagcgtgtgtgtgcgcgtgcgcacacacgcacacatgttcatgcatgtgtgtttcctgtgtgtgtctcctctgtttgcctgtctgcacatgcaagcagggaggaggcagattcttttcatcttgttagttttcaatgcaatgctaacccttccccctactgcctaatgtcaccatccaccaggacggtatcccccacaccgactttcagatgagttatgccagatctcttttccagttattgatgatggcatttgctcccagcagcctgtgcacaaagttgttggatcctagcaggtgtctctttacatccagacagatatcctagtagacatattcttcagcagttcagagtttgacccaccaaacttttgagggtatggacttgattggagtcccagtcaactcaatctggggggaaaaatcaccagatcaatggttctctaagtgtggttctaaaacagggacatcaacattccaggaacctcttagaaatgcaaatttcctcctgtcctacctaatcagaaactccctgaggtggcaagagccttaaaaaaacaaaacaaaacaaaacaaaacaaaacaaaaaaaccaacaaaacaaaacaaaacaaaacaaaacaaaaacccaaaaaactagcctctgggtgcttctgttactaggtgtgagaaagcttctagggactcctctaaacccacactccttaaggccctattctccccaggttctcatcttaaaggacttgcatgcagagatgattaaatcagagcctggaaaaagctccaagcagccttgtactcacattctcaatgtttctaagacagtcatagattgtcctttaaactcaaaggtggatgatagaaagaagactggtgactggcctccttaaaaggaatagtttctccatctaagggcagcttgctccagccaggttgtcaccccccacccccccatacagtccttcccagggctcaggtttccaggcatgtcacagttttctcttgtgaagttcctggactgccgtgggggtgggcagggaccttggctcccttcctcctgactgagtcccctcccctcctttagctgtgtaaggggttcttgattcttccttcagaggctctgtagactgtatctttgttctagtcacgacagcttttgaggaaaaaaagaaaaaaaaacccaaggaggtacgtcatcaatcacatggtgcccctttagggccatggccttgactgcccagcttgcacaccacgtgggtggcctggcccagagcctgaatccagtgcctgccctgcaggcctccctgggattccagggagcccaggagctttgggtcaattagcttttggttaatttgctaagaaactcggaaggaacaggaacggagtcccccagaatagcctccggaacactcagggtctagtgcgaagtagacagtgtgaggaaacaaacttgaaaggaatgtccttttactagtttgcacaagcagaggaggtcaggtgaggggcattgggcctcagcccacaagctgaggaggggactggggtagaaatgaggaggcaagctatttgctgcctcattaaagtgctttccatattattttatgaacctatgtgttttattacattaagtgatgcgtgaatgcagaggatcgtggcccaagctgtggtatttattttattgggcttggacctggtgagtagagatggctgttctaattaaggagtagggtatgccatgaaggagaagacataggatagtccttgtgacagctgctttccatgccccattcctcatacccaagtcacttttcagaactcatgtggggagcctactattacctgccccctctccccatttagaggagaacaaattgaggtaccaagagattgcatagattatactagcatcctggggatggggattgcagagcaagggctggcataaaagactcccatgaggtcaaagaccatggcctacctatccctttcatcactcactgcatcagaagtgaacccagccaagagagaaggactgatgtgaggatcaggaggtggggcacttcctggccctctccttagttacccttgctggattattttgggaattttttctaaccactagggccttcattttcctctcttgtgtccaggcttcagcaccagcatgcccaggcacagggaaagaaggaaggaccacctattgtcttctgagtgtgcccttccaccctgagagtgggagactgtgttgacacaggaaagcattcttaccccaagggaatagtgaagagctctcagcacctggatcctggctgctgggctgtttccttgatattcttgccaggctgtagtcaagaggggcgatttagaactgaaggctgtgagaggaacgggatcccagccagatcggggctgtcctttagtctcttgctgggaaagaccctcttgtggatgccagaggcagcaaagagtcaagaagaagaacaccttcatctttctcagaagttgattcatctatttttggtgggaccaaactgagatggagggtgagggagagagagtgtgcaaatccgagtgaatgcaagcctgcaggtgagtgtaagtatgtgtgtgtgtttatggtgtatggttatgtgtatgcagcgtgcttatgtgctgtgtgcatgatgcatgtgagcttgcagttcccacttcccagtgggaagaagcagaagccacacttgctgcagctgggatcctctttgttccttggccttctccctgctgggtcctctttgttcttctaccctggctgctgagaaggaagaacttccctccctccagagcctttggaaattcatctcttcaaaggactattggaagacttcagttgaatttgccgtgtgtctgttgaacttgggttctggtactataaagggtataagaggaaggaaaaaaatggttctttgcttccaatgaaaacagtacattaggtgtggccataggatatttaaagctgacagtctgagatatgggcagtggaaaatgcccatccaacattgagtgggggcggggggttggggtggggaagaagaggttgagaagatgtcagcatggcaaacacaggctgtcttgttgaaagaccactgaggctggcctgtaggatgaggacatgaagggtgcaggaagcatagggtgcagtggtgtgctagagagggaccaggatgctgtcagaagcagttagcatggagacaccattgggttcatggtgagttttcagggctatgtatgacatagagataaaggctgaaaagccaggagaagcaacaggaggttgaactcttctcagaaatacttggattataaggtagattttatacttaaccaagtgggccaagaattctggaagagtctaccattttgtccccagctggtctcctatgtatgcagccagagtcttactcagaatgtgcgaagtcctgatcccaatcttccagcctttagggatgctagaaactgctcagtgaggtggtcttggacaacgggtgtactttcttttctattgaacatgctcttgacagctggatttgtgggcagtgttgtcctgacttgactttgtgagctagtaattacactttcccagatgttgacagcttctctttccaccaaggcctccagtcaacaactgggtttcccagatggtggatcgctctgccttggacatctgtggctactaagcacttgaagagtggccagtcctaattgagatgtgctttgaatgtcaaatgcacatttcaaagacttactacaaaaaacaataccaacataagaatgaaaaatatctcagtggtgtttgatactgattgcaggttgagttactgatattttcaggatattgatggatattgatacttctttccaccattttaaaccacgttaatagaaaatttcagctggcatatggatcttgcatttaatttctgttgaagggtactagtctagattaatgtgatagtatatacctttaatctcagtacttgtgagcataacacaggaagactgagaatacaaggccagcctggtgtatataccaagacacttgtccaccaactaaccaaccaaccaaccaaccaaaagctagagagtagagagataggtcagttggtaaagtacttgccttgtaagtacaaggacctgatttctaccccagaacccaaatgatacctaacaggtaatgcatagttgtaatcccggtgctggggagcccaaggcaagaggacacctgggaatttttggagaggcagcctaccctatttgcctagttacaggctagagctaccaagtctgaaatgaaaggtaaacagcttatgaggaagacttgaggttatttccacaagcatgcatacgcatgtgcaagcacacctacatgcacactcacgaaaggcaagcaggcaggaaggtaatgaaaggaaaagatagaaaaggagaaaatgccagcccagggtagaagttgttagtcttttcctatgaaggaccacagagcattttcgacttacagaattgttgcatctatttgactccactgtgaatgtactagtgtaaatgtaaccttgtatcagctatctgttgctgctataacaaattaaaacagttggtgatataaggcaatgtaaatacaatatcttatacttccacattgtgaagcctacagtgagtctctgaggtctagagttcatgtgtcagtagggccttgctacttcctggaaactttgggagaatctcttttttgatgtttgcagtttctaatggccacacacattcacagcccctcctttatcttcaaagccaacatctcatccttcttcgactagcttctttggctacatttctctctgaccttctctcttcttttggcttacacttaaatgcatatttttattaattcttttgatagtttgatgcattgtatcttggtcacagtgaccactttccccaaatccttccagatacagctctctttccatacccaaccactggtgcccactgtttcttttgtaaactcactcagttcaattagtgcaaagtatacatgcttggatgtgtggccatccactgaatcgtgttcctttgcacccgtaaacaaactagtgcttctctcttagcagtcattagtcccctagggctggggcttagtgactgcttcaggtctcagttctggaattttgtgtggcttgagcctgcacaagtcttgtgtctgttttgaagggcttctgtggttactgttggacaacaatgtaacataaggaaatttccctggtgtccctggttcacacccttcactacctccatgaggtcccctttgtttggaaatgaacagtgcgtgtgacacattctgaacatggttatctttggaaggctattattctgcttagaatatggccataggcaacacaaagacagcaggaatgactgttttccaataaaactgcaaaaaactagactgccagcctactggctggggctttctgagtcttagtctagaaatgcattcactaagtatgtgatgagagtatctttttttttttttttggttgatatgctacagtgaagggaagggtctgtggtacaataagtttgagagactcagtaagctagggacttctctcatttaaggccttgagaaattctgccataaacaagtctcttcatattttctgcagtagaaggatttgtcagatattatgctttcccacccggcataatactgatgagcatactagacacttagattcttaggaacccacccttggaatccctgacctagcccagcagagggcaattgagagaaagctgcctccagtctcctgatgtaaggtcaagactccaggcacgtcacttgagatttgattagagaaagcattttggcttcattaaagttcattaaatgagccatccagtgtaatttagctgaataaaaatggctcagatggctttaaaccccacccccttttacaacaatttaattgaggcaaaagcaaatatatcagtgatgcagaaaaatatttctcggccttcaagaagactcttgggcgtcagtatccattttcttgttatggaatctggattttaagaggatgggttgtggggtttcctcagtgctatcattaggtcctggtgatgagaccctccccctaatgctccctgtcactctcagtgcatagaagtcacagagtcaagaccatgaggggtgaacttctggctcttgagcaagtggtcagtagaatgtcagcccaatcttactcccataatgctgtggtctgaatgttggtgctccacagattcatttgtatagttcctcacctctaaggtgatggtcaggaggggcaccttcacgatgagattaggtcctaaaggcagagccttcagtagtggatatcaaccaaacatagaatatcaagttacagtaagactaagcacctccgctcatattaaggctggaagaggcaagctggtatgagggaaagggtcacaaaaccaggtgaaagagtccgagacagcctctgctctctctgttaggagttccacaagaagacaaagctatacaactataacacacatgttctcttttatgtgggtggggggggcttgaaaaagggtgcagcgacacatctgaggaggtgttagattttaaggaggggagagacacatctttcaaaaactgcctctgtgcaagaaataactaagctttgccgtgtgatgcttccacatggcaagcctcaggagtcactaggagctgtgggattgggagggggtttctggatagcagagctgagtgcacagaaaactcgtgatgcgcggaggggatgtccttcagcagctgctgaatgaatcctccaggaacatccagcagcagtggaatttgtcttgggaatgagagttgaaaatctttttggtcttctgtttttctatcacactaatctcttgcaggaggaggctggggtatacctaggggcttaacaaatggaccagtagaagattggatattagcaattggaacttgtctgggaggctggttcatgtgtgatcatgtgtatacagcgtgagggatgacagcataccatgggcttagagtccttcccaggctctagggggctgttcaaattggttgtcatgcccttgggtcaaatgaaagggctgaagacgtgtgtattaattttctgggcctactatgacaccacaccatagttcaagtggcttcagcactttacagatctggaggctcagagtccaagttgctaggtttgatttctttcaaggcctctctgtttagtttttggtggctatattctccccatgtctctccatgctctttcttctgagcatttcaatgcctgtaaagacatgagccaagttgaattaggaccaaccctaatgaccacctatagtctttgtcacttgctctatagaccttagctctaatagtgttaatactcttaggactccaacatggaaatctgtagggaaagcaccatttcataccatgaccatagaaatccaaacctatattatagtggctgagatgatgcagaggtggggcaagtgtcttggagttggaaaggaagacagctgacagaggggtctgtgatgttgacgtgagtgggtatgggtggctggttgtccaggttagtggtacatggatggagcagaatggtttaaggagcatgaagaagtcctgttctttcctcagccatccctgacacaaccgaatagtaagacatactgcccatggagttgacttctgctagaagagctgctgcttctaaaaatttgtcccactcttagtccaggaagtccatcatctctgtcttcagaatctccattgatggcttccactgtccccctttcaaggctcagtgcccaagttaagggccatgggagagctactctggttggattctactgacagtagtgtccatctgctaaccctttataggctaacaggactcctaggctagagggtgactatcagtcatagggctctgctcctgttaaataaagatgtaatctccctttaggatggtccaggggctgcttcatcagagaacctgtctaccagacagagtggcagattgcctcagaggatccctgttttctgcatggttagtgtaagaaaggccgtctcagccctttctctccacagggtccagagtgtggccatatgtgttctgtctttgtgtccaaagctcccatcatccctatttattgcctctggaccacagagtctggctgaagaagccagatacacagaacaaaattaatggctttatatgggagtctcagatgagagagagggacacacacacacacacacacacacacgcacacgcacacacacaggcagacagagacacacagagagacagagacagtgagaggacaaagaggatatccaggaaagtgtttgatgcttcatttcataaatacccactcaccaaattaatttgatgatcagatggttgagatgctggccgttgacccaagcaaaagtcagaggcagatgacaatggatctgctagggaggaggcactaggaggaggctgccatagggctcggaggcagagtgactcttaattaaactcttgtctgatgaacagcatatccagagcatcaataactgctgacagatggatccaggtgaggtgtcagcaagaaggaaaactggggcagtgagttttgtccatctggatgctaatgcccggcaacgctccagacctccattttctcatctatcctgtgtcatgagaatgcataaatgttcaagagggtaggatggccagaggatggcacaccctgcttgtgtttgtgaagtatatggttgtctctggacctaggtattactattgtgagtctgggtgcccaggttagacactgcatatttttctgggactcgtgtggcagtgtatttgtatgtggaaatgtgtgtgagggtgtatgtgtgtgtgtgtggatagtgtatgagtaaagtagtggccactctataatgtgcttgagaaatctgaagaatctttctcatccagatggggctggatgggtggaggaggagtgggctggagatgaagccacacccctgtggcagaatagaagctcattcctctttaccaggtgtcccaggcccccagctgtcttttccatgtaatgaggagggggataatgctatttcttattctttatttgcccagagtgcctatgattttctttctttcagaatccaattttctcttgacatttctgcctgttgtagcaaagcgtgacctttgtaagaggacatggctggcagcctactttctgcctggggctccccggaactcctggcaggctccctgcctgttcctttctcagaaaggagctagtgtacctgggccaggcctgcctctagggtggcttgttcctatcagaagcctctttggccagtggcctgctttatgagtatcctgtgcctttaggctcagtgagcacagggtccctgcaggctgccagtccatagcttctgcagcataggctgtgttcagtggagctctggagaaaactggggatgtaaaggtgcaggctgggaatctttgcaaatttctgccagaattcccttgtgttgagtttctctctctctctctctctctctctctctnnnnnnnnnnnnnnnnnnnnnnnnnnnnnnnnnnnnnnnnnnnnnnnnnnnnnnnnnnnnnnnnnnnnnnnnnnnnnnnnnnnnnnnnnnnnnnnnnnnnnnnnnnnnnnnnnnnnnnnnnnnnnnnnnnnnnnnnnnnnnnnnnnnnnnnnnnnnnnnnnnnnnnnnnnnnnnnnnnnnnnnnnnnnnnnnnnnnnnnnnnnnnnnnnnnnnnnnnnnnnnnnnnnnnnnnnnnnnnnnnnnnnnnnnnnnnnnnnnnnnnnnnnnnnnnnnnnnnnnnnnnnnnnnnnnnnnnnnnnnnnnnnnnnnnnnnnnnnnnnnnnnnnnnnnnnnnnnnnnnnnnnnnnnnnnnnnnnnnnnnnnnnnnnnnnnnnnnnnnnnnnnnnnnnnnnnnnnnnnnnnnnnnnnnnnnnnnnnnnnnnnnnnnnnnnnnnnnnnnnnnnnnnnnnnnnnnnnnnnnnnnnnnnnnnnnnnnnnnnnnnnnnnnnnnnnnnnnnnnnnnnnnnnnnnnnnnnnnnnnnnnnnnnnnnnnnnnnnnnnnnnnnnnnnnnnnnnnnnnnnnnnnnnnnnnnnnnnnnnnnnnnnnnnnnnnnnnnnnnnnnnnnnnnnnnnnnnnnnnnnnnnnnnnnnnnnnnnnnnnnnnnnnnnnnnnnnnnnnnnnnnnnnnnnnnnnnnnnnnnnnnnnnnnnnnnnnnnnnnnnnnnnnnnnnnnnnnnnnnnnnnnnnnnnnnnnnnnnnnnnnnnnnnnnnnnnnnnnnnnnnnnnnnnnnnnnnnnnnnnnnnnnnnnnnnnnnnnnnnnnnnnnnnnnnnnnnnnnnnnnnnnnnnnnnnnnnnnnnnnnnnnnnnnnnnnnnnnnnnnnnnnnnnnnnnnnnnnnnnnnnnnnnnnnnnnnnnnnnnnnnnnnnnnnnnnnnnnnnnnnnnnnnnnnnnnnnnnnnnnnnnnnnnnnnnnnnnnnnnnnnnnnnnnnnnnnnnnnnnnnnnnnnnnnnnnnnnnnnnnnnnnnnnnnnnnnnnnnnnnnnnnnnnnnnnnnnnnnnnnnnnnnnnnnnnnnnnnnnnnnnnnnnnnnnnnnnnnnnnnnnnnnnnnnnnnnnnnnnnnnnnnnnnnnnnnnnnnnnnnnnnnnnnnnnnnnnnnnnnnnnnnnnnnnnnnnnnnnnnnnnnnnnnnnnnnnnnnnnnnnnnnnnnnnnnnnnnnnnnnnnnnnnnnnnnnnnnnnnnnnnnnnnnnnnnnnnnnnnnnnnnnnnnnnnnnnnnnnnnnnnnnnnnnnnnnnnnnnnnnnnnnnnnnnnnnnnnnnnnnnnnnnnnnnnnnnnnnnnnnnnnnnnnnnnnnnnnnnnnnnnnnnnnnnnnnnnnnnnnnnnnnnnnnnnnnnnnnnnnnnnnnnnnnnnnnnnnnnnnnnnnnnnnnnnnnnnnnnnnnnnnnnnnnnnnnnnnnnnnnnnnnnnnnnnnnnnnnnnnnnnnnnnnnnnnnnnnnnnnnnnnnnnnnnnnnnnnnnnnnnnnnnnnnnnnnnnnnnnnnnnnnnnnnnnnnnnnnnnnnnnnnnnnnnnnnnnnnnnnnnnnnnnnnnnnnnnnnnnnnnnnnnnnnnnnnnnnnnnnnnnnnnnnnnnnnnnnnnnnnnnnnnnnnnnnnnnnnnnnnnnnnnnnnnnnnnnnnnnnnnnnnnnnnnnnnnnnnnnnnnnnnnnnnnnnnnnnnnnnnnnnnnnnnnnnnnnnnnnnnnnnnnnnnnnnnnnnnnnnnnnnnnnnnnnnnnnnnnnnnnnnnnnnnnnnnnnnnnnnnnnnnnnnnnnnnnnnnnnnnnnnnnnnnnnnnnnnnnnnnnnnnnnnnnnnnnnnnnnnnnnnnnnnnnnnnnnnnnnnnnnnnnnnnnnnnnnnnnnnnnnnnnnnnnnnnnnnnnnnnnnnnnnnnnnnnnnnnnnnnnnnnnnnnnnnnnnnnnnnnnnnnnnnnnnnnnnnnnnnnnnnnnnnnnnnnnnnnnnnnnnnnnnnnnnnnnnnnnnnnnnnnnnnnnnnnnnnnnnnnnnnnnnnnnnnnnnnnnnnnnnnnnnnnnnnnnnnnnnnnnnnnnnnnnnnnnnnnnnnnnnnnnnnnnnnnnnnnnnnnnnnnnnnnnnnnnnnnnnnnnnnnnnnnnnnnnnnnnnnnnnnnnnnnnnnnnnnnnnnnnnnnnnnnnnnnnnnnnnnnnnnnnnnnnnnnnnnnnnnnnnnnnnnnnnnnnnnnnnnnnnnnnnnnnnnnnnnnnnnnnnnnnnnnnnnnnnnnnnnnnnnnnnnnnnnnnnnnnnnnnnnnnnnnnnnnnnnnnnnnnnnnnnnnnnnnnnnnnnnnnnnnnnnnnnnnnnnnnnnnnnnnnnnnnnnnnnnnnnnnnnnnnnnnnnnnnnnnnnnnnnnnnnnnnnnnnnnnnnnnnnnnnnnnnnnnnnnnnnnnnnnnnnnnnnnnnnnnnnnnnnnnnnnnnnnnnnnnnnnnnnnnnnnnnnnnnnnnnnnnnnnnnnnnnnnnnnnnnnnnnnnnnnnnnnnnnnnnnnnnnnnnnnnnnnnnnnnnnnnnnnnnnnnnnnnnnnnnnnnnnnnnnnnnnnnnnnnnnnnnnnnnnnnnnnnnnnnnnnnnnnnnnnnnnnnnnnnnnnnnnnnnnnnnnnnnnnnnnnnnnnnnnnnnnnnnnnnnnnnnnnnnnnnnnnnnnnnnnnnnnnnnnnnnnnnnnnnnnnnnnnnnnnnnnnnnnnnnnnnnnnnnnnnnnnnnnnnnnnnnnnnnnnnnnnnnnnnnnnnnnnnnnnnnnnnnnnnnnnnnnnnnnnnnnnnnnnnnnnnnnnnnnnnnnnnnnnnnnnnnnnnnnnnnnnnnnnnnnnnnnnnnnnnnnnnnnnnnnnnnnnnnnnnnnnnnnnnnnnnnnnnnnnnnnnnnnnnnnnnnnnnnnnnnnnnnnnnnnnnnnnnnnnnnnnnnnnnnnnnnnnnnnnnnnnnnnnnnnnnnnnnnnnnnnnnnnnnnnnnnnnnnnnnnnnnnnnnnnnnnnnnnnnnnnnnnnnnnnnnnnnnnnnnnnnnnnnnnnnnnnnnnnnnnnnnnnnnnnnnnnnnnnnnnnnnnnnnnnnnnnnnnnnnnnnnnnnnnnnnnnnnnnnnnnnnnnnnnnnnnnnnnnnnnnnnnnnnnnnnnnnnnnnnnnnnnnnnnnnnnnnnnnnnnnnnnnnnnnnnnnnnnnnnnnnnnnnnnnnnnnnnnnnnnnnnnnnnnnnnnnnnnnnnnnnnnnnnnnnnnnnnnnnnnnnnnctcccctcccctcccctcccctcctctcctcttcttttctcttctcccctcccatttcccttaccttcctttttgcctccccttcccatttccctttcccttccccccttttcccttttcttgcttagaaggtagttgatgtcccccaattagcctgccatcttcatgtcttagtcccccattaaaaaaagaggtatttagttaataacacatcacccctaagagccacccaacacttcctattgctctttggagtaataccagtctcttgccaagatctgtagatgtggcatgaatccctggcttgcttatctacagtgagtctctgaaatgttattcctggctttcagcccattctcattatttcttttgccaggtcccatgttaccttgtcagaaggctcttctccgagcacccgagtgaagctgtccccctcccaattgctcatgtcactttgtttatactcttccttctgcttactaatttgcaatttgaagataaggttctgtgtttcttgtcagtggactacctctaaggcctcagcctagcctatagttgactttctatagcaagtcatttaaacataagtgcacatgaaagcatgtgtgtgtgtctgtgtgtgcatgtgcgcacacccacatgggtgtgtgtaaacaggagtctgtatttgctttgttacctatgtgtttagtagatacaaatatacacacgttcatgtggagatggatattcatctagatggaatcagcaccgcatctgttcccatcagcagacgaatacattgttcctgggttgccacttcatttcttggggtgtctaactactgcctttaagggctgtcgtcacatcaaacgttgtttgttgagcccagcaaagtaataactgtagacgtgtttcttcttttattcagaagactaatggctgctcccttcccctgtacatcctaatgagaacaattaaatagccattaggagaagagatgtgtgaacaaaaggttgatgtcttgatctcttgaatggccatgtgttctgggggagggatggctaagaagaattgataagaaacctgaagatgtcctgcctgtgtggatgtaaaagatattgtgagcttagctatccacagaactattgcctagagaaggttgcttcaagcaggctccctgagcatttatgaaaaggtattctggaggggtaaccaagagaaccacgttgtttcttgaatgtgtaaaatcctatcctttataaaggctttagcatcctcttcgcatctgcccccctggtctcaactgttagcagaaacaccattagcaatgtatatgatggtacataatgatagctctatcattagatacatcgggtagacattagagtgaagaaaaagaagcagagcagagcctgcctccagatgccaagttctacacccagggcattcctgatgctggatctgtcctttaactgccccttttctttgtcaattttgcagaaacttgtcaagtaaccggctcaccacactctcctggcagctcttccagacgctgagccttcgggaattgtaagttcggaattgaagactttgtccaggtggtggagtgctggtaatggatgggtgggaagtatcaagagtatcaagaattggagccacctggtggctgggttgtttgggttggagagcattgagcatatcatgttcagggacagtgacccaccccatctctggatttcacttcagatgctgttgctaggcacattttgtttcgaaaagactgagtcttatcttctatcagcatttagttttgttatctgcaggaaattagcagtagcagttttaatattgataataataagtatctcaattaatttgtaataaacaacatttgctatacataattttgtagctttaccaggtatgcttttgcttacatgagcttagatttaccacaacaagagccatggaaggtaggtatccttttctgcattttgtgaactctgagccctagaaacttatttgataatcaactacagttttatttataaggacttgcataactgatactagaatatgggcttccagcttccaactgaatggcctttacagggctcatgatttcctgtcaacttatttagctcgccatctcggcgttgtgagcatgggagagggcatttatttgttttatctgtgtgtggactacttagctctgttgcattccaaggctgatcaatgcattcctaccctagccagccattttgtgcaaacagatgttggctggatgagtaaaaattcgtgaccagtgctgggggaaaataactcatgttgctgtgtgagtcatcaggtcatctctgtgcatgaaggacagtgtattatgttgagggaataaatcaaggaatatattgaagtggaattgaggcatggatggggttagggagactgagttttagagacactgttcgtgtgttcctttttacttagtgactcagatccaaattccctgactgtgagcacagtgcctactaagaagcaatgaccttggaccatgaccttggatctctgccttggctacaggcctttcaccttcttctctttctacctgtccagttataaccttggttttctcagaccagctgatagaaacgagaccatttacaccctagtaacacattccccctgacaactttgcatattatccttgtccccatggcttgattgcttacatgacactttccacagccatcccagggacagatagagagaagttatcactttgaaggtgttgctaactgggatttgtggtcatctcagtacttagaaagtaaaaacagaaagatcatcagttttcgtttagcctgagctacataagttacaggctagtcagtttaggctgcacaatgaaatctagccttaaaaaaaaggcaatattagtgtatattgctttcctttcttagaagtgtgtgtcacacacacacaatacacacacacacacacacacacacacacacacacacacacacacaccccagccagggtactactctgatattctggtatgagtaccagtaggctcaatgatcagagttcttagtcccatttgattgagatgtagggataccaaaaataggcagctaaaggaaggtagacaaaatattgctgataaaacattctcccaaacataatatgtcacagacctctgatgtcagtactgttgaacttagtgtgttctattcattccctccttgagctagatgtagtgtagtggaggatcttaggggtaagttggtatggctacagcaattcttaccatcactgtttccaaactactcctttgtgccaggcactgtgacaaggaacctattatatatccttcttaatagattttaatctttaggacaattctgtaaggtaggaattcttgctcacataccacattggaggaccctgagttacttagtaagggaagatttttgtttcatgtcacccattagacaaatggtagtaggcagactgaaagtctggacccatgcttaactgtcccccactgcttttcagccaattttatactcttcagcaagtgtgtggccatgcctctctgctaggtttccctctgtatcagttacatatttcattgttgtggcatggataagataactttcctcatttagaccagtgggtaaacggggactggatgagacacaaggtaagagaggatgggtttgttttagtttaaaacaaagataatattgcctatcatggtgaataaggcatggcagcaggagcatggggcagcttctgcagtcagggatcagagagagacgaatgttgatgccctccttactgtctcctttttattcagcctgaaaccctaatccatgtaatggtgttgaaaacatttaggacatgtctcagcccctccattaacccagtctacaagctccttcacagatagacccagaggtatgtctcttaggtgattctgcatccagccaaattaccaatgatgaagcaggtaataggtacttttctacttctgaactaaaacaccatgagcaatgcaacttataaaatgaagggtttatttggggcttatagttccagtagggtaggagtccatcaccaaagtggaatggagcatgacggcagacaggcaggcaggcaggcaggcaggcaggcaggcaggcaggcaggcatggcactagagtaacagctgagagtttacatcctcacccacaggcaggaagccaagagagcacactgtgggtagttgtgagcttttgaaaccttaatcgcaccccaagacacacctctccctacagagccacacctcccaacttcttcccaaacagtcaccaactggggaccaagtttttaaatgcctgagactgataggggcacctcattcaaaccactgcaaagcataatgacctcaagctgattgggggcagaaggtctgtctttcttgatcaagttcttctaggatccctgccccttcacataggcgaggacagagacagcactcctcaagaagatgtcagggtctgctaaaggctgaattattgagaaaatgttcagtgttctttctaagaaatcgttggatgtgaaatcaattgtgtgctgccccggtgacctgcttcatggggatttagaaacagttgttctgtggatatatatttaaagaaaatgtcacatttctcccagaggatcatgggattctgcattcatctttccccgggatcaatataccggtgagctagctgtaacttatggaggaatgaagacattcctggcggtgtgagtcactgtatgagtgccaccatatccaaacagtattttatttctgtcatagtgttaaatcagaaaaaaattgcagtggtggatgaagaagcccccctctaaggaacgatcaccctggtaggggtctattttttgaggaagaattgaaagctgagagtggaaaatttatctttgggctgaaggggactgcacattggctcttagctgtggctatgattaaaatccaaacaattgcatttcctggcaaatggaagagggggtaggattttcttgtctgacttcttgattagtccacatggcgccatctgccatgagccatctagaccgccaaggtctgcttgatggagtctgtgggatggagtttggggatgtgtccggtgttttcagaaagagtgttggccttgtaggagagggactcagtgtgctggggtagccaggagagtcatgaggcagctgtgtaaaactttcagtgagcatctgcagaaacacacagggtaaatgggttatttaaatatttcttagcatgtttccttccgtgaaggtacctttgagggcctttgccatgccctaaccaacttctctcctacaacacaattcttgatgtaacagttgatgatgtagttgacagagttgaaactcttcatgagaagggttgagtatgcattttcattgggaaaggagaagaaaggcaccgagtaatgaataaatacaagatcctggctcatccttgaagctgccccatatgggagttattttaatctgttttgcaaatgagggattcaaggcttagacaagtcaagtcattataccaggatcatatggctggtgagttggtaatctggagactaatattatgaatttcagggtggttactgcctgaagccactgtttctgaaactcattctctttcaccccctcacacagtgtcacactatgaatgtccagcttgtcctcccaggagccaagatgacccgcacccctgatggcaaaccctagatcatcaaatcatttcaggattcttgctgtgtgccaagacccttcttgtactctcgcttttgtgagattggagggagggcctttggcaagcgtctgactaaatcttcctccagctcaggaagtacccttcttgcagagcaagctgagaatatcctctgaactttgctatggtgcagccagcagtatttcagtggtagatctgatggaatctgacttggcattgtactgtgctcaggagtttctggctactattttttcccctgaaactgcaactatctgtccttagatcagagcaagactctgcaagattgttttaaagataaaggatgaatacagaagaaaagatgtttgggttctaaatcccatggtacaacttaggcaatggcaagaggcaccagaagttcatcagccctcaacatagaaaccctccagaaatactctgaggaccattaatgcatcttgagcaggcttctcttaataccccacagacatggagcagacatgattaaaatagattggaatatttcattttcttaaagcaaagtgataattatgtgtgttgtaatttgcagatttaatcgacttggtaaaacactcactcagtgttgaaggaggctgggctgaccctggcactgtccttctcctagtcctgaatgtgatcactgatagccctcagtcaaggcgtatccatccaaggaattccatcactaactctattgctattgtggtagttttcgctttattgtgactcccctttaactcacaaagtacacatattagtgctacagagaaactgtgttggaatacacttatccccacttacagattttaaagttgagtcttggtgagttttctggcagtcctatttctgatacctgccttattaagtcactgcaaacctggtgacttcaaggtgatggaaacatttttgttcgtcgttcttaggccatatgtctgagttacagtgtcaccagagcacctctcccttcaaaggctctgaggtttaagccctctctgacattgccagatactggttgctcttggtgctttcgggtttgtggcaccatccctggtgctaccttccttgtggctgacatccattcttcctccagaccctctacagataccagttcttgcatgttggtttaggacccactgtaaatcaaaataatctcaatcctttatctctaacttgatcctgtcaacaaagaagatcctacttgtggatcctggggttaggacatggaccaatatctctggaaggcacagttcaacacattattcaggttaactaagtaagctcaacttgcatcttttatttatgcacttttaacacagtcgattatcttaaggaggcctaggctgcacactttgtggggtgggcagaggccttgcccctgctcctctgggtctcctccctcttttgtacaatctggacccagaattgtacctggcagtgctgatggtctgaaggggagaagaaaatcaccctcatgatgaccggagggcaatcaatgttttctgaacagagtcatggccttggctgatcctgaaaacttgttcttttgtgcctgtgcctgagtgaggctgagttaatctgtgggaactccctagggccctgtgattaggccttgggccatcttgaggccagggctgggcaccagtaaactgtgcctgaagcagttgctgctgtattattcatggggcctcttgcattattgatggagcacagagcagggctctaaactgagcaagtttgccccagaagctctgattgagactcctctgctgagctcggactgcgtggagaagggaaccacaatgtccagcttagagctaggactcgtgtgtctctcttttttcaacctctccttgtctggatataaaggtcattgtgcatcggatccatgggatgtacaggttgccccagtttggaacttaaactgcattttgctaggatgtcttcctaagaggagtagccaccccacataacctccatgcccactgttcccaagaagttcctagcagactctggtgaacagcaaggcaccgaatcttcaggtacatcccttctcctggaccagactgtagaagcaaagcccaggagagaaaggatggaaagaaatgagctgttactgagccagtgcctggcacatcccagccagctcagctgactcttttgccagccccaggatacattggcatggtctgccttttgggccactgagatgctgggttgtgtcctcacatggaatccaacaagaggttggactgtattaagctctatgtggcttgaggcaacactgcttaatctcctcacttgtctagtctgatcagtgcaggtaaataatttgtgtttgtacatctatttaataatgaacggctgcatcttgtcaggcgagcagctggggaaatccaggctgacttggctcagtttgcaaatcttggagttacagggctttcaatgccattcaaaggggttaacaggcctctccccaggtctctgcatgggaagcccaaatcatgcgcatgtgcatgtaagtgcacactgtgacctctggagcctagaggtcagtctgttagtgctcaggtgtcagtcacctgttttgtgggacagggtcttttatttgtctgggacacactaaccactcatcaaagcccagagcttctgcttctgccatcccactgctaggtttgcgagtgttcacgcgatctttttccatggatcctgctctcttgctttccttttttgacttattattatttataattcactcattcattcattcatttatttattcattcattcattcattcactttacattccaatatcagctcccctcctcccagtacctcctctaacacagaccctccactaaccccgctcctcttctctgagaaggggtcccatgggtctctctctctctctctctctgtctctctcacacacacacacacacacacacagaggcacacacacagaggcacacacacagaggcacacacacacacacacacacacacaccctgaccagcccgctctgactttcactcctgctgtattctgtctctttctgtctactcatgctttctcctctgctttcaatccaacgtttcttctcctggttatttcccaccctttggagaccaaaagcccatctttcatagcacacttccttcctcttcactccttctttccctctgctttccactctttccttcgatcccagcagtacatcaaagcatgtcttgctgtttatgctgtctgcagaactgttgtgtctctccccagtttttgtctctgtactctaatgccttaaatggtgggcaatggaagcctggggtagagctcccatgatcctctcaggtgaaggaaggagatgaggtgatgtttactttcataatgatccctgaggtgccatttggcatttccacccttatcttcttctcaggggacagtggagcctttcagagacggtatggcaatgaccaatagagtctgtggtaatgccttgtggtcctgtgcattttcctcagtttcaatttatgtatttatatatttaaggaatgtatttttaaattaaaatataactacatcaattccttcttcctctttcattctcccaactcctcccatgatccctcctcaccccttatggtctcttattctgtcattattactgctacatatgcttatatgtgtacaaatatgtagatataactttctgagtccatttttgttgtgtgtatatgatctcaggtccaaccagtctatgttgtgtaaacaactgtggaggatggagctcattccgaggaggcgctaattctccttcgctcaacagccactaattgcccacagttctttgtcttgggattggatctggtgaacttttctcccttttgcttaagcatatatattgatattgtcactgttcaggtctttttaagacagccctttatgggagacacaatctcagaacaaacttcttggtcctctggttcttacaatggttctgccccctcttcctcagtgggtcttaggtgtaaatgtcatgttgtagagttggtctctccacaatcggttgtttttttacattgtgtcttgttgtggttttctgtaatggtctccatttgctgtaaagagaagcttctttggtgaggaatgagagctacatttatctgtgggtataaggataagatttagactatagttaggaattaggctggtctagtaacactagaaggttctcttctaagttttaataacctgtctggtccccagggagttggctagctttcttgtgccaggcatggtttcctgttgggcgggccttaagtccaattagacaggtgctggttatcattaacacatgagtgtggctattgcacctttagagatattttagggatatctcgccatgctgatcattgtgattgataggcatcacagctatataggattactgactgatttcttcctccggtaacttgcatagcactttttgatattatggaagacagattgcagttaggaagcttttagttcagatcggtggttctcaccctttctactgctgcagtcctttaatacagttcctcatgtggtgaccccccaaccataaagctattttgttgccacttaataactgtaattttgtaatgtaaatatatgatatacaagatatctggtatgtgaccctcaaaggagtcatgtcctctcaaaggggtctcagcccacaggttaactgctggattagatctagctccagtcttccaagtcctgtgccctaagtgtgtgatgtcttcttcagtagggtctgaccttcgacctctgagagacaaccaaagttaacagcaaatagtgtatattgtttagggacccacaactcaaacggggtttctcatgcctggtactgggggttttgttagatcatctgtaacctttgtgggagccttgacagcacaagtgacacaacttcgcttcatacataagtattattgctttggggttatttgtctctctttctctttctccttttgtactgacttcacttccccttcacagcctcttctccatttccaccacaccccttttcaggtttttgtattcttttattccccttaagttctccccttccatcctacagtataaatgtccttttatacttcctggtttcttcacttactgcatattgtatacccactcctgcagattcagagctaggcagcttatgtctttctgggtctaagtcactcattcaatatgatcttttaaagactcatcagtttacttgcaaatttcaaaattccatttttttatagctaactaatattccactgtgtttatgtaccacatttacattatccattcatttgttgaaagacaatttccatttcttatctattgtatctattttgtttgtttgtttgtttggttggttttcaagacagggtttctttgtatagccctggttgtcctggaactcactctgtagaccagactggccttgaactcagaaatccgcctacctctgcctcccaaatgctgggattaaaggcatgcagcactactgcctggcattaaaagaacatctttgaacatggctgagcaaatatctgtagagatggatattgagtcctttgggcatatgccaaggatggtatagcagggtcacatcataactcatttttagctttttgataatttgctatactgatttccagagtgctattatctgcttttgttcccatcaccagtgaatgagggctcccctttcctacacccccactagcaacaatagattagggccctctttccttacacccccactagcaacaatagattagggccccctttccctatatccccactagcaacagtggatgaggctcctctttccctaatccccactagcatttgttgtcaactgttttgttgctcttagccattctgactttctgaatgtgggagacaaaaaaaaaatcacacggtcacgtcagtagatatagaaacaccctttaacgaaatccagtatgctttcatgacgaaaatcctagagagagtagaacttacctcaacaaaacaaaggccacgtatgacaaatccatggttagcattatcttaagaagaacttaaatcaatcccatttgaatcaagaacacgatggttgcccactactcccactctcttccaatataatgcttaaagcactagctggagaaataaggcaagaagaagaaattaaagggatacatataggtgaagatgtcaaattatcccaatttgcagatgatattatatttgatattaaagttccctaaaattctaccaagaaactttcagaagcaacataaacaattacagcaaagtggcaatatacaaaatcaacttataaaaaaatcagtagcctttccatacactgacaataaacatgctgagagataatagacacattggaatttacaatatccttagatagtaaaataaataccttgaatgtaacccaaccgaggagatgaaagaactcttcagtgaaaacttctgatgtatgaagagatgagaggcatgtaggaaatgtgagacagcctgtgttcatggtccagtaaaatcattattgtgaaaatgactatcttacaaaaaagcaatttacagtttctatgcaattccaattcaaatacccacagcattattcacaggaatagaaaaaaaaacttaaatttatgtggaatcagaatagaccctggataaccaaagcaattctattcaaaaaaaaaaaaaaaaaaaaacaacaacaacaacaacaaaaagatactgagggatgagggatggctattgcaaattagaaggtatattatagagctatagcagtacaaacaatgtggtaccagaactgaaacagacatatagaccaatagaaaaaaaagatgacccaaatatgaacacttgtaatgtggtgtccatctgatatttgacaaagaggcacacacattgaagaaaaggcagcatcttcaacaaacggtgccgggaaaacttcccttccacatgcagaagaatgaatttatactcatatatattaccctgcagaaatatcatctccaagttgatcacatctcattttgaaacctgcaatgttaattctgctataaaaaaaaacaacaacccataagtagtaccctatgagatatttatgtaggaagagattttttgtaggactccattagcctaggaattaaggccaacaacttgacaataggatctcataaaaccaaaaaaatttgatatgggcaaggaatgaatcaatgaactgaagaagaaacccagagattgggagatagcatttgccaatttcaatgtgaacaggagttatgagaaccgaagttcaggaccacaggcccaggccctaccagcccgtctagctgatgcacatatgtgagttagagaagatggccctcatcagcagagatggtggttccattctagagcattgggtttgagattcagcattgcattggctggattctttgagaaatgcacaaactgcccaactgtacatggtaaccccgtgcttataaaacatcccaactgtggcccaagctttttgtcttagctcccagtggtttccttactgctctgtggacaaattccaaatattccactgtgctggtaaactcctccaccacttcttcccccatcaggcactccttgacttgagcccgtgccctggctaaactttgctttccttgatggcttccttctacctcttctcttagtcttcccaacaagagctctggaagtcagggaaagagtatgggtggctcactgggctctacagcattcaccccaggacagcagtgggaagtctaaagacagagggtcatgtgagaagctcaagcatgaagcaggcgtcttaactccttgtatttattatttttctcactgctgtgatcaaataattaacagaagcaaatgaaagaggagtttatatgtgctcatggtggttggagggtacagtccatcatggtggtcagtttttttatgatggttggagcggaagacagctggtcacattgcatccacagttggaagccgagacaagtggtgatcctcagcctgctttctctctgtaactcagttcaggatctctcgctccatgaaatggtttcatccatattcagggcaggtcttccccatttcatttaggcccttgacacacagaggtgtgtctccatggtgtttataagtccagtgatcaagctgacggtgatgattaaccattacacccttcagactttgattggacttccttgtttgtgcagggacaacagtggctacctgttgggattgctgggagaagcagagacccaggaaaagttgggtcccttcctatcccttttctctgagaaagcctgaagaagcaggagaagtcttggatgttctcagactcaggatgagaagctgtgtggctgtttgtacattccacctgtgctgtcctagtcatcaggaacatggttcctctctctgaaccccactcctttcctgcaagctgacaaatgctgatgcttgcctatctattttagaactcgccagttgtcaaaaatacccagtgcttaaaaaatacgcagtgacccaagtgcctttcctccaggtgccaacagatcgatcccctcaatagaccagagagagaatcatgttcccttaatggccctggcattcagattcagtctgtgctctttaagggttcgggggattgattagcaccgttcatcactcccctaataccccagtagaggaaagatgtgacttattctaaattacaaggagaatctgtggagaacaagagctttgaacttgactcgttccctatcagccattcctcttcactggggtgactgctcccagaggacaaggactgccctattcatttctattgatagcattcaaccacagccagatacctaacaggtgctcattaaggagccattgaattcatgaaggaataaagctggtcccacacgggcttggaatatatctcagaaataactaactacctattcccccagtgaacatgtgtttggggatcggtcttaggtgctgtggatgcagcgagttacaaaacaggttacatctctggcctcaatagagctttttttttttttttaaaatctgagaaggcaaagaaacaaaccaatatgaatatttaaggtgttatgaaatagtaataaattctagataggagaatgcagctagcgaagggatgaaagttatcaggacaggattgtagtggctttggtgaagatgatggccagagagtgctctacagcttcttaaggaagtcaggggaacccatctgacagataagttgggaaagagtttggcaggcaagcaagacaccaagggcaaaaatatccaaggcaggttcaaaccagtcacacgagtgaactaatacgcatcaaggtctgtggctggatagggacaggggctcagggaggaagtgacctcacaggatgatggagaagcatcggctgagtatggctttactgatgacaaggcagcagatgacattgtggaaggtggtgggggaacccaaggtccgtggggccttaaattccaatgcatctgaaagccataggaaggttttaaggagatgaacatctcagcttgacacatgcaaaagactctcactgcccagtgacttaagtgaggtaaaaattttttttcagtgaaattattccttttgaaactaaataagttcatgaagttaatgctgttttttttaattattttattcttctgtgatattacttaacctcctctgtcttatagcattactaatatttatattttacttgcaagcacgtgtgtgtgtgtgtgtgtgtgtgtgtgtgtgtgtgtgtgtgtgtgatgcgtgagtatgtgtatgtatgcgtgtggacacaagtgtatgtgaacatgtgtgcacgcacctgtgtggagtactgaagtccctgttgcatgtttcccatggctgaatctggagctcatcacttgcaggtattctgactagccagcttgttctgggaatcctgtgtctctgcctcctgagtgctgggattatgggtggggccattcccacttggcatttacagcattcaataggtctggggagccaaacttccaacctcaggcttgagtggcaagcacgttatcagctgagctacctccccagtctccttcccttattatttttaaatttttttcctggtgtgtgttcattctacacagtgaagggttcccttaagataatctatctcaagtgtgacatgtttttgatcatattcactcccagatgctcttctctctctgctttcctaggctgctttcctgctcccatctcttccttcacctttcctctggtttcatgactgtctctatatctttccctgtcttgctgccttggaccctgtctctttctgtctctctgtctctgtctgttcctctctctctctctctctctctctctctctctctctctctctctctctctctctctctcatgcttttatgcatctatatgaagtctaggatgcccgaatgagaggaagcaggatgactctttatctgggtctggcttatttcatggaggagcagcaggggctcattggcctcagtcctgggagggagttgggccatccaccgttcagggattccttcccctctcttcttgcccacaggagactggagcagaacttcttcaactgcagctgtgacatccgctggatgcagctgtggcaggaacagggggaggcgcggctggacagccagagcctttactgcatcagtgctgatggctcccaactccccctcttccgcatgaacatcagtcagtgtggtgagtgagcatcagcactgcctggtctggccagcatcccacacaccccagagaaggggttgtgcctcaggctggcctgccagggcctctttgccagctatctccagtcttgacctctgcagtgggtgtaaatgagatcaaactttccctttcctgatcatttctgtcttgagccagcctcgggaatggtagtcctagaaagaaaagcagaaaagaattcatgtgcccttcttagctgatctttttatctctgagtcacctgtcaatcaaacttgaagaagcacgttttaatgtgcaacctctagacttactatattgggagcttctgaggtgttttctagaacattgcttctatgcccaaccagagactagagaatgtaatccctagttccagtgggaaccagacacacaccaatatgtaagacagttgaagctacaggtgtggttgctagaatgccattccatggaggggtgcaccacttagaccctgctttgtaggagcatcccattgtatgtacttcagttcttggttctgcagtctctggagtgagagctgtcaatcagctgggggtggggttatagttagtacttttcacattgatctgacacgagcgattaaaagacaggagaatttcttttggcccacattttgagagtacggcccactatgatgaggaaggcatagctgcaggagggcagtttgaggcagttggctactctgtaccccaagtcaggaccagagagaaggatgagcgtcgctgctcagctcagctccttctttctgtttagtcagaccctagcccatagaatggtgtctgcccactttggttgatctattctcttaggcacgcttagaagagtttctaggtgatttttgagcttgtcaaattcatactaaccatcacaagagtcttgcacaagctcagggaagttgtgtcagctgtgccagcgttgtctctgggcaaggcaagaagcaccactgtctgcctggaggcagagctcctctgtggactgtcacctgacatttcatctccttatcccactctgtcctcctagatctcccagagatcagtgtgagccacgtcaacctgactgtccgagaaggagacaatgccgtgatcacttgcaatggctctggctctcctttgcctgatgtggactggatagtcactgggctgcagtccatcaacacccaccaggtaggtatcctataaccaggcccatcaagagttaaggaatgaatatcccttaattataaggaagagggagagattgtgatcatgttcctctgggaagaaatgtatagacccagattctgtggagatgtaaatttctggtcattttgatctttgttgtggtgctcaaccttctgtgcattggtttcctgttttttaaaaaaatcacccagttttaccatttaccatccaatattaaattgaggtttacctgaattccaaagaatctggagcacggtctgcgtgttttcagtagctagacttcattcagcttttacttcttttttggaagtgttaggggttagaaaaggaaggcatccttgtgtaaatagttggttattgtcttctgattggggttttcagaccaatctgaactggaccaatgtacatgccatcaacttgaccctggtgaacgtgacgagcgaggacaatggcttcaccctgacgtgcattgcagagaacgtggtgggcatgagcaatgccagtgttgctctcactgtctactgtaagtgcatgccatcatggaggacagagaggtaccagaccgaggctgggatggggcagatctatcactagggctgatctagagccctgaccctggtctttcaagaagggcagaaaggctgtcacaaggcaaacctgaaaaatacagccaagaaaatttccttccctcagtggaaggtttacctctctagttcagttctgtattcaaaaatctcataggttggcccattttaccctttgttatcaggaaaggtctccatcttaggaggggagctccaactaagatagatccaggatgcttagataaagacacatgtttttcccttttattgtctggtggtgggaactctgctgcactcagactttccagagcagggtgagaagtgggatccccatcctacttcctagaaggttcttcaatacatgggagaatctgtgtcctcgagatcagcttgcttttccccacagaccctccacgtgtggtgagcctggtggagcctgaggtacgcctggaacattgcattgagtttgtggtgcgtggcaacccgacacccacgctccactggctgtacaatggacagccattgagggagtccaagatcattcacatggactactaccaggagggggaggtctcagagggctgcctgctcttcaacaagcccacccactacaacaatggcaactacaccctcattgctaagaatgccctgggcacggccaaccagaccatcaacggccacttcctgaaggagccctttccaggtgaggcttgtgcacatctcttctggaagctgggggacgggggagagagtttgaaagaatcaacggcactgattcctagttacctgaataacggagctcacactggggcagggagagccactatctgcatcttgtgctaactaggatagccccgttttccatggctaccacagcaaactccaggatgtcccagaaaaaactgttatgcctataaagatgttctctattatagtagagaaatctgggaatttagagatgaacagtatggtagagaattctgacccagtgtttttcttacctgagaatgctatgtggggcttgagagtatacttttatgatgcctcagttttctcaactgtgaaatggacacaagtacaagtgcactgctccactaagagtttcatggcttttgaatgagttatgatgcaggcttggtatgtgacgatggctcagtagctctccattgctgtgaacttcagagttggtcacagtcaacctcatatttaatggattgctgtcctaaacctcagctgcgaggcttgccttggacctgacctccagggctgggctcttttctgtttttgttccatggtaacttaatgaagaagtagatggtgctaccagattctgatggtacaagtgtcacactgactggagccaatagttgtaggaatggaagaactctgaacttggggatgtgattctgcctctttcattctgtccaaataccttcctgaagttggagaaggagaaaagtccaaacgggcttaaagagagaggttgctgtgacgtttcatgatggactatgcagccgataagtttctgcccttgcggctgtgtttctttggtgacttctgtgatttgtgctgaggacagactaggaggcttcctgatcttcaatccacagaagtcagaggttctaaagggatagaggaagtgtatggactgctatcacacagttccaaaatagggaggcatcaaaagctggcatcatgctacatctgtttggaggaacgtgaggtcacagctacaaataaccacagagtgttggctctggaaagcttatttatctcagtgtaagggaagcagtgctggggccccacaagtgacattggggaagtgaggctgcaggttgtcctaaatgcttgtcactgatgtccaaggaatgacagagccacatcagaaaaggtctagaatgtgctggtaattgagaccctagcagtttctagaccctgaccttccccccccacttgccccaacatcacccaagtgtgctcaccaaaaaacctcaaggcattttccatcatcatgggatctcttttggctagaagatgagtcctgacctgcactgtgacatcagtggcttttaaatatggagataataattgtagagcgaattagagtgtctgtttccaatgggaagctctggggacatggagagagccctgggatattaaagagggaggtgagccattctgagctccttcctctagagaacattctagaagctccagggcagcaggggcaatgggcgatgtgaaggatacagccctggttttaccctctctccttccaggagagaaaagtatctcagtatcctccagccttgtagacacaggctctgtacatacacatattcaccatagttggtcattgatggtttggttttcaaggtttctagacaagcagagtcagtatcacccgggaatgagttaaatgccttaaaattcaaattctcaagtttccttagttctcttgaatcagaggctctgtggtgagttctgaagagatggattttttcagttccctgggtgactttgacaattcccactttgcaatcagctaccattaggaattggtggcaactcagccccagggggagggaacaagtggcatatgaaatccctgagagctggaaaagaaagcagctcattggaggctccttcattagatctgtccatattttgggatggacctctatgtgtagaaatttgtttgttttatgaacctttgtgttaaagagatagatggatgattaaaaggctgtgacaggaaaggtgggccagccgtgacacgtgccaagatatctcaatgttcagaagagtaaattatctggaggagcaggcagggataacctacagcactctaagctcaaccttgggctggctacaaaggcagtctatagatcctgttcttctctgttgccctgagaatgttaaaatatcatatttatcatgggtgtctctcattcccaagcagccaagggctatggttaggagccagacctctgaggctgggcagatgtaggtcaaatcccatctgtgattcttaggacaggtagctcaggatgttagggtggtgctgagaatgtgggcagtgccctgtgaaagacggtaactgctccgcacctctgttcctttacctgcgaatgggcatggtcacagtcaccccctaggttgcattgcagagtcattgaagttctgcccaccacgtgctcagcagtgagctcgaacaaagaagagtcctaattgttgttggctcatgttatggcttcttgggtgcagagataaggagaattcaggagttccagaccgctagtcatcctcaggtcaggtgggaaagcctagcagatagtcccagggcagatagtcccagggcagattagggtagtgactgtggttcaacaccagagttcaggtgtacacttaattccctgccagttacatgaccttagacacactacttaacttgcttctccttcaaaaagttgtgataggggtggcagagaaatggctcagtgttaaaggctcttgctactcttccagaggacctgagtccagttcccagtccttacattatacaccccgaaaccctgtgggtgggatccaatgacctttaatggcctctgtgccaccaacgtacacacaaatgaacctaataaaagtaaatcttgttttaaaaaaagttgtgatgaggagctagagaaattactccacaggtaaaagccctttccctgcaacaggagctctcagcctccctagcgctgtgacctttaatacacttcctcacgttgtggtgactcataactataaaattatttcattgctgcttcataactgtaatttcgcatctgttacaaaccataatgtaaatttctgttttctgatggttttaagcgacccccatgaaagaggtgtttgatgcccccaaaggggtcatgacccacaagttaagaaccactgctcttcaagcatcaggacatatatttgaatccctaggagctattttgaaaaagccaggcatggttgtgcatgcctgtaaccccagcgctgaatcagacattctaggttgaggacaagacagactgattctaagagcttctgaaacagtcagaatagctgaaattgtgagcttcctgttcagtaagctatctggtttacacatgtgaacacatgactgtgcacataaacaactctcatatatatatatacactctctgtctctgtctctgtctctgtctctgtctctgtctctgtctctgtctctgtctctctctctctctctctctctctcacacactcacacaaatacacacacacacacacacacacacagagagagagagagagagagagaaagagagagagaggatgaatagacagacagacaggcacatacacacatgtgtgcacacacactcacacaattgtgaatattagtccagagaaacgatgttgcttgaagtgttactgtctgttaaggaagcatatacatccatttttctgcacagccctgtacctgctgatcctgtccttgtctcagcctgtgataggagtcagagaatagataattcccagtatcctttttattccagcataaatgtgtgaattctggctatcattagagagcagccaacagtttttcctggtccaaagattacatgtttcttgcttgtatataaaggctgtctggctccagcgaatgccttgctgatttatgctctgaagtcatagaatgatttttgagattataggattcaaacatgtggccaaaaatatttggttgcaggaaaaatattctccaataaacgggagcctgcagagaaatagaaaagaaatggatactgttgactaagctggttcttgtctcttttcatgcttcgaagcttaggctaaagcccccatctccttcattatcccctagaccagatcttccccaaagttattcagaacaggcaacaatagcagtagcgacaacaaaccaaccagacaacagttactgctatgcatattttctgatagactccacagaaggtcccctagtttctgccaatagtcatagtaggtagccacctagtctgtgttttgtagcccaatggctacagtttctaagaggcttagcctcgctggtaagtgagtgaatgagtgaagcagctgacagtcagccagtgaatgatttgtccttatagttcagggcctggcaggctcatgaccaggggttggcattgtggtgcaatagctcccagagggattagcagcatcgttatcacctgagaacttagagagacaaattctccaggctgggggaatggctcagtggtggacttgttcagaatgcaccagtgaggagctggaggtgtggctccatggtagagggtttgtttagaattcgtcagagccttgaggtgtagttaggtggtagaggacttgcttaacatgtgtgagaccctggatcctactttcagcaatccatagactctattaaaatgtaggcagatctcatgaatcagaccttctaggttgaggacgactcatcctgatttgatttgatttcactttgaaataaattgggccttaaaaagggtaaaagttacaaaatactgggaagaactttcttctacccttcacttggcctattccatgtgtcagtgtctcactcagccacaatatggtgctcaaaaccaggaccagacatcagtttaacagggttatctaacttatagactgctgacatgtgatcagtggtcatagcagtgtcctgtgttttataggattccacccaggattagacagacatcaaatttagttgctgtattgtagtctcagttcctttgaacctgggataggtcgttaggttgcttgtttttgtttcatttttggtgagagcatcatggaaatatttctccacccctttggttcatccttttaaagaacgtaggatgttgccatggcttatcagtgatgacatcaactttatcacttgttcagattctgtttgtaaggttcttccctgcaaagtgacttctttcacccttagctaatcagaataataaggcctttaaaagatgcaaatagcttgattctttttcatatagtgaatttcacattttttggtgattcttgcctgcacaattatctatatactatttcccaaattacagtggtttctgcttcagtcctcccctttgttagttggaattccactgtaagaagaactcccactcatttgttccaatagatgcttgtttatatgaaggaaggactagtcggtgttcttataattcatgtatttgctttctagatttgtcatagtaaattagtattgactgggtggtttagatagcagaaatccattttatctcaattctggaagttgggaatccgagaccaacagttgtcaggcttggtttaccccaaggcttctttccttggcctgtagattctcttagtctgcgtctttgcttgactttctcttcccctgagcacatctatgtcctaatgccttcttatcagaacctaatggatgcattttcacaaatgcaccttttctccaaacaaatagagtgactttctgaagtactgaggttacagctcagttatatgaatcttgaggcagcactatgcagcccataaaaagctgtggctcttcttagtgtgtgtttggattatctgacatctcactgagcatcaacgcctgcctcctcttcccaagaccatgcatctttaagtgctttcttgctaccctgaacacatgagcacagttcttctttttccctgtgccatatctgagacagtccatttctttaggaaactctccttcttttcagtggagggtgacaccagtcatcttctggtgattcgttctattatgtgctcaagtttgagcagtgatagtagagtggttaagagcccagttttaggtttgaatcaactcttgatttctttttcgaggaacagtatccaattacttagtctctagaactctgctttatatcctttaggaagttataaggcttgaatgacatagctcttgaagcactgagcacagcccttggcttctaatcaatgtccaactgaagattagctttcactattgggagagccatttcaacaagccaaagttcagataacacatgtccacatggatgataaaactttggggagagagtctcccagattctcaatgatctgtcagcattgcctacacacattgggggaagaaacttcgttttaggtcatagctgggcctgctctgaagggccatctctggtgtactggtacatgaaggagagatgctgtggtctgggatgtgaaaaggtcctcaattctctgcctcacagtgaaactaacttagttgttagttcctaagtgggctccttctttgagaccaggagctatatctacaaatgtcagagtctccattttgtaggagtgcctgcatgaagaggtagtgcagtcattttagagggagacttgggaaggatttcttgctacgaggatggggactcatggtaagtggcagagatcacagctagtacaatgctgtcctgtacaatccattatatttttgttattacatttgttaattgctgtcttgttctctctctctctctctctctctctctctctctctctctctttttacagagagcacagatttctttgactttggtaagttggctccattttggctttgaaactctttgtcctgatagttttgtgtctgttaaatgcagactgtctagtccatgttccaagtcccttggcagttgagtacctcttagttcattgtgaagaggaagaagacctcggccctcttgtcttgggcagttgccctctaccacagtttcttctctaggactaccaacccctcattctgtactgggattaaatacaactgaaatatatccctaccttgactctctcggagagttttctgaggtatggccgtattgtgaaccccatccaggtagagaagtaatgtactaagacaccccaaaggctgcaacaggtgaataatggattttgaggcccaactcatctcagttgttcttatagagaaaatggggaggctgtaaacttgccaatatttctcttctgacttaagagatcaagcatttggccagggcctaccttaggtagaactgtggtttctcatgggctcacgttacttgaatggcttcactgaagctcagtttataacagagttgagggtagggctggacaatcctagaaggaactggcatttagggcttttttttttttaaattactcttccatgatggggtcagcagcaataactgccatttctgtcaattttaggccagggacagtagaacaaccctatgtaggaacactctggtcacttggcaatgtgtaaatgccatctcggattttttaacttgttcttggtcattaaaaaatcctataatctctcagatgtccctttagagaattcataacttaggccatttattgcaaggacgtgactgtagatagagatgattgatgcttggtgctatttcctggcccattgactggtatttaattccaattgccattgtgttctgaaaccagtcttagggtaatgtctagagggctattcattaagatggtaagcctggaattcactagtgagagggaaatggaaggagggcccggaacggagaaggaaagacgtaccctagtcaaggggtaaggatgtcagtgacagcagctgcccctgttaaaatcttcctaatcctcacactggccaggattccaagccattcacaccactcctgctctgtatttttatgctgcagtgtgctctctgggttggaggtaggaggagggtggggcagagtctgacttcctttggggttcttttcatagttctgtagcatgcatgaggcagatagctacactggaactcagtccttagtggtgtctgctcatctaggagggtgaatctagagacctgcttcccaaggtctgggcaggtacttatttagggccagtcagctaattgtcttcttctcctttgtatttcttttcagagtctgatgcgagccctacacctcctatcactgtgacccacaaaccagaggaagacacttttggggtgagttacttcctgggttaagaggaacacacttaagggtggagccattatttggacttcatttgaggtgctaacttgtctacatagtctctcacttgaaaccagcagtagaaaaaaaaaaaaacagtgaaaattgatttcctttgaggtggtttaaactgtccttgtttgacagtagtgcttcattgtttgaagaagcctctgaagaaccggctccaagccccagggctaggaagagaacagtttgaaatttccagtctcttaggagtctggctgggcatggcttgcaaggcccattgactgggcaaacctacaaaaacctaaggtactcagaaactatccttatataggttttttttcccaagtctgtctcagagtctgaggtttccctggggagaaatagaaaggagtctcttgagttcagaactcttgaacttttctcagtagaaatgctatgttttaagatttcagtgggagcatgaagaatttgcttgctcactgaaatactagacagatgtttctcccaacatgcaattgtgattctagaatggcctcaaggtaagaggggctcaggtaattgaattaggcaatgtttcctaatctagttgattaatttgtattttgttaaacaaaaattttaaagttttcttagggtctcagaaagactttgctccagggtacctgatattttgacattgtgacactgtgatatgtataggtgtcctggggtgcaagtgggaccctgaatgtaagcttctggatgcactcacctcaatggcagaggttttaggggatcctattctgctgaaatagatttgttctcatttggcacaggcattatttttggctgtctggggcttcctgtgactgctcctttctgtctgtgtttggcttctaataggtgtccatagcagtcggacttgctgcctttgcctgcgtccttctggtggttctctttatcatgatcaacaagtatggtcgccggtccaaatttggaatgaagggtaaggtgttgttttttcagtcccaagagttccatggtttccacctattgatcaaaagatactgtacctccatatgctctctgcgaaagcctttggtcactggaccttggtaactctggtagagatccctgtctgctgttttgggttattatggaataaagactgtgtgaggatctataggaaccaaacagcaatgctgaaaactactggttgctcaggtggacttgtgtgatgagcatagtttgaacaggaagatggttataaggcaaatggcaattcttttcattagtggatgatctaaggggctgttcatttgagtgaccctttccctgctctgtacctatctttggaatcttgtggtgatttagcacggtgaggtggagggtggtgaactcggatattgaaaagctgcccgtgctgttgtatctcagcacgtagctctacacagagtcctggaatagatgccaagagcaacatggtttctaaatctgctggccagcttccatgtacagagcactcaaccccattatggcagaagtggagtgctggcatgtggtactctgccaaagcttgtaggaggcatctggcacgagaggggttaatatggcgaattagcatccatggatgtggctaaatgatctgaaagaaactgggtattactgattccagaactgaaccttgatttttcaagatgacttctcagctggggctgtcatgcctggctgatgttggtagaagtgggtagggagggagaggtaaaggttgcttaagcaacattcatgatgatgtttgcctgtggcattatgaaatccagaaagatgaactcctaaggatttaatacttgaagctagtttcttcagtgggagtcttgaccctggggaccagggattaaaagcagagagcatgaataacattcataggaacagacttccatggattcacatgcaaatgtaaatctttgtgtgactgtatgtggtgaatggttgagtatttgtacattaatcgagctagactttattacacattcaaggttctggaccttccttaaaaggtaagagcactggcctataggaagctacccataaatgatagaaagagttgaaatgtgagccaggtgaacttgttctcctggaggcttctgcctctgaacactttgctttgatgaatttgaataaggcatggatgaaggcaagccacattatctctttcttctcaacctccccttccacccctctatcctttgtatgtcctaacctctttcctctctcttctcctgttgttcctttcccccccatccttccttcacttcttccgtcctctctgcctgttttgcagaagccaggattgaacctagagaacttagatgtggcacataattgttctacctttgaattatacctccagcttttgtgaatagtttgaaatattctgagtgagagaaatacatgtgttggtaatttccaaatagaaaatagtttttaatggctcaaacaagtctagactcctcttgggcacattgactaaagacacatttttctgccagtcttaccgtttgtccacagagctccacaggtttagacaggatgactgcccagtgactcaaagcctgctgtcttgggtaatccttggaccactggcattgagaactgctgctgtattttttctacaactctgtcctttttatccactagcaaatatcaggatgtggaccaaagggaagaatggggcattattgctttccccccaaggcagcacaccagcagctgagaccctgacacatgcctggcagtggtacgagagcagattttttctattaattgtcatcctgtttgtggaacagtgtgtccccatgtgggatggattaggctacatctaggatggtgctcccccaagctgtccttggcatctccaacctcctgatctccttttccaggctgagctgccttgtttcgtcctgattggtccaggagactgtgtccccacacatagaaataaagcatctctctttctaaagtcaggcaacctgaagctagggccaaggtgtagagagatggtctgtccaagagtgactaatattgcatctctcggatcttggtcatattccattttctttgggtttcccatcattttataaataaacaaatgtcatatatcacaaataattttgttcctttgttgtcaatggacatagctcttacttttaattttaatttctatggctagctcacaaataagtttttttttttgattcatgttttgaagggatagttcaccatggttgcagggtctcattgagtttgtaatggaaggaatatatggctgtgacttcttacttctgggctgatcatggtgtagagattactccactctttcaagcctgccatccctgtgatgatattgctcacattctaagtgggttactcttcctcagttaattctctctgaaaaatagttattgacagatcaaaggtgtgcctcaatattctaggttattctaaagccagttgagttgacactagagggtatcacacagggtccaaatctagtaaggaaaatgacagcccatgtaccagaaggctcctagctctgccttacatgaaccccaggtctttacacacactccattttcaggcttcaactttcaaatctgggtgagaatccatattcgttctttggcttccatatggttactcagaaattcgcagagcctctgtttcctcaagtgtaagttaggaatgttactacttagctatggggcttgtgagtgctgtaatatgtaggtaattggttgtgttagttagctacccatcgctatgacaaaatacttgatgcctcaagtatattgatacttgaaaatatcaatatattaaaggaaaagttactttggatcatggtcttaggggattttagctgattggtactaagtttatcgttgagaagatgcatgaaggaggagacctgctcagcttatcgtggcatggaagccaagagaaacccaggggagactgaagtctcagattccccctcaagccatattgctaatgacctaatgtcctctttctaggctccacccagccatggctgctacttcctattagagccacagcccatgcctttggcatattgtctttagggactttgggatctacatcataatgttggcatggaaagggtttccttgtcttgtgtttccctcttctttcttttcttgacgtatgagtctttctggactccttttaatgtccttttgtgaaaatatagcccccaaggctccatcatgaacccctttgtctcagacaatatgtagtagtaaacatgtccgtattacacactgcccacagtgcactctcatttttccccctcacatatcatctgtctgtcctcctgggcccggagcaactttcggcaggagccatcgatctcttggcccagcgtgccagaaacttcattctgcatttgacaggtgcttgaactcagaaatgaaaagcatccattttattcatttcatttgctttttttttttttttgaagggattgctgtgtagcttaggctggactctaatttgttttgtagcccaggctatctttgacttcatagtcttgcttaggctctgtactggctggttttatgtgtcaacttgacacaagctggggttatcacagagaaaggagcttcaggtgatgaaatgcttccatgagatccagctgtaaggtattttctcagtgatcaagggtaggagggcccattgtgggtggtgccatccgtggcctggtagtcttgggttctataagaaagcaagctgagcaagccaggggaagcaagccagtaagtaacatcccgccatggcctctgcatcagctcctgcttcctgacctgacttcctttggtgatgaacagtaatgtggaagtgtaaactaaataaaccctttcctccccaacttgcttcttggtcatgatgtttgtctaggaatagaaaccctgactaagtcaggctccaaagttctgtgatctcatagaccttctttatattagttttaatcacgagggggaaaaagtttattagtctgcaaaggactagtccagattaatttagaaatctgaactattgttgtgggggagggttgggggtgctcccaaacagctcatgtggatatggagaagagattgaaatgaacctcatcatcttttgagaaataaaatgtacaggaaatcacaaagatgactgaataaactaacaatcacagtcccactatttcaaatatttaccattttattttatacttccattgaatgttttattcttagaacagattaagcatggcgaatatcctgaaaaccatgttaactaccacctctgactctgtttcctccctggtcacagaggtagctgttgatgtgggctcacaatgcagctgctcccttgtcttagtctttctctgtatcctttctttttcttttttaaatattgataattattttatttataaacataaagataatattattttgtctgaaaacactgcactttgaaattatgcaatactacagttagtgtttttcttaccatcaatttcagatcttcccagtaaatcccttgtattttgttgcctgactctaaaatcaactcatcttcaaccaatacaatcgtatggtatgcataagtaactctatcacgacatgtcccaatgcatatgtctactcactatttctatgcacccagaagatgttccaactggtaataagcacacatgctccactatgttcacagcagccctatttataataccctttctttttcatatctttgctgtttctacataccaatccttctgccaagggccatttcccagcaaatccatatcatgtacatggctaaactggcacccacctccactaaataataacactgtattaggctggtaacccattcatttgtatacttctaggtatatgcatgtttatacatacagatatttctataagtatccatgtgcagacttatacatgttgtatatttgagtacatcatttataaaaatgtattactctctttgttttaatttggatgcgtgtttattctctccccacttgcattttgcctactgtcttgccaggtatctcagaactgtccatggatttggctggacacccactttttggaagatgagcgtcttagtcagatatgaactgaacgtgtaatgtcttaggcccctcattaacaacttccaacccatccatcaaagtcttggtctggcaatgtgagctcatcttcctttggaatcataaaggtttttaaatgatgctgaacattcggctagggttcatctttgctactgatgaagcagagtggctcagcctggcagggctgatctgtgaagtatctctatggccagggatgggatcaatcagaaagacctcctactggagcatggcctggcaggaaccctgcctccactgtgctagcccttcactctttgattgctaaatcctggggtgcctgggccaggtgaggggtgagtactgtgaggttcagggcaggagggcacagaaatatacaaaaatttttcagagttttaacagtaattatgttgtgctaggtgtttgctggcctgggagaggggtgggaagtgttatgaatttatgataagctcatcttcacaaaatattttaaaattagatattagaagactcgggtttatgatctggctgggcttccacatcagaagaaaccgtggcttagaacagggactgacttgacataaccccaagctgctctgttgtgaccattctcagtgcacctggcatcttcatgccacaaccttgttagaacaaaagccagataaaatctaatccatttgagcaataatagaatacactttccagttttcgtatagggagaattccttttgagaggaagaactatgtgtggcctctgactccttttcttcatggccatttgaagatcagtgatgactagaagattcaacaccatggcctcctgaggtgctctcagaggaaacagttgtatggttttgaagaaccgaaaacagaccttgggcttattaggataatgacccctttttgcagagaaaggaaactgagaccccaagacatgcagtaagaagccagagcgcccctctcccaaatacagcagagaacttctgggtctgtgttcatttagagatgatgcattcagagatgatgcatctaaccctggagtttagaggtcaggtggggtggagggtttggggacatccacatggtgatggggtggggtggggtggagatgtgggatgtgaagcggttggatgggtggnnnnnnnnnnnnnnnnnnnnnnnnnnnnnnnnnnnnnnnnnnnnnnnnnnnnnnnnnnnnnnnnnnnnnnnnnnnnnnnnnnnnnnnnnnnnnnnnnnnnnnnnnnnnnnnnnnnnnnnnnnnnnnnnnnnnnnnnnnnnnnnnnnnnnnnnnnnnnnnnnnnnnnnnnnnnnnnnnnnnnnnnnnnnnnnnnnnnnnnnnnnnnnnnnnnnnnnnnnnnnnnnnnnnnnnnnnnnnnnnnnnnnnagtctcattttgttcccctgactgaaacactttcctttacttccttctgtataattaaagtctgtggaccgagggaagctgtaaggataggcagaggggcgtcaagaaatgcagcatgaacttttttttttgttttcatatagaatttttaaaaaatatttttattacatattttcctcaattacatttccaatgctatcccaaaagtcccccataccctccccccacttccctacccacccattcccatttttttggccctggcattcccctgtactggggcatatacagtacagcatgaacttctaacagtgccttaagcgcttctatcagcctgcttgctttttgtcttagcagtgggatgtgtgcttgtgcctctgatgaacccgtgggtgaatgagggccatacagggctgttccattgtaaattagagctggctaataggtacttatagcaaagtggttgcctatttgattatgattgggaagtattaacatttttccccctaaacagatggtaactatcctctgagcggatggtgggatcatgccagagtcttgatttggaaggactcgctactgccagatcttgggagctgcttttacagggagtgttattgccattcctctgattataccatgcagttaaggaggaatgggacttggggcggggggagtcatttctgattcctttcttggcctggaagtattggactgagattggtttttctccaggtagatggagggaggagtaggaggagtcttagaattctaaggttggtgcagtcttggcattatttctcagctaggataccatggccacatgtctacagctatgtacacagagcaggggaattgatataaggagagtgtgtggggaataccacacataggagacactgaaggcttttagagggagttggaccctgcatggacgtgccaacagtgatactgtttcagagctgctcccttggtcctgaaacatatattgttttgaagtctgtttaatgggatcagaaactaagagcagtacatgggagaaatgaaaccagagatggaattgggttttcctaacttcctgggatgtgcccagttctccacaatggttacttctttcttaacctttgggcctatatcctcttccagttgacatgtgtaatggaggaaggggccccttgacccttgaaaaaattgtgtacttggggttcctgggctgggactcttgatataagatgactctttggacatgagtatgagaatatttttctgcttttctctctgtgttgtcatcggagtcacatgtctctgatgtcataaggagtgtgtttcagttagccttttattgctgtggagagtcaccatgaccatggcaactcttataaaggaaaacacttaatgacagagagcgagggctggcttaaagatttagaagtttagttcattatcatcatggaggcaagcatggttgcatgcagacagacttggtgctggagaaaaagctgggagttctacatcagcagaaggaaactgcgcgccaaactaggcctagctggaacattgaagacctcaaggctcacttccacagtgacacatttccttcaatagacttcaactactccaacagagccacacctcctaatagtgctacttcctatgggccaagcatcgacacacattagtctctgtgtgtgtgtgtgtggggggcattccttctcaaccaccacagaatgttttcattctctttcctggttttctgatacctctggagatactccaacttcaagagcccctaaataactctctgtatttggacatggcttggttaaataggttatgttgtggcaagtccccttgccatgcctgtactttgcacgtgcagacaaagccttactgtatttgaggactaaaatctacaatatggtgcccgaaagcttcaagaaaagggctttgagtcagcacatgttgttgtccggcatgcctttgcttctccattctttgtgtgtctttcctcaggtgtgcagtcaatatcccagaagtcccttcatggccatcactggttatatggaggcctatctgctccccttcttcctttccttgtgcctaactctctgggatctagggagccaagagttcttcagcactgatttttctgtacatgaagagaaatccctggacatggagtgctatacaacatgttttcctctggggctacctgctggctgctctgttcttggcaggccactgtatcctgttgagctgtgccaaggatagccagtatgcttggctctacactcaaaagctattgcctctaggattcacttactgttggcagtacagtgtggtacttactaacccatggtattgtcactgcctcccaaagagttaacaggcttttgatagcttagtttagaagctctcagccttttgtctccagctactcatgtagcagaggctgttcacatgtcttatgcctgtgggtgtaacctggctctcctagaagtcctgaccttcacaataaatttacacccaagaaaaatggatcagaagatgtgtgagcaaatgggattctttagaacgaggaatgaaaacaacttcatgctatttttgatcttaaaaatatccactgacttttgtatattatgtatatgattttgtatattatgatctatcacatacactctccatattggtctatcccatccaatgcatcatagcatggtaccaatatggaaaaccaagaaggttgtgggctgtcaatcttatggtcttctttacccaagaagccttttgcccctgcaaaatcaagtgacagaaactgctccggagagccctacctctattctcatggcacattctgtctctgtgtgcatcctctcctgtgggccttgggagtttagtttgctcagaggaggtgtttggctttgactaatgaaaagctgtcatgtagctgcagtattcaactctgtgtttgtgtagcctagtctcctgtgaactcagcttcaggacgcccaaagaagctgctggcagcaaagcagatagagcaaaacaagggctggtcagaaagcacaatttggggttagggaattaaaaaaaatcatgctaataaaaactgccacagagccaactgctacaaatgctcccccaagcaccttctggtctccagcttgcatgctgcacgcccgtcattgtgatgggcattatgggggtggtggagaagtgtaaggaggaaggacctccttcatccagaggagcttccaacatctggtggtatctgccaccggcttcaggcccagatctccctagttgagcaagagtcccaagtaggtgtgtatctacctcttgccctcagaaggcttaatgacaccctctctatccctcactacccagtatgcttaaagagcaaccaattgagttttcatcctgcctaacactttattctccgccttgcataaacggtgcgcccacaaaccagagtagggattcatcacttgcttcctcccccaaagcaccaattatctaatttgtgggacacagtgtgcatgttcaaagag

SEQ ID NO: 66 - DNA, 1511 bp, Mus musculus
atggatgtctctctttgcccagccaagtgtagtttctggcggattttcttgctgggaagcgtctggctggactatgtgggctccgtgctggcttgccctgcaaattgtgtctgcagcaagactgagatcaattgccggcggccggacgatgggaacctcttcccctctcctggaagggcaggattcagggaacagcaatggggaacgccagcatcaacattacggacatctcaaggaatatcacttccatacacatagagaactggcgaggcctgcacacactcaatgctgtggacatggagctctacacgggactccagaagctgaccatcaagaattctggactccggaacatccagcccagagccttcgccaagaacccccacttgcgttatataaacttgtcaagtaaccggctcaccacactctcctggcagctcttccagacgctgagccttcgggaattgagactggagcagaacttcttcaactgcagctgtgacatccgctggatgcagctgtggcaggaacagggggaggcgcggctggacagccagagcctttactgcatcagtgctgatggctcccaactccccctcttccgcatgaacatcagtcagtgtgatctcccagagatcagtgtgagccacgtcaacctgactgtccgagaaggagacaatgccgtgatcacttgcaatggctctggctctcctttgcctgatgtggactggatagtcactgggctgcagtccatcaacacccaccagaccaatctgaactggaccaatgtacatgccatcaacttgaccctggtgaacgtgacgagcgaggacaatggcttcaccctgacgtgcattgcagagaacgtggtgggcatgagcaatgccagtgttgctctcactgtctactaccctccacgtgtggtgagcctggtggagcctgaggtacgcctggaacattgcattgagtttgtggtgcgtggcaacccgacacccacgctccactggctgtacaatggacagccattgagggagtccaagatcattcacatggactactaccaggagggggaggtctcagagggctgcctgctcttcaacaagcccacccactacaacaatggcaactacaccctcattgctaagaatgccctgggcacggccaaccagaccatcaacggccacttcctgaaggagccctttccagagagcacagatttctttgactttgagtctgatgcgagccctacacctcctatcactgtgacccacaaaccagaggaagacacttttggggtgtccatagcagtcggacttgctgcctttgcctgcgtccttctggtggttctctttatcatgatcaacaagtatggtcgccggtccaaatttggaatgaagggtaaggtgttgttttttcagtcccaagagttccatggtttccacctattgatcaaaagatactgtacctccatatgctctctgcgaaagcctttggtcactggaccttggtaa

SEQ ID NO: 67 - protein, 457 aa, Mus musculus
DQLPAAGRWEPLPLSWKGRIQGTAMGNASINITDISRNITSIHIENWRGLHTLNAVDMELYTGLQKLTIKNSGLRNIQPRAFAKNPHLRYINLSSNRLTTLSWQLFQTLSLRELRLEQNFFNCSCDIRWMQLWQEQGEARLDSQSLYCISADGSQLPLFRMNISQCDLPEISVSHVNLTVREGDNAVITCNGSGSPLPDVDWIVTGLQSINTHQTNLNWTNVHAINLTLVNVTSEDNGFTLTCIAENVVGMSNASVTVYYPPRVVSLVEPEVRLEHCIEFVVRGNPTPTLHWLYNGQPLRESKIIHMDYYQEGEVSEGCLLFNKPTHYNNGNYTLIAKNALGTANQTINGHFLKEPFPESTDFFDFESDDTPPITVTHKPEEDTFGVSIAVGLAAFACVLLVVLFIMINKYGRRSKFGMKGKVLFFQSQEFHGFHLLIKRYCTSICSLRKPLVTGPW

SEQ ID NO: 68 - DNA, 400660 bp, Homo sapiens
tattctgtcatctttgcatcagagagtttacagattaaaagtatggcttctaattcaatctggcacaagggaatgaggatcctgccatcagcatccttcattaagcaccttcttttgcccccagcctctgcagttgccctcaccacacacgcaacctccccacacacccctctggctcccacctctctctccgacctgcatccacatgtgcatacccagcccattgggagtgcccctcacccacaccccaccgcaccccacccacgagtaaagcccacccgccccccgccacctgctccccgtgctcacctgcactgtccagcccctgaagaccccctcgcaggctggaggttcctgccaccctcagcacatgcccctggggaccacatgtggtgagttcacacacccatccccgagcccactccccatctctctgtcgctgcccacagccttccccaggcttggagcacacacttgttcaccctgtttaagatcaaaaataaactctctggaacctgttcaaaggttaatgtgcatcctcccttaattattgatttgttgattacagatgcttgggtaggacattcattgtgtccactgtgccaagggcctaactctagaatccctgtcctttttgggagaaagttggcccattgatcttttgggaaggagctatttgagtgttagataaaacctgtcctgccacaggacaggtcatagactaaatattgtgctccctgctgaagccctcattagccctagcccaggatggtctagggctatggctaatgagggcttggatggtcaccgctggggtcctccctccttccttcggtctcaaaaccagggaaaccctggcaaaggggtgtggggatgcagaggggcagaagtgcacctcaccaagtcccctgcagaggtggcagtctcccctttcctcattgcctcactagggacaatttagtgtaaaaagtggcacctggttccatgctgtgtttaggagaccagggtttaaaacctggcttattccacgtaccagttgggtgaccttggacatgtgatttaacctctctgattctatttctcaactgtaaaaccaagtatttgtgaggattcaatgaaatgacacacgtgaaggctatagaaaaatgtcacacacagaaaacagtcaatacgttgcggttgaagttattatcatcatcatcaccatcattctgcccatcttcatctctggggccccacgatcgtaagagatggctttctttggtccaggggatgcttcccttttggtatgtgggtgtggcctctggatggcttctgctacatttaaatctgtcagggacactgagccctggggcaaccataaactcttctggaaagaggttagatccttcacaccacagttctatggacatctccttgttcgttccagcatgaggctgggcaaggggagtgtggggcttgtcactgggaaacactggggagaggtctgtcatagggcacatgcacagtgggaaaatgtcactgccatccatccatggggttggactcctgggctctctttcttggagggaagttctagaacttgacactaggaagagggtgttcaaggggaactccaagtgtccgcagtgctttgagggtcatctggcttccagcagttggatgaactcatggtgccttccaggtgtgcttccaggctgagtttctaggaccccttccccatgcctcacattcaccccacagctttgagcatccgacctgagcttttgtcagggctggtttgcaccttcccccactgccaccttcattccctttcccacccccatcccagaactccctgggctgggctttctgttccctcagttcccaggcagtgcagctggtgctgtgggctggggagggggtggaggacgcagcagaaagtctgtgggagggaactatctcttagttccaaaggcaagcatggcttcccatgcccttccccacaacgcatcgcttcccccaaattcccacactggtgtctcagcaaataagacaacacttttttttttaaattttggttttccatttgctcttgatacctacttaaatgtgtgttgtgtgtgtgctgttctcagtaatcagtgccagaagaaattggagctgatctggtgatttcttgttttgagtcccaggtatctggcaaatatctggtctcctcctctctgggcctgaggagtttggggcatcacctctttggccctctatgctcctggagttctgttctgtttaaagaaacagaagccaggatagtttctagcaagcaaggagggtggagttgtgagcaccctaatagggaggccgaaccatctggtatggagcgggccccctaaggaagaatagtagaaagaaaaaataagggaagggagaactcctatgtatcaaatcctgggctaggcacattatgcacgttttatgattgccttctccaaactgcattgcaagggaaatatccatgagcagtgcccttcaggagaggaggatgaggctctgctaggtgaaatgataagcccaggtcaccagctagaaagtgctggagctggggttcaaaccagatttgcctggggctaaaactcacacttcataaagctgccccttggaggcgagagtgtaatgcatggtgtaaatggaagctgttgtcttggctttcctcaactctgagatcatctggttgttgataaatgcaggcaggtcagaggtgaagtgctaatcaagtgtgcaaaggtactggtgtccgctactcttagtggaaaccagtggctgtcatttgtgagtgttaatgtccacaaggtgttttcaggtgcattatcttgcttggtccttggcatcattggatccccacgtgacagagaaggaagtggaggataagagaaggacagtagcatgcccaaggtgatgcagcccaatatgctttgatgctaaatgaatgcattagtacaaagatgggtctgaaagccatagtcctataatctgagccagaggctcagggccagggcagctggaaggtgtggcatgggctgctttggtgaggagcaggtggagagaagggcaaccgtgggaggtggtgaggcagaggcgggagcctgggagccgagcaggagtgggctgggttgaccaagaagggcaataggatacagtgggggccctaggagatggggaggaacgaagggggaatgtctaacccagaagaagtctttctttggctttctgcagggcagaggccacagtaatggggctgctggacctgggctcttccctagactcagtgggaggaggctgccaaaggcccaggtggtaggacattgctgttcccaaccttctcttgaaaacaggagctgctaatctttctgcttctagaaaccccttgatatttgccttgttggggagaagtgtgtggcggcacatataactctggggatacagaggaagtggtcagctcaaagcacctcacttctgttaagtcccaaacttctcttgtggacacacatggggtttcaggcagcaaaataattcatttaatcttcccccaaaatatgtggtgtccatttttgggctagcaccaaagtaggccctggggggtatgtagtgaacaacactgacagctcctggccctcttggtccctgcagcccagggggaggcagacactgaacccttacttccatgtgtgtggagtggtacaaaagggcaaggtgtgctgggggcagccattcattcaacaaccacctagagagcccctctgtgttctcaatgccgtttacggggctggcaaatcagtagataaaataagcaaggtctgtgccctcaaggaagttacattttaaaacctggtaacaggaatatctccttgcaagtcaggaaggtgcccagacttctctgccccaccctgtcaatcttagttgcttcatctgccaaatgaaggccattatccccggctgccctctgagatgatccctggctgctctctcatcagtaaataggcaaatggctgggtattgtgcagaggaaggcacaatgtaagttactccgagagagctcatctaggaaggcacgtgagggctatgtctataatggagggtgggtgtggaggtgcaattctccagcctctccattcccctcagtccctgtcagtggtgctgcactagcctctgccaaccacctgcaggtttctggcttcctaaaagtgtgagtcctgactcttgactcctgatttcataccttgggggaagttggctcatggagtgggaatccctcttccctggctcccctaacctgcctgcagtgctcacctgctggcaggaagtcagctgcctgccctggatcctgctgtctaaggaagggctctagcatctgctcctgcagggcccccaccaggacactcagaggccagggaggccttgtgagtcactgcctctgcaggacctaggacgtgcggcattaaattcccagcccaactcaactgctcagagccggtggtgactcagcagggtctaccttcctatggaagggaccaaagcccagaaggagcaactcaaaggcatgagaaccagcagcgaggggctccggggctgaggagttgcatctcaggggagatgtacctgggcctgcgctctgtactttcttccccagggacccgagattcactgaaccctctctggcagcacaccactttggggtctaggaccagagccagagagtatctgtgggcggtggctgcacccgacccattgcaccaacttgccagggggtgctgcaatgtgtgtgggaagagcttcatggcggcattgtgtttggctgttagtggataaaggctgctggggcctccctgctgggtggtaaagccctctgggaacctcaaaagtggcataataaagttgacataccatgcttatgtgcaccaggcactattcaaagtgccttactgtgttatctcatgacaaccttgtgagttagatcctattttgcagaaggggaaactgaggcggagagccttaagtacattgctagggttcgatactagcgggtagtaaaccctacatgacaccattttagtcccattacagctgcttaccgcctggctccccaaggtcagagcacctcaagccggtgtgatctggagccatgctttatttaaaccgatcactttgacaaaccgaatgcatttccaatagctgtagtggggaaagatcagaaagctgtgcttttggagtatagggaaggaactgaggctttgctcagagaagagaggggcagtgagtagcctcctgggtggcttgcagaaaagaggtgagacttttccctgagggtctaggtggcagcactagcacgagggtggcagctttagggtgctggcttcgctatgtcaaagtcaaggatacccaaggaatggagctgtctgagaacagagtcgaaggctctggagtggctggtaatgagcttcctgccactgaaggtgttcaagcaggacaccaccagcaggtagtcccaacctcctggcaggtgtttgtccaagatattgggacttgagtgggagccctgagctggctcttccatggttgaattcttctgctttcctggaccactttggtgcttgactgtccccttttgtgggtgggctttcatcttccatgtatggtcaaaattctttccttggacccagagcttctggatagcattatacatccccagcctccaaccaggcccagacctgtctctttcccttgtaacttatgcttgggccacccaagaaacagaactcctcctctagcccaagcccagatctgccagctccagatagctcttttagaacagcaagtccttcaggacctagtattccctttgtagcccgctgtgctccccagtcacctcccagtatcacagtttcttgaccagctgagacttgcagaagtagatcctatttctgctcaaacttgaaagttgtgaagcacagctcttggattcagaatgacaccataggagcagggcatggtgggtgaatccatggacctgcctggtgtgtggcctacatcccggtaatgtggccactgactcaggagtatgggtcctttggaaaaagggatgtggctgggttagaaaggcagacaggtgaccaatagactggcagggctctgctctgagtttccactccctttctcccttgctaggtggaggggaatgtgggctgctggaaatctcccataaacagttgatattaatctcaggtgcttgcacgcctggaacatgccttttaagaaagacacgtgttcaatttctctaggtgtcaggggagttgggccactgtgctccagcaagtggtccccactctgacctgtctggtgaaagattgcattcgaatcttgggaacatttctgtcttctccaaacccttggtactggaaggtgtctgctcgcctgtaaagggtttctaaagctttactttctgttcaaaaaacaaaacaaaacaaaaaactttgcctattcctgcctcttattgatcagcaaggggcacacgggtgagtttcctcctttctaagactccagctggtagcaaaggagatgaggaggttggggggtgacccctggttggctggatgctgagcttggtcatgatatctccaggactccatgaagcgacaggcatttttccttttcaaccaggacattcttatcaagaggtgagacactgtaaatgctctggactcttactgaggggagggtgtctacgctggagactttcttctgctcccacatttaaatttggcctactgcagaggttaagaactagcaaactctgagtgtgcactattattgaccctgcactatgatttctgtgagcagtgcatgagcaggtcattctcatcttcttaagcttagaatgaaacttcaaatgtctttttctgacaaggcccctgcctctgagatacccagtttatttcaccctaacttcactgtaactgaataacattatgaggacccatccccatcattccccaccttttttttttttttctccctcaacagtccctttggcccagatccatgtagaatcagagaatcttcaagctgggagggatgactatggggctgcgatgtgcttatgaatcacctgggagcttgttctgatggacattctggtttgggaggtctgtgatggggcctcagatgctgcacttcttgcaagcttccaggtgatatggatgctactggacagagggccacactttgggttttgaggatctggtcttaacgtggtcattttacagatgggaaagcggagtcccagaaagcttgtcatttccctgtggttagaaatgaaattctgctcttccccactctagtctatcacctgctttttttttttaaacctttaagttcaggggtacgtgtgtaggatgtgcagctttgttatacaggtagacatgtgtcatggggtttgtcgtacagattatttcatcacccaggtattaagcctggtatccatgagttatttttcctgatcctctccctcctcccaccttctaccctctggtagaccctcatgtgcattgtcccctctatgtgtccatgcgtcacctgcttttgaaagggcttccctctttttcagctgtcgcttcctgctcaggcccagagtgtgagcataaacgtagcaccccatcttaatcccattttactgtcaggatgaaagacttcttgcccatcagggccccttgctccacaatctgcatttttaccaaatccagaggggtttttaaaggttttttgttgttgttgtttttgttgttctaacttatggatgtctcttcttctctgcttgacatgttaaaaatcctctctctctctctttctttctctctctctctctctctcaaaaaagtgggctgggcatcttttggacacaaccatttcagttccaggctggagcactgatgctgggctgaatccacttggcgttccctgcccaggagtggtctgagagaggctgtgtttctctgctgccacctgccacctcccaagagaggccaagtgttaggatctgactacacctcagtttcctgactctcagatattctaaagccaatcccagaatggcacttgaagtgacagggaaattcccagtggcctaaggacagccaggattggcctagggccagtagcaagtggtttgagagtccaaggaggtcttcacactctgtccccgcctgctggtgggagggcaaaatgccagtctggagacaaggccataatggcgacgggggtaaaaatctccctggggccaagggaaggtggaacgtgacgggaagtcgggaaaactgccttgtataggcatgttcttttcttccatttttttcgtccaagtttttactccaagcgacagtgccacccgaaggcgaccggcctgtttgtggttgcgcctggggcaggcggtgacaccggcataccccttcccccatcttgcctgcaagttgcatgacctgcatcggaatccacaggggggcgggggagactcctttcagatactggatgcagttgaattgaattcaatgtattttgcttcctcgcctgccctcctccaagctcgggaaggagaaccctgctttcttctgcgtgtgaatgctgtagtgtgtctgcctgctcggactcccctaaccctttcttctcctttcccacagcgaatgctcgtttttttttttttcagcaaacagctcacacttggcatctttatgttttattaagaaaaaaatccctaccagcgcaaaagcggggccccccccacacacacttctttcccggatgagatctgagctctcgtcgaaagctgcacctgctttgcgtccctaccaggaaggggtgcttgtgtgggagggaaggaggaggttctgcgcccccgaatccggagaaagcagcccgcccgccccctcacccggcagccagctcagctcacccgagagctgagcccgagaagccggcctctgacggtgctggcgtggcgcttgccaaaatatgccccttgcatctcaatttcccccggccatttctcttgcacgcacagctcgcccggggccacctcggctctccagcgcagccctttcgacccctgtttcttccttccccgatccatgcctgctcaaggccgaatgcaaaacccacctccaagaaagcgcagcgggcacggggggcacctagcgtgccatgtcccgcagtcccctcccagccaagaccagagccccagactctagattacggaaatgagtgtcattcagaccaaggactgcgcgtctgcggtcccggtccccggctctgggtgcttctctggggtgtctgtgcgctccggcaccccccgtcgccgtccgtgagcctgcgccccccacccacccaggcttgggagcgccccccacccaaggcttgggagcactccccaatcacctccgccacgttcatttcacttcctaccgcggtccggattgcagcaaaaccgggtagcgcgagggccaaaaagtggaaaggagagcgcctttccgtgtcgtgcagccagctcgccaactctccctccccagccccgaccctcgcaatctcaaatgcaactttttcccttcggtctcggtttcccccgggctgcggctagcgggcgccgcgctgcgaggcgtggagcgggcgggctgccgcgaggctgcgggtggcggtgccggctacagccgcgagccggcgagtgggtgggtgggtgggtggggaggagggagaggacaggcggggagagagacgggtgtggggaggggagggagggggagattccgctctcctgccgctcccagcccgggcggggggcggggggaggaggccgcgacgagggaggggaggagggagggaggaagggagggagggagccgaggaagacgctccgataacccgtgcgtttcgtaaggctcggagcacttgtacatttctgcagccgcgcggcgagccattcgcggcggctgctgcagctcctactgcatcttccttctcttcctttcctcgggctccgggtgtgtgtatgtgtgagagtgagtgtgtgtgttttgcaggtgcgtggtgtgtccgttttaattctgcccagtaggtgggacttggtgactttagcaccattttttccttttccttttttttttttgcctccccaccgtctgttgcaaccctgcaaagtctcggagtcggagagcgcgcctcgcttccagagcccccggacccggcgagtcagcgatcgccgagccggccaccatgcccggcagaccgcgccactaggcgctcctcgcggctcccacccggcggcggcggcggcggcggcggcgtccgcgatggtttcagacgctgaaggattttgcatctgatcgctcggcgtttcaaaggcagaggccccccctcccccttcccccctccctcgccgtctttgtttccttccccccctgctctccccactccccccaccccacccccctctcctctcctcctcctcttttttagaagcagcgatcggagatggatgtctctctttgcccagccaagtgtagtttctggcggattttcttgctgggaagcgtctggctggactatgtgggctccgtgctggcttgccctgcaaattgtgtctgcagcaagactgagatcaattgccggcggccggacgatgggaacctcttccccctcctggaagggcaggattcagggaacagcaatgggaacgccagtatcaacatcacggacatctcaaggaatatcacttccatgtaagtcaggcggccgctccccagcctgcctcccccgcgctctgcgtctccctcctgcccacccgcggccgggagccggccctccgcccgccccagctcgccgctgcccgccgcccgctgggcgcgcgtcaggctcgctctggctcgggagatgctctccggctgcgcattccaggtgactccggccctggcgaggcgcgatccggctatgcgtgtgtgtgcctctccccggagaggaccccggccgccgagggcacgcggggcccagctaccgcccgcctcccaaccagttgctggctcgtttcgatggtgcaaattgtttttttttgctccccactaaatagcaacagtttggccacgctcaagtggaataaagtagacgaggttcgattctttggcagaggcggcagcggcggtggcagcggcggcagcgcttagccggcagggaaggtgacagatagggactgctcgcgatccagccgaggtgtttaactatttccatttggaaacagcaaaacatgctgacaagtaaacaagttgcgagctggctgctcgcggggagactttggacgtgtggaggccgtcatggacgcctacctcttcccttcccctcctgcagcccgccctctccagccccattttgggcatttccgagacacccctttgccaccctcatctgcatctgggcgcctacagatcccttcccagtttgggctttgataactgctcggaactattccgagtcaggatggcgcagggagaggagagggcgtgtgttttgaggagaggggtttcttgtgtgatcgtgcggatcggttcatttggaacattcaactctggctggcttttgcttggttctgccccctccgagggagaccagtggtggcctgctcttttctccttgctatttttctttggtggggatggcagcagacgcaaaggagaggacagatcgagggctggggactggagagtctgctcctcttttctttcgttgacctcggccaggtgaccccttcctaacctaccaccctggagaagggtgtggaccatactggaattgctcagaggataattctcacctcttttcccccaaggcttccagcccttggggaccctcagcaatgggtaggcagctgagaagggtttgtgctgaggtcctggccaaggtctggaggaaggcattttgggtggctctttaccccttcgacggacttaagggggccggacctgcctttggtgctgctctgggagcacctccccttgcttcagcccagggccatggggctgcaaagcctggaggaattgcagtcctgctctttggaaagcccaccagccctctcggcttaatggagcttctgcttgcgctctcgcagctgacagtttgagggaaatggatagcccaggagatgtctctgactcctggcccaggagacaagcttgacccatatctcagctctgctgttcacccccttaccctcttcaacccggccagagatgacaagataaacagccaaggggcgggggtcagcagggagggcaggaggaacaggacagacccaactgtgcctctcccccactgcaggccacaggcttccagcattcccaaggatgcagggagaagggttcagagtgagactgttagggaaactcagacttggaagtgcattgctggggctgtatgtgtatgtgtgtagggggtggatgtgggtagtagggtgctggtgaaggtgggagctgagcagccagtcttggtgctcagaagcctgacctagagattgccaggggtgggccaagggttggaagaaggggcccctggtacccagcctgggtctctgggaatgggtgagctgcatccagtgtgctgctccaaggatgtgtctgtctgtagaaagccagtgggaggcagggatggtcacaatcacgtaggctctttatagccacacagaggtgttgctcctctgaaaatgatgctcagggaagcagtttcatagggcagagttgggttagcctttctaggctgccagaaaggtctgtgatgggaggggactggggtggcctcttgccctctttggtactggagggcctcaggagggcgtctgggaggatagtgagcagggagtggatctggagcccctctgtgtgtgtccccattcttgtttcaggacttggattctgagaggccatcaggactcctttctctaaatccacccaacaccaaagaacaagggaaatggattcccacaggagctgtgccagtggcaggtgggggagggtcagaggtcatgggtcaaatgacctctccttgccccatcttttccccagtgccctgttatatctatggctggtattgactgagctcgagaagagcccagatttccactccagagccagggggctggagagagggcggagagtcacgcttaccccggaaagtcagcatccccatccctgtttgacttctgaggaaatggaggcttggggtggtaaggtcacttgccccagacacacaatcccaacaggaacccccactgtgtggggctgcatatggagcaggctggaagagggatgtgcgggcagagagaagcacccgcagctggggtcagttcttgttttagtatgacttgggaagagggcttcagttgaagcccgtgccttgctggagagttgttcttcagatttctgatgttatcaaggaaatgggaccaagaggtcccctagctccctactggcctgaagctcttgatgctggtggctgccccagggtatagcttgggcacactctgggtagaagatgctgaggcctccacagtttcaccctcttgttcttcgggctgtaatgtttcgagatccttccttcaagtgctgaactgattgtaactgagtttccagagggacaagaggtttccctgtggttctgcttctcagggatggtgtgtggagtgattcctgtgtggccatccaaggaagctggctgggaactgcctctgatgggggaggccatctccccattcagctgccctgtttgtatctggaggaaatcagttgcaaggcatcagagcataagtgtgggtctcacctccacccctcaccagagccacgctcctccaaagggccctcccttttggcccctttctgcccaggaggccaatccctttgcctttgcagctgttgatacacaggaacctcatggagcctggaagggtccatgcgcagccacacccaaccaggctgtgacgtcacaaaggcaggagggtggtggccatggtggactgtctgggccgctttgctaggccaggcctacctggggctgggttggagtggtatggtctttagctgttagaaagaagatgaagtgggagaggatggcatggctggaccaggtatgcttggggctggctacctcggcttgcaaagaccacgggctcttagctgggactctgagtcgccagctgggtctcactctgagccgccacagggtccctggcatttggcagctctctggtcccttcatttccatggccctccctgaaggccctcttctggctggctgaaggatcattcggggctttggccgtcatgttggctcctgagtctcattctttctaaggatcaaggggagacccagccttgacaatgacccagcagggtatgagccaggccccaaaggcatcatggggctcactctcggtaggcacagtttggtgctcagaaccccaggattaggactaggtctgagagaggtgggcagaaatgtgaggggctgttgacatgagatttggaagcaggagtagttacagccccagagaaaggtacttccaggatcaaacctggagaccttggtctcctgaggccctggggttttccaccaaggaaaggctattggtggctccagagccaagaccccctgccccaggaagcccagcaggtcaagcttctgtcatacaccctggggccaagggcatctgctctgcacctccatgggacctgaggccatgacagctttgggcaaaaaccagcccaacctggccactgctttgaaagtcctcatctactggccccaggaaggctaagcctgcaacctggaaggttccttagggtcctagaaggctcctactaccctcctgcctggctgaacaggaggtgctgctgtgagaaagggagggcctgtccttgccttgccagtccctgccagctgctgcttctgtccaactctgtagaaggaccagggccccaactcagctggctcttgggtgggtgtgggtagcctgaggccctcctttggtatggcccttgccaatatcacggcatttccactgtggcctgggtccccatcccatgtgctcccatgggtggcttgcacagaagtcataggcatggtctccagcctcccctcggggcctccagttggctggtggcagagaaagggatggatcatgtgaatcccaccttggctctgcccctaactccctgtgagctccatcagggcactctagactttcagagcctgtaaattcaactatgaattgaggccgcagggcagagtgtttcttccaacttggacatatgtcatctcagggcccagagaacttcccccaggaggctcggccacgccacttttaagggcatctcctggggatggcagtgatccttgtgatggtgccaggaggaggtgcactccctcactgaccttgggacagtggttattctcctcttccttcccttcccacctctagcaaactcaggccacccagaatttgacaccatttgtgacacatgacactatttagagtcaactgcccagaccaaatggcatatttaacaagaatgtgctggggcctgcagcctctcattagggcctggacacccagcttcgtgactccccatctgcaccctgggctcagggccaggaaaagatgttcttttgcaaagctttcagcccattgctggagcacagctctccactgggtgtgagaagaaaacactggaacttctattgcaaattatttttgcctagaaaagaggatatttcatatttaatgtatagataatagatatataaacatataaagtaataaatatgagtgtttggggtttataaaataaactttttgattgctaaatcatgcatgatcaatacagcttggtacccactgctcttgtgattgggagggttggcacttgagaaggagacagggtggtgacagaagaggtggtcctgaagcccctggctctctcttggtgctgggccaaggaacggttgattaataggggggtatggttaatgtgaggagggaataagctgggtggggtggaggatctcagttccggatcagagttcccaaggcccaaaagccccctcgcaggggccaggccagctcttatgaaacgatggtctagtgcctactgggatcctaccttcttatccttgtgtagcaaattcttcatctccacgaatgcccccatcagtcatatcattatttttagtttacaattgttgagtttatttttgtgacagttgcttggcatataaaagcagagcttaacagtcccattttacagatcaagaaaacaaaataaagaacaaatctagtgtcccaggtggtcatgttgtcatagctcacaaatggaaaagtccagaggctctcaggagtctgtggttcttctggggcttctcttaccagcttgtgggtccccttggctctgttctttcttgggcgtggccctttcagccagacattaggactacgcctgagagaggaagacagaaatgtgaggggctattgacatgagatttggaagcgggaatacttacggccccagagaaagatacttccaggatcaaacctggggaccttggtctcctgaggccctggggtttggcttgttgggaaggaaggtgcagagcattttcatctaggaagtttttttccacccaaagggcagcattgcgggaatgacccatctttgagggacttgcaaagggcggctgagtgttcagcaactggtcaaagagtggcccagatagaggctggactcagtcactcagatgctggtgatgaactgagtgatcagctcatgtcatttgtcattctatgaacctcgttgacctcaactttgaggaacacaaatcctcctggtggcccggtgtgttggaagctgctcgttgatgggttgggtcataaggagtgaagactccagtgaggctaacaccaaagctcagggcccagtggagtcctgagaacccccaaggaggctcttcccatttccgccgcctctaagtgcagggcttaccagaattcaaagctggaaaggaccactgcagtcatcttctccctcatgtcacccatgagggtccaagggcccagagtgggcagggactcagccggggtccctgggtcgctcgaagacttctcttcccgggcacactcccaggtgctggggccgccttctactcagtgctggctcttgttctgggcactttgtcaaagccagagcctcccccatgactgtgtctccctctgaggcaatgtttccaaattcagggtccccagaggcagcaactatgtgagactggcagccccagagctctttgcagcttgcagcccacaccaattagaaatcaactcgatgaggccttctgctgagctctgttcacatacagggctggggaacctggggctcagcagacttgggagcctgtccttttcccctggcctcacctctgcccccagtcctcctgcctggcttgtcccatcataagtgtcccagagtctgggtggtgggagattcaggattccttccccagacacgcatcatcaagcatggaggactctggcagctgctcttttcctaagcccagttttcccagcagctcctccaggcatggcctctccctagctttgaacaaatccctttcctcctctgggtctcaatttccttatctataagaaatggataataataacaactacattatgtaagcaccctgttgaagttcagtgccctgggtcatgtctggctaagagaaatctgtctatacataactagtgacagctagcatctactgagtacatgataacaatcgttagcgtttctgaaacacttactatgttctagacactgtgccaagcactctaaggctaatacctcattgcagcctcacatcaaccccaataagataagtactattattagcctcattttccagatggggaaactgagtgcagagaaggaacttaactcacttaatttcatgcagccagtaaatgggaaagcagtctggcatttaaatattaagctatactgcctatgctcttttgcaatactcttatgcatactagcatacacatatatatgcacacatgcacacacacacacacacacaaatatattactattaagttaaaaataaataaaagagttgatgtaaaagtctaggagaatcatttagtttacaacatttcagttacttgggtgggagttaccctggctgggatataaggggaaggcacataggataattatgggtgtagtattggccaaacagtgtggccaacactgtcccaggcaggcctcttagtagtgggggaggcttttggtctctccttctgacctgttcccaacagggagtttctcctgaagttgtgtctcagccacaccctcttcccaggcctcctcatccaccccatgatgtcctggcctctgaggtcaggtcagcccacagcagaacaggtgccagctgaggctggctgagattcagaaagctggtggctgggtcccagccagctcctctctgggctgagccgtggtcagcaggactatgcccctggtgctcatggccagcgagagcctggatgggagagcagagggctgagtggcttctcccaggtagagctttggggtgccaggagcatttctgggtgcagagcaaaaggggggtgtctaaagcgctgggcagctggagctggaagctgatgtttagagcttctttctgcgtccttccctggtcctctccacaataagcagcctttatccccccgcgaccttaccccgcctctctaccttcattgctcatggaagctccatctctctctccatagggatgagctcttagtgtgggagacagatacaactttcttctgtgaaacagccgaaactgtggggcagggtttggtgcattttccacgtttgctgcttcttggctgtgtgagcttgcttcatgatcgctcagccactggcctcgcacttctgagagctgaggtcatggaactctccagcccggcacccccgtagggtcactgtcatgttcagacctatgcaatgatgtattcgctaggctctgtaaataattgggcaccacgttggttatttccttttctagactactgggaagatttctgagttagagagaagatcaagactttgaaccataaattactagatctggaaagggcctcagaaaatgttggggccaaacactgttttacagagaaagaacttaggaatcaagagaggtgaattgatttggcccaatcgcccagtgagttcctggcacaaggcagcccagaacgaagggccctgcctcgctagctggtgtgggtctccatccgcctgttggtgtctgctctgggactgaggggttcgggcttttacaggcaggcggggaaaggagctcttagagtgctgcagagaagaggagaacacgaagggagcaatagtagcttcgaagtcctaaacccggctacctgccgcgggcaacagggctgcgtgcgtgtatctgggggagtcttggcacaggcacaagtgcttctcttctgtgttctgtgcacatcgtgtctgaggtctctgtaaacagaccttaaaagattttggcttccctctgcggctacactcctggtggccaccagagggcagtgtggcgcacgagacggtcctgggctgatggcttcctagggcgggagccgggcgtgtggcgctagcctggtgagaagtgcactgtcagccctggctttcagagcatttcctgagccagggctgagcagagaggtcagctctcctctatgaggggcatctctccgccgagatgaccctgcttccattgtatctctgcagtccagggatgtgagactcctggacccggactttctgactcatgagcctttggcttcctgggaaggaggtggctgggcgagtgcattggatggaggaaagccacctggtgtgctctccttccagccttctctcagcagcagcaggagagatcagcacatttgcacagagggtaatggggtgaatgcatggaaggtagcccaggaagacccacaggcttaatagagaagttgacagatagtttcactgtggggctagtatcatggaggaagcgagctttatacaggctctcaggctgtctgatgccctggctgaagtgtgggggaatctctcccctctccctgcccccaccaacccaagcttggaaattaccggacgacaagtagtgctcagaaaatagcaggtcctggcattgactagagatgagagcttggcgccttctcttaacctctgcagatcccgtgtctgctttaggagataaccatacacagaggtggctacgaaagtgccttgcaaaccagggccatgggccctgcctggactggctggttttgacagtgcttctgagagtatcgttggctcgtctgtctgttccaggcagtcttgtatttgagcaggtgctgtcttgttccatgcacaaatgagcgtcctcctactaacaaggttatcagctttagagacagggtctgctgcttttggggtgggtgtggagctctctggtctggggcctgtgactctttcttgagggtctgctcccagcttcctgacctggggctgcaggcagtgttctctctgttgtggtccatctttccccacttccttatttctgatagcttttcaaatctggtccactgaagagaaggaaagaagctgacattatcccttctactgggccagagatcatttacatatacaaccctaattatttatggcaacgactaaatgaagctttagatcatgactctgcctcttacatcctgagaccctgggctggctacttgaccttgttgatcctcagttttctcatatgaaaataataaacataaggcaggactattataagatttcaatgagcacgtgtgtgtgtgtgtgtgtaaaactattttctctgtcttcctattactacaccccagaacctcatccccacaagcatggatactttttatagccctcatctgttcttcttgcttccagtctctctgcctctagctcattttccacaccctaacagattaatcttctaatccagggtatttggttagaccaattcctgcatcctgaacttttcatggtccctttgtctgagaggtggcatggtgtagtgggaagagtagaggcttctttggtcaaaaaactcagtttaaatcctggctctgccctggtataggcttaggcacattacttaacttttctgagcctcagtttcctcatctgaaaaatctggttagctatacccatctaatagagaggttgtgagggttgaatgagattatggtaggtgcctggcatgtgatggctccacagaagccaagctggtgagcagtccacaggagtctgtaagaggtgatgggcagtgacatttccaggtccttgaagaatgggattagaggaagttgcatgagggaactagcatgtggacaaagctgacggaggcaagagaaggactaagatggcatgtatgtggaaaaagggacacagtggctgaggtacatgccttccacagggacagggagattgttatggctcctgctaagggactcctttggaataccaagtgtcagagtgtcccaggcaaagcctttaactacctgccttccccactctgcagccccagaaatctggatgccagaaatctctatctagggtaatttagtagcatctagcttcttgcagatgttgtcccaagtggttttattgctattcttgccttacatagcttcccattcactagctgattccctcttggctattgtaatccaataagtctgtctgaagagggggcttcaggaccatccctggtagaaagaatttaggaatccaatgggataggatgacctaaaatcctttcaatccactcatgagagcctcccatggacattcatcccagttccatataaagccacaagagggcactagaccatgatttctgcagggagggaagggctgttgagcctgtcctgatgtgatttgtacctttgatgaaagtctgagccccacttggttttttcccaggtgccatcttctctggggtcatggcaaaccagcttgattcagccagagcccatagcactgagactgatagctcaagggaggctaaattgtgtagtaaaaaggtcatggaatttggcatctgtctcaggttccaatccttgccctcctccttgcttgcttttttaaactgtgagcacgttatttaatttttctctgcctcattttcttcccctgcaaagtaagatgttattgggagagttgctatgagatggtgttgtgaggattaaaatacatgatgtggggacagcatctggaacatgatagaacagcatctggagcagcatctggaacatggttggccatctatctctttctgggagaaatatgaagttaggtcacacccaggagatatgtatgagatccccttggcctgctggggtcattttaccccctactgaacgctctatggttccaattcatgggggggcagcagtgacacccagtggctggcatggagaacagcaagtgtattctgatcttgcaggtggtgtggtggggattgtccaggccaggtcagactgagtcagggttagtggatattggcttcagaggtttcattagcagaatttctccccttcaactgctaggtgctaaagatattttttttctgagggcattcatgtgatgatggctattagggatgtttcttgctggggcccacagtacgaagtcacaactggagaaaccacatgggcaactgactaagttgattgtgatgaaacaatcctggcacctaaaaaccagagcctttctggtgttttcctggggcaccactctttttgacatgctttcatacagtctatctggttggccttagccaagagactccagatctctgaacctcagtttgtttacctgggaaatgtaggggttggtctggttgacaaaaaagcctcttttagcttaaatttgagtgtcagacatgattgaataccttttgctcagtgtgtgtgtatgtgtgtgtgtgtgtgtgtgtgtgtgcatgctatgggggatgggatcaagtgagaagcaggggtaggggtcactgctaagctttgggctttactggtgaagaaactccagcctcctctcagcagaggagtagctctgaggctggtttggggtgaccctggctctcatccttgcagcctcttcatttctccacctgagatccaggagggagcgttggcagacgggccaggctcaggaagttatttaatatcagctttgctccagattgtgtttctgactccctgccacctcttaagtggcagtcatttgaacaaatgtggcgataagacacagagagggaaataacataagaagtggggagggggcaagggcgtggaggaggggtgcaattttattctcttggcagaaaccttgtctttgaggcactcaggagcaagaaagaaatggaagaggagttcagctcagggctcctcaaagtccctggtgttgaaggaagagggtggaaagaagggcctaatttttagggcctgcagctgcagctcctcctcctccgtgggagggccctatggcctatggggacttctggctcccatccctagggcaggtgttggaggggcggcctcatattctgttttccaaaggactgtcttccaagtgcataacagacagctaatgggggcctggcattggcggtgtgtgcagcccacagtgaatgctgagctgcatctgtacctaggctgtggggtgcccaggtgtctggccgcctgccttgctgtttgccaaagcccatcctagcatctggactgttggggaagaatgagcagatgcgctagcagggccagcctggctcttccttctgtgggacccaaagaggaggagagtctaccccctttcatcctagcgcctagcaccagctgtgggccagacccatgctgagccctggggcacagccttgagaaaataaaagaccgtgatacttccttcttggagctacaggtgaatggagggaggcaggtattagacaaatgatctacagctcaaagggttatctcaagagaagcgggggcagaattttagaaaacggatctaatgtaaagtttaaagaaaaatttatatatatgaaaatgtggcttccctaaggtggagagggtgcaattttcctaaatggagttttgaaaattctagatttacctgctcccaggtgtactgaatgtgataacagtagagtgagttgtcaagactgtgccccctggctgggaagttgattcattggccttgctgttgctcacagaggccccacgcggaaaggcaagagaagcgagtttcatttctttccttgtcactctgcctgtgtgagatgaagatttgggctgtgggtagtttatttggaaggtgaccccaggaagcctgggagggagagcggaagtgagacagggagggaggaaagccacgcatcagtgtgtccatgcgcaggtggctacgtgctcttcccaggcgaccgttcattcgtttctctatttgtgcatttatccaacgtgggtttattggagagtctctgatgggccagccacttgggagagctgggaaagccgtggagagcaggacccctgaggtctccattgtccctaggtctccattgtcgttctaggatgtgtgcagccgagcagcaactctcctggcctctccctgcacctggaaatcgacctctggagaggggaggtgggccaagctttgctgagagtgcacggcagattccgtccattcccggggccatgttctcggcagaaaagtcagagggctgtggatatagggcagcccttctccccagtgcgctgggtggaggtgagcctgggtgaggcgaggtgcaggtcagatgaagagagtagctccacgtggtattgaagggtagccctgcttcctgctcccagcacccagctggcattctgcccaaccagcggctgacctgccccatgccccctgctcctaggtgagactgaccagggcacaccctccctcctcctttccagcccagagcagctccctgggccctggggaagcagaagtggcaggagagtgacctcatgactccctgatttgcatctagggttcattttccggggtcatgttctgtctccctggaaatgattggttgctcttccctgcgcccatcacccccatccctgagctgcaggctgtgtctcccatccaggtgactgacatccccctgccctccttctgtcactcactcaggactgctgttgcctgctgtctgggcaggcatgctctgaccttgaggccccaccctgctgccctctactgccctctatgttcttacctgcccaggaggtcactgaacagaagagggcggcacagctagtgtctcagtccagctgacaccctcgggagccccacgatgtgtcctatatggcattagcttgttaatgttcctgtttcctcactgtgtggtgagctcctgaaggctggcattgaggcttattcagctctgtccccaagagcccccacctagtaggtgttcagtaaagacctgtggactggaacaggctcatttcctgcaccagaatgtcccccaggcccacagcaaccctcccagcttgctgagggcacacatgcctccatgcagaatgctgggcacaccattctcattgctctccacacctttgtgggcctcgggctttgccctcagcagggcagcccgttggaggaatcttctagagaaaactgagctcatcacagtgacagcaaatgctgtgtgatgactgctctgggggctcctttaaggggacttttattttaacccgcttccattctcagcacagtgacatggcaggtcccacgatcatcctcattttacaggggagaaaactgaggcacagggtggctaagtagcttgccctaggtggttctgctaggaagtggcagagctgaggtttgtctccagagccaggggggcagccctgtattacagacccctttccatttcctgccagccccagcctcctccacagtaagcaggcacccttgggccgacaggacacatgacgtgctgttttggtggtaaggagggtggggtagaaggggcccttgggactcagtggagtttgagatccttgagtttcatggacacaggtgtttttggccacatcctcacagaatgtcccctgcgtcagggcaggatggggctggcctgtgtcccatcactgccacagtttatcgggtgtgtcgggatcgggcattgttgtctctaaggtctcagttttcttatatttaaaatcagggggctggactaggtgatctttgagatcccttccagctctgacttgtgatgtttctatggcggtggctggggacgggatgggaaagtaggggagccatacagatgcagcagccctgggtttctctgggggcaatcctgtgggggaggggaggggggctgtgctcctgcacacaggtgcgtgggaaccttgttcctgtgtgtgtgtgtgtgtgtgtctgtgtgtgtcgctgtgtgtgtatatgtgtgttctggagaccagaccctgtgagttattaagctttggcgtgcatgcgcatcaccgagggctgttaaaacaccgaccgctgggccccaccccagagtttctgattccgaagtttggctgtcaggcctgagaattcgcatcgagtccaggaccacactttgagagtgactgttgatattgatggctttcacactgtactccctggagtgagatcagaggcggggtggtattctgcataacatttttatgaataagatttcctagactgcaaaaagcctgcatccttccattcttgaagaataccagcccactcccaagcacattctgccaggccttgtcctggtgcttggttctctgtctgtttctctctcccctcttctctctgcacccctgatgtggtgcctggttctctcctgactttggccccatgctgacctttccctaagggctggacttgacctgaacctgccttgacctgcgtgatccaacctgtagttgagagatgaaaacacacttgttacagaatgccattccagactcaagtggatttgtaaaaatgatctgggaggtagagtaagtcattgtgtgactgcgcctcaagaaccttacttggctcccacttgcccccaaggtgtagttgagacttctctctgtggcactcagagctgttcatgttcaggctgcagctcctctttggagtcctgcctctcgttattccccatgggaatcctctgccccagtgagctgatctgctgttcattcctcaaacattctcagcattgttcactctcagtctcgtgatccggccacttcccctgcctggagggcttctggcctccagtttgcttatctgggccctccctgtcactccagtcccacctttgagaggttctttgttgcccagacccatgtttgtggattattttatctttccacttcctggagctcatagtgctagcagctgctgtgtgttaagcactgtattcaggcctggcagtgtatatagtcactcatttaatccgcacagccactgtctgagtggagaactgctctcgtctgacagatgaggaaatggagaccaaaagatgcaagagcttgtctaaggccacagcggtaaataacagtgaggattccagcccaggctgactccagagcccatgttcccatgtttattgcagaagtgtgtgcaagagcaaaacaactggaaacaagctgaaatgttatcaggaggcatttgaatcaagagctgaatcacggcatagtgagatgatgaaatcctgtacagcagtttcagtgaaaaccttgttctctgtgtggtaacatggctatattttgaaaacataatgctggtgaaaaatataataagttgcagagtgacataccatatatacacgttaaacatcacaatgactgatataatacgttgtttatagacagaaagataaaatcgtgggctgaatacaaaccaatttcgtgacagtcttggcctctagggagagagggagagaggaaaagaagggtatgtacagggctcttaactttacctgtaatgtttatattctgtctttttttaaagatcttggcatttgacccaatggcaatgtgtattaattccaggtgatgagtagataaaatattcaatacaagatcctttgttttttctttattataatgaaactttagaagccctaagcgataaaaagattattatacccactagatttatgatttaaaataaaaacaatattaaaatcctcatatttcttggctggggctgccataagaaggtctcacagactgggtggcttaaaaagcatatgtttgttttttatggttccggaggctggaagtccaagatgaaggtgttggcagggttggtttcttctgaggcctccctccatggcttgcagacggtcgccttctcactgtatctttacatggtcttctctgtgtgtgtgtgtgcctgtgtcctaatctcctcttcttataaggacaccagtcattttgaattagggctaccccaatcacctcatttaaacttaattacttctttaaagaccctatctccaaatacagttacattccgaggtactgggggttaggacttcaacaaaggaattttgaggggaacacaaaaatattataacaatcataaaacaaaaaaatgcatacctgatgaaatttaaagcaccatttttagattttctgagtgcagaattctgtggaagttcatcaaggctgattttttttttctcattttattttggtgtgtcttgttgcgaatgcccaaagtgtctgcttagtcggtcatgtaagcaagagagccctgtggaagaagttgcacagtcttaggtggaatagaggtggataaagggaaggacacacgcaagcaagtgcaacatctgagaagggtccacaggacagttctgtgttttaaatttagatctcaggtgtaaataagcaaaacaactcatatataaagtgcatgatttctagctctcttatgaattaattaactaattatttcaacagctaccagtgagcaccacacttgtgtcagtaaccatgttaggcatccctccacccccacacaatgacaacgggctgggaccttcagctctggggatgtggtttagcagtaagaaagaacttcccaaaacaatgggtcacaaaatagggctatggaattgttttctttgggacatgtaaatacataggatccctcccatcccatcattttattatgcaaatcctcaaacatacagagaagttgaaaattttgctgtgaacatccataaaactacgccctagactctgcaattaatatggcactctacttctttatcacatcctctatccatctgtccagccctctatccactccttaacccatcctatttttctgatgcatttcagagtaaattttagatgttggcatgctccctctacatacttcagcatgtatgtcataaaattagacttcgattctttttcactttttgagctaatatttatatttaatgaaatgcgttactcttaagtgtgcattctctgagttttgacagatgcgcacgcctgtgggacccaaacccagtgagagacagaacattaccatcccccagaaagttccccacattcttcccagtcagcatctgccattgcctccccagggggagccactgtttgggagatttttcttttcttttctttttgttatctacttttgagagtagtgttttttgttttttttttttttaattttggtagcttttggagtacaagttgtttttggtttcatgggcgaatttatagtgtgaacttgtagagatttgtacccaatatgtagtttttttttttttaatcccttcctcccttccgtccttccccttctgagtctccaaagtccattatatccctctgtatgtctttgcaacttcatagcttagctcccgtgttggtatttttcttctcttttcttttttacaattttttttttttttttttttttttaataatagaggctggagtctcactttgttgctcaggctggtcttgaactcctggccctaagtgatcctcctgactcagtctcccaaagtgctgggattacaggcatgagccacagtgcccagcctgttttgggctttttcacaatagatgacttttccttcttctacagcttcatagaaatggaatcatataatatctgtttgtcaaaaatgtttgtgagattcatccacattgttacagatatcagtgtttggttcctttttattgctaagtgatattacattgtatgggtaacctgaatttatctgttctcttgtttttggttgtttctagttttggagtattatggataaatctgctatgaacattcttgtacaagcctttttgtgaacgtaggctttcatttctcttgggtcattccccaggagtgaaatttctgggatgtctgataaatttatgtttaactttataagatactgcctgacctttttccgaagtggttgtaacagtttacactctaggactgtttttgattaatctgggttaggagagacacatttatgtgactcatcgaaacaggaccttgtatctttgccttgcagaggaagaaattgaggggaagaagggtggcatcacttgttcaaggtcatccaactggtaggtggcagagctgggatcctgtttgactcaaagccccaggggggttcctgttgtggtgcacagcttcttgctgctttttgcagaggagtgaagcaggcagaaaacagatgactgacttctcaagggcaccttctggggtcctcagcccaaggacatccccctagggtcctctcagagctcccttcttctctgtgacactgtggaagccagggcctggtgggcatttggtgctctttagcagggctgggtcgtttccttggggttctccatccaccccagttgtgctgctcctcccaggggcccaggctgagtctcatgtgcaagggatagatgaatgccactcgaagagggcctggtcccaccagaaaggcaactcccctgggcttgtgtctctctcccacaatggtttagctgcgagtcctgcttgctgagtgctcagatgtgggttccgggaaggccgagaccagtgagtgtccactgtctgcagcagggtactgactgcgtgggtccagcgaccagcccagcctgccagctcagagcctggaggctattgtgggtagggtagacagcgacacaggccttactcattcatgttggtgattctgtgatgtgcaagacacaacgtttctggcctgggaccttacaattcagtggatagaggccatccgttgatatgcaagcaaagaaatcagtacaatcatatcaggagtaagaagttccgtgaaggtactcaacagagtgctctgttatgaggcatgatggggaggtgaggaggctgcctttgtgtaagggtagggcgtctgggctctcggagaatggattgtccagcttcgatctgtcagtgacagacagtcagagcttcatgagaactggagccagaagtttccaggcccagggcgtagccagtgcaacgcctctcaggttggaaggggctggaagtgtgtcgggggctggataggaggccctgggagcagggctgagtagggtgcgctggtgggagtgggaggttggagaggtctgcagggactagatcaagcagggtcatgcaggctgtgggaaggggttagattttagtcctagcaaaataggaagtcccagagggttttccttttaaacaagagatgattcgacttacagctgaagtgatgggtgtaataaatgtgttggagaaagaagcacaaggttgtacagatttctgtgagggggtgcttaatccaggctgggcatgcagagaagctccccagaggaaggggcaactgagctggaactggagggatgagcaggcactagcaacatggcgagggcagaggcgatggagagctagtctagaggagggagcagcgtgaggagggcccctgaagcaatggtgtctttaagaagctgaagaaagttcattctggctggggaagtcgagaggggagagactgtgcaggcccaaggaatatgggcttcttataatgatggctggtgtttggtccagcttatctttgtctttccagtgtttagcatatgccttgctatataaatgcagggctgatgcatgcatcaatcaatgaaggagaatgaatgaatgaaggaagagagtgcagtctggagatgtgtaggctatgggagctttttgaaggtcgagcggggggcgatgagagacaaccttggatcctgagaggggcagatgtgattggactagggtgctgtccatcgtctcctgactgaaggtccaggctgcctggcaggctggcctggcacaggacggtgactgtggacctcctttgccatgagaagaaggcttggtcccacccgagaggcatcgaggtgcatggtggcagaaagggactccagctcaggaatggcacttgctaaaatatatttgtttattcggagatttaattaacatgtttaaatattaaagaggaaacaacgcatgtctagtgggactcaacatttaccaacagttctcacttatttaatgatttgttttcacagccctgagagccatgtttctggctttgttctagggaggccagagggagtagagattctcttggacaaggcagggagggggagcactggatgtcaggggaggaggagcaaggtgtagggaggaagggggcagggaaggaagggagagtaaggaggaccaggaggagagggaggagaggagagcagttttctgaagaggtggacctctccaggcaaaagaaaccaagaccctgcatttggtttttgtggaaggaagagagttttggagtttcaggacagtagggctagcctgcaaattaaggaggcctgtggcaactaggaagtccttgggggagtctctgcagctgggggattagagggtcttgggatttgctctttcgaggatgctaactgtggtttcagtgtgctaactttcgtggggtgccacttctccccaggatgcttaaagagcctgcaggctgtatggcagcagcccattcccttgccttcacagggagggaaggatatggacagataataagacccccagccaccactgcaggtggaactgtgtgaagccagaggtgtttcacaagtgatctgcattataatatctctgcaaatgaagtcctggatactgagagattacactgggggcgggggggttatttattggcaatgtgctctacggttttaattttttctttttgcttattcaggctttagctccagaggaaaatagcctggggtggctccgaaatagattctctctgccccattaacttattcagtgagtttaatggtcccttctcccctcagccttgaagccatcattaagaggcagagatttataaaagcgaagacactgagctttagtcaaactttcgctctgggctggggggagggtctgggtggaggtgccccctcagccctgctgctgtggatacagcccatgagtgggcccaagaccctcaagacggaagctgtaggctgggggatgggttcctgggtgtgtgggggtagtgacatcactccacaaaactctttagggttgaatgatcccagcttctcccagctctcacaaggcaagaatgttatgttgtcactgaaggcctggaggctgagttttctggggtcctcagtaggcctctggggccttttcttggtacatcccactgcccaactcctggctgctcactgcctgctttggttcagtttactgcaaatcagctcctcagaggttgcttcatggagggattaacttgtcagaagccggttcctttccagccaagtgtctagagggccaattgcccaaatgaccaatgagcaaatggccaaaagaaaaacagccacatttaccaaaactttgatttaaggaatataattattgaatcaagccaagttaagccagtctaatccagggctgtccaattcagtgcaatccaattcaatccacttcacttcctccattatttgagcatctgtgctgtgcatagccagatattgcagagggtacagcagaggaataaaccaagtctgggagcagattagacaagtgcatctgttctgtaaaggaagatggatgtgacaagtgaggtggcgatagaagaggatgcagtggggtggggtggggtgggttttaggaaaactttgaggatggtgcctatataggggggtccctggctgtacaggtaggacctggatagggagggaggtgaggcaggacatttcaggcggaaggtgtagcacacagccagagtgcccagtggggtgggtgaagtgcaagatcccccatcacctggaggtagggagcatggaggggccatgagcggccacagatgagctgtgggattcactcggggagggtcttgaatgttgggctgaggcatctgtaccttatccggttagtgactggagtcactgaaagtctaggaagacaatcttaaagaaagttcaaatggctcaaaaaaaatttaagtatctttgttaatggaaaattgaaatagtgaaaagtaggagatagaataagaaatcactcagttccagcaaccaggaaaaaatcccccctactctgatggatttcctttcaatcttacagtaggttgattctatagtaaggtggatactagagtcacaaggcaaaaagtgatctctgaaaactctttaaaccgctcatgagtggacacaagtgtgttcactatgaagaacacaggagtgagatcagctagggtacagcgggttcagcacctctcttacactggtgttgatggatgctcgcattgagtgaaatcgaggcagaaacaccagcctttgaaacctggttatttctcttctcatttttcctgggtgcataaagctaaatttgcatagactcagtgtgtagactaaagaagaccattgcatttgtgtgtgtgtgtgtgtgtgtgtatttacatatacttgggcaattatttttaatctgcgtttcaagaaagagaatctgaaagtgacacagattgaggaagaggagaagcaaatagtggagaaagaagacaggaggcaactacaatagctctggatgggtgatgtgggtggggggcaaggggagcggagaggaaatatatttcaaagcctatacaaaaatgttaaacaatgctgattttcatgtgttgagtgtgagagttggaggtgttaaggtggaataaaatgcccagaacttgggtgagaaggggaacaatgctgcctttagcaggaaatggttagggggagaggtctgtgacatctgtttggaacacgttgagttgatggtggttatgagagatgaatagcatgcaggttagaaatggtctggagcaagacatcctccctctaatcagcagacccatgttggttaagtttatcaacacaagaaaccagcaagaatagcttgttaaagaaggggggtcaagacttggccatgttctgagagcccattctgccatggctaccagccagttttctccatgggcgtcaaccaactggcatgtcttcaggaaatgggctttctcttgtgagagctttattaatattggcttaaaagacattttacctttgtctttatttacagggtggttttgtctgagctttgttaatattggcttaaaagacattttacctttgtctttatttacagggtggttttgtcttttatgtttcctctccccatccccactcttctcaccaggtctgtaggtagaatcgggcctctgtatcccagaacaggtatactgcaagctaataggagaaggcaagaagattggttggtacatgattattaataataatgagaaaaattaaaatgattaaaattaaaattgatggcttttcaaaataactttttactcttctttgaggaaagctggccagatttttttgttccattttacagagaaggcaatgacttttccaagatctacctgcctgttagggggcaaacagggcccttcttgcaatagtcagctttccgcgatcatgatctctgaatccaaaatgagaacatgtgctctgcagaggtgaggatacttgtgggaacaacaggtttccatatatgaactttgagccatcctagaaaattcaggcatcctcttatcctggtggatgaagtacttataatggtgatgatgatgactgacaacaataggaagaagagcgtcacccaaattgggtgctatgtgctgagcacttttcattcagtgactttaatttaatttaatcacagctgaacaaggtaggtgttatgattcccactttttagatgaagaaactgagacaatggaactgaggtcacatggccaaggtcatccagctagcaacactaactagattggagcccagagcacacgctcacacccctacaagttacagatgacagtctatggtctctctggactctttgtccaacctacatctggaggtggtgggaccaccctgtgctacccagttctgtacaatggctgcattgtgacttggttagattttccaagccggaacaaatgttcctgatgtcagtccagtgagaaattctgctccatgttccctgggctacactgatccattcatcttgtataagacaaccatgtggggaagtagataaaatatttgtaccattgattgctttatctcatgtggatggaaggtgggagtgagcaagtgcccatgagcaggtgagggaggctgcacccacctgtgtgcagagagtgaccagggcaggacctcagggatgctggtacccctggggacattgcctgttgcatccagatctaactctgacaagagttaactggcaggctcttctcaggatcccttctggtgacagactgtgttagttgcagaccagggtatcttcttttggatgggagtgacgaaggcatccatcttgaggaggatgtagtccctcctcacatctttgaaggttcatatggaagatttagtaaagtggatggtctttccagtcattgagtcactcaacaagcattgggatgtaacatggagaagcagattggaaagatcctgagtgtaaagatcaggcagatttgatcctagttctcctgctcatgggctctaggatgttggataagtcatgtaacctcttcaagctttagttcctcctggaacctcatcccccagggtggttgttagagttgaataccattatgtatgtaatcagacaggcttgcgtttggctgcaagtaactgaaaactggcttggtggcttaaacatataggggtttatttttctgatgaaaattagacaatgggagattggctggtgttggtccagcactcagctatgtcaagggtggagtctctgccattctcttagcctttctctcatggttgcatggtggctgcagccaatatgtcctggtgaggggcagatagggtcagggaggggtaaggagtgagcacaccagcaaagaacggagctccccagaggtccccccacaacactcccacccttagacttctgcatatggctcaggcttcaaacctggccatcccttgttgccagggaggctgagcagatgaacatgtggctttcaatctctatggcaaggtgaggtgaagggggcagaagctggaggggcttctgggggtgctgccatatctagagagcttgttggcttgcagacctccagttcccctctgttactgcgtgtgaggctttgtggaagttattttgaggatcacagtgatgaccccaatagacaactataatacaagggaagaggtgaagagtactggggtcatgtgctgtgggttttcctggaggagggtctgtttctgcccaggggaatcaggaaggctgtggtgggatctgagtgatgggtcacaactgaccaagaggaagggagttggaaggggcagcaattaccacagctcccagaggctctgagtgcaggtgtagacagatcctttatgcactacagggtagtatgggggcaaggggactgataggatgagactcatgtttcaggaagattgagccataacagccagccatggattggaagtagcagacagccaggatggggagacccagcgggaggtgtggaatctctccagatggagggatgaaaatcagatataggaagagggggtgggagagagaaatggcatggaggtcagagtggcaggatttgagctgagggggcatgcatggattctcagtgctgggatttccagtggggagcccaggagagaggggagtgacgtgcccagagatagaggaagatcagcagggagtggatatgagaaggaaaagcatgattctggtttcacacattgggtttaggtttggcctggaaatccagaggcagatgtctgccagcagttggagtttctgggctggcttgggcataaaaaccaggcctgcaggttagtgaattatgtgtctagaggtgagggctgaagccaaggatgccagtgaacatgaagaagggaggagggccaaggtgagaaccctgtttccatctggatacaggagtaaggagaaaggacccacgggagtgagctagcaaggggaatgcttggtactgctgcgaggggcatgcagcttctagggggagggtagtggtcagcgacctcagtggcccagaactgaggtgggtagagggggagggaggaacgggcagtgagtgttcccctgagggtttggttaccaggtgtgttaatctgctgctgctgccataacgaagtcccacagactgggtgtcttaaacagaagaagtggattcctcaccgttctagaggctggaagtccaacatcaaggagccagcaggactgggttcctctagggcctctctccttggcttgcagatggcggccttcttgctgccccttcacctggtcatccttctgtgtgcacatgtccccggtgtctctcttttcacctgcccacatttcctcttataaggacccagtcacattggattaaggcccatcctaatgacctcattgtatcttaattacctctttaaaggttctatctccaaatacagtcacacaccgaggctctaggtaggggctaggacttcaacaaatgaattttatgttgggggtgaggagtggacagcagtcagctcctaacaccaagggaaagctggtgataggttggtgggaaatgcagctttttaagggaaatgtgggcacaaaggaagagccagtggatgggagagcctgaaggagcaggagagacccgacggggaggatgcagggcatggaggatttgggagagagagaataagaggtgcaaactgaagctgagatttcctggaaggctggggcaccatcgttcatctctgtccacagagcctcactttatgctgggttttggataaataaaagaagagcatcctctatctctgtaaaaggagggaaagtggaaaaggtgaatgtgcagatgcatacataaagtggaaagaagatgagagctcaggtcagatgttctaaatcttctcagtgatacttaacctctctgagcctcagtttgctgctctgtaaaatggggctatcacccctccttcactgggtgactgagaggattaagtaagataatttctgcaaaacacttggcctggtacaatgctaagggctctctacaagttgagtgtgattattgttgttacttttattaataatggaacgggacacaagaccatgtgagtgtgggcccaggggcaggggtgggggtttgatggagatttgtatcagccataggggccgtgcggcccagagatggctcagtgctccccctggtatgtcaggatggagggcagtgggggcctgaggacaaggaggagggacttttgaggctggacttccctggcctctggaataatttgtgtctgaaatttcagaagccagactgttctctaggaagtgagtgttggaactggagacccacccccattgtgggtcatctcactgcccttcagtgcctggccttccccggcatctcagggccaccttgtggactgctcgtggcctgtttcttatccactcacaccatccagtcggcacttcctgggatctaccctgagggatgctctggtggctgcaacctctggggtggaggagagagcatgtgctgagggcattggagggcagggatgaagggagaggaacccatggaaggggtctgcagggggcaaccggcaggtgctgccctgggcttaggactcttggtcccagagctaaggacttagagacggtctggctcactccctgcattctacagatgaggaaactgaggcctgaaaggaagaggacttgcctggtgttgcacagtggggacatcacagagtgaagactcctaccatgcctttgacttcacatccagtgttctctcgacttccagactgcttcctgggatcgcccttgtcttgtcacctcggccctttagaagggccatctctccagggtctggggtctgagcagatcagggccagaggcagcagcaggctgtgcatgtctaggtagcgggtgactgctgactgcagcctatcggacccccaggaagggatctgtgccttgttgttctggcccttccttcaatctcctcccatccctcctcctgcctgccgtgaggtgtggtgtacggggctgtcggctccctgagtttctggagagggttttggatctggtctgcatggatctggttgggaaacatcagcactgtcagaagaggggaagtgggctgtgcctggcttgtactgataattgtgaccctgctttgtgaatcggaactgtggatgacttaaaacagagatatcaagagagaagcttcccacgccctgcagccctgccctgtcccccatcttgtctctcttcttcatctcctggactcttcatcctcccacttcattcatctgcagcttgctttgggagccttctccactctgaacagcatccaggggtccctcctgcagaaaacagagggtttttggggtttgcagaaaggaggtgggatgggtggcttctgcagctctgactggctggtctcttttaggatcagggtagtacagagggtatagcccctgctcacctccacccagcagagaacccatacctgcttaagcccagtatttgtgcagaaatgtcttctctcactcaagcaaaaccccgacctgcattggaaagcaaacccagcagcacaggggtagagatccactggggtgtcttgacacgtcccttttagtttcatcttgggcttcttcccctttcattattcctgccatcaccctctggcccaggggtacactccgctacccaccacgctgtgagaaacatcatctttcccgcaacctcttggtagtggctggcatttaaaagaagagaacttcactaactactaagggaaaataaagtggagatcattataggaaaataaaaaggcaaacaggatcaaaatagcccactttgcaaggcaagggactgcagtcctgcactagtgacaccctgctccccaggggttggtttgattctccagctccagtgccaagagtgagggccttgtgcacacctctgccactctgcctgcctccatgtgccaggataatttatgtagctgcctccctaacaagacagggacacctcaaggtcagcagcaggctgtgccttatcaaccctaccttcccagagtcgcagcactcctggtaggtacctgggcagtgcgtttctgctgtagaagcagtgtcacaggccagataacagcatgggtgagaataatgacagtcgtgatagaacctgatgactgaagtcttaataggttccaggccctgctatggactttatagagatgatctcaggaataacaatgcttatctgaaattcaaattaatactgtcattagcttcattggacagaagaggaaactgaggcttagtggttcataatgtacccgaggtcccctcagctgggaggtgaaggagagagtatttagacccagcttgttgaggccccggaatgcagactgtgtgggacttgtctgcacctgctgggcatgttcttctcatgctgggaaatagcgttctcacgacttgctctccaggcctcagactcggcaggccaactgttcagcctgtcctagtctctgcctttcagatctaggttctgagttctggtgcctggtgcagggctggcccctcaccttgcagggagcatcctgatctgaacttggggcctcatctttctcagccccatgctcacaaaggggccttctgacactgtatcatccttaggacgagaggcccaggcctcttgtcttacattatctgcaccagctctgagatgcagaatctgagatcacaccagatcagacaataggtctccggccccgggccttcctagctatgtgggtgctaccttgagtgttgcctggaggccaactctgtgtcctgttaactctgcaactccctctggtcaacagaatgaatgccatctcactgccctcatcttgctcctaataacacctcccatgcctggttgtcccttgtcactttgttcttctgcctttggagcactgcctcggtttctagcctctaccctgggccgaactttctaagtcttctgctactaccttgtgaataacaatcctggccagccagcactgtgcgaagggtttttaatgtgcagtagcccactgaatcctcctgtggcccaaggaggtagacggtattattatgcccattacatatataaggaaacacagaggaagaccccaaaaggttgagtactttgtccaagaccatggagcgatgaagtggtggcgttgcattggacagggctctctgacatgtgaatgctgcctccttacctagggctgccccaggcctgcttctggcccctgggcatacccaggccctgctccgcagtctctggcccttgcaaaactccccacaagcccacccttgttgcccacggcctttgccttcttgtccctggtgcagtcttcgcctgccagctgctccttctgcctctgagcgtgtgggcagagaggggctctgaggaggaagggagcaatgaggcagcagggggcacagctgtgaccagcggccagccccctcctccagcactcacgcctggtgacacaggccactgcgtcctcccgggtgacctggtgtgatgctttgccctggccagctggtcaaggacattccactcggctgatttggaagcagtcactgtccgccctgggggccgtgtgctgggggtgttccagctggagtggctgacatctgccttctgcccaatcccacccgcctcccgagcccgcagctctggctggagggagcagggaggcaagcaccttttctcccctgctgcccaccctcctgccagccccatcgccccatctccttcctctccctcctctccccacttcttggtttgagcttggagggctctcagcccagtgtgaggcagtccagaaccccaaaagaatcctgcgggttcctcagggacctcttggtctcacttcgccgctgcctgactgcgggatgttcagtgagtcattgagcctccctgggcctcggtttcttaatctgctgttaataatggtacttgcctcctagggtgattgtgagaattccaagtgcctggcaccccacacttcagaagtgggcactctggtcacagattatggccatgacctccaggaagcagtcaatcacctcaaagtgccaggaaagtggcagttttgtctactttcacctcacaactgggcaacctaaacttcttgggcaagtctttgagctctatgtgcctcagtttccccacctatgaatggaaatcacaggctgtttcacaagattaatgttctgcgttctgtgtgaaatgttctagaaatgtgctccataaactgaaatggatgattaaaatgagggatgatatatctttaaaaaatatgattgttgtattattgaaaggcagcttcagggttaggaacgtaaactgtggatcctgcctgaatttgaacactagagctgcttttcttgccagccgtgtgaccttggctaagccattgaacctgtctcagtttcctgttctgtaaaatgggaataataacagtacctgctgcatagccttgttgtgaggttttagtgtgggtgatgtgccagattcagaactaagctggcataagagtcatatataggtgcatgtatgtgttacagctgggcactgggatctgttcctatgcccgtgtcacagagaatctctgagttctgacccacgtgcattccagctagttggcaaacagtccctctgtactgcctcacccaacatgggctgcaaagtctgctttctagctcatgctttgaggtatgacaggcctttctagctcatgctttgaggtatgctttgaggtatgacaggtacgtggccaagagattccagttgcatgtaaggtgtgcaagaagccctggttctggcagttatctctgcagtgccgcgtaagctgtattgataaattaatcttatattgttgggaccaaacaatcctgtaatttttctattgtgcagcctaatcggtctcaacagctgtgtcattagtttatgtttgttgtaatctagtcaggcccttgtgagccattgaacaagcccccctcccacctccccattcacccgtcactacgggactggcctcagtgctcttttccctggcctgcactctctgttaaggggtggcaaattctttgttttattttatttcatttttattatttaattttcaacattttatttttttaaatagagatgaggttccaccatgttgcccaggctggtctcaaactcctgggctcaagggatccacctgcctcagcctcccaggtgttgggattacaggcgtgagccaccgcacctgacggtaaactccttgttgaaaaagtaagcattgcatcaggatcaggttatgtggctctgcccttggtattcactagctatttactttggtaacatggttaaaattgctgttatttttctcatctttattgatgtttttttcttatgaatttgtaatgacatcagcaaatacctaaggtgaaatattaagtgaagaaaagctaggattcaagttgtccatccatcatcatctcatcctctaagaatgaagacgggaggaaatgctttcaggctgaagatggttacctctgggagccgtaattgccagtgactttacttttctttatatgttttcagtttttccagactttccacaatacgtctgtattactttataaccaggaaaagagtaattgaaattaatccgcatgaagtccaccagcaatagagtttctttctttctaaaatgaaagcattggactagattcccaaccctggctgtgtttcagaatccccaggagagtttgttaaaaatgcagagaactgagccccattccaggaattctgagcctgtactctggggttaagcccaagaatcagcatttttgagacgtatcccctggaggttcagaggcatccagggtttagatctctggacgggttgatctcttgggacctttctgccatgatcacttcctatggatgtgtcctatttcaagtggcttgactgtggggtgggaatggggagtcctgtggccagcattcctctggcttgagggacagatcttttggacgttcccgctctcgctgggaagaagctggctgcaggtgtttgtggccatgtgcaggaaatggctggcttgaaagctgtgtgggctcctgtgactgcctggaaaggggccttcctcttgccaacatttcccaagagccttccagggctgggcctcttctcatctctgacccatttcattctcaccaactcacacagtggaccttgctctcactatttttcagatccgaggcttccaaatttaagtgacttgctggcgtcacacagctactgagtggcagagcctagatttgaactcccatctgtacctgcaagcccatggcgttttctctccagcaggccccattgggggctgacccacaggtctctgtcttggtggcctttgaggtttcggtcattcttctgagtaggagaggctaggattttcctgtgggccatcacccctctccgtgcctacagtaggacccctgccatgggactccacaaccccaagaaatgcatgagcggttgatttgcttgggggagctttttcagggttcctacgtgtggctcaaagccatggtggtcattgtcatccctgctactggcattctttttcatttatttatttcatttattttattttatcttattatattttagtctgctgattatgccttcttttaaacccaagctgattaaattgtagtctgatttacttggggattttctctgggcatttgaagctctctctcctggcagtcgatagctgcatctttggctgggctagcagaagcaagagaggagggggtgtgggcatttctgggtttggatgcaagttctccagtgagagctgtgtgaccttgggcaagccattttgcagacctttgcttcaccatgtgtgcagtggggataatgctgcccatctcagaggggtgcagagagcatgggctgagagatgatgtaatgcactcagtgcagggcctggcactcagaagtgctcagtgcgtgttaggcatcaccatcaagattcttccagtcttgattttgacctccaccacccctggaagcctggacaagtcacccacttcaggagcttcagttcccaccagaatgtactgttttggaaatggaagtgctggttcacagctgggctagtagaagtttgggtttagtcgacttcatccagggagaatgactgtttcttccagaatttagctcagtgtgagggaaacaggattggttctgtctcctaaggttttgcttggttccattgccaataggcattgaggccaggaggccagccttctgccccaagggtccagccctgcacagtgagggactctgggatgcctcatcagttgcagcattccagctgctggctgggacttctcctcttggcccccgtctgtgggtttcagggggctgtcagtttcctagtagacagcccagttgtacccaaacagccacacagctggctggagaggattaaacttaatttgctgcaggtcaaaaggattttaggcccctcctgtcttttttcattgattattttgctttgatattgaagggggaagttggactctgctaatgggcttctctctctgcccaggcgggtgccatcctgcacatgtaggtctgcctcaggccttccacagcctttccttcatgcatgcagattgttgtttacatatttcccaccagtctgtggccaagaggtcgtctcctgtcattgttgctagggctgttgctatggcatctgtcatccaggctgtgttgtgagagaccacgtgggtgatgccatgccccctccagtacagacggtccttggcactggaatggaggaaggccttaaagggaatactggctgggtttacaaacaggtggatttggatgagaatagagaactcttagggcaagggattcctgagcactctaaagctccacctctcacaggggttaatgcggcatcagggcctcctgtgaccggagcagatgcaggtgctgatcctggtgatgacatcattgagctttcgggcagctcaggaaatggtgcagggcacagaagcaacagagtcacttgtgcctagggataatgcttcccaaggtccccaggccctgcagtcagactgtgagcccgagagtggtgcacagggctccagctgacagcatggtggttaaaactcagaatcatcacgtcctgtgattgaacattgagtgccttctgtgccccagcccttagcaagcattgtcttgaatccccaggacagggctagttgatgagcattattatcccattttacagaggaggaaatgtaagctcagagagatccagtaagctgtgctgggtcacagtaagctgtgctggatcacagagctggtaagtggcagaggcaaggttgacatcccaggctgcctggccccatagcctgggtcttcaccagcaaccgtagctgcgtggagaagtcttgtttatttctctttaggaggttttctatggaggctgcatagaaatgtccatcagaggcctcaacatagtggtcttgtttatagcaaaggcagatgctcccatttcacagacgagagaatctgtgacttgcccagggacgtagtcaggctagactagaaatggtttcttgaagcacacctgcattcaactcgggggaacagagatgttctgggcccccacagtgggtctttagggagggttgagattgctgttgtccaggtgttcgtccaagacagcgacccccagaggcggcctggagaatgggcacaagagccttaaaaaattgtgctaaaacggtgaaaccccgtctctattaaaaatacaaaaaaaattaaccggacgcggtggcgggcgcctgtagtcccagctactcgggaggctgaggcaggagaatggcgtgaacccgggaggcggagcttgcagtgagccaagatagtgtcattgcattccagcctgggcgaccgagcgagactccgcctcaaaaaaaaaaaaaaaaattgtgctacaaaacacataataaaatttaccattctaaccatttttaagtgtacagctcagcaacgttaagcacatccacattgctgtgtaactggtctcccaaactcttttcatcttgcaaaactgaaactctatgcgattaaacaacaactcttcctcatttccccattcccccctcccctggcaaccaccactttctgtctctagaaatctggctgttctaggtacctcatgtaagtggaatcggacagcgtttgtatttttgtgactggcttgtttcacttagcataatgtcctcaaggttcatctctactgtagagtttgtcagaattttcttcctttctaaggctggatagtagtccatggtgtgtatttaccacattttgttatccattcatctgcgatggatacacgggttactttaaccgtttgattattgtgaacagggctgctgagaacatgggtataccgttagttatctctttgagacctttaatctttttgggcatttacccagaagtagagttgttggactacatggcaattctttgtttaactggggaactaccacactgttttccttagtggttgtaccattttacattaccaccagcagcctaatgtctccacatcctcaccaactcttgttattttttgttttttttagtgtccaccctaatggttatgaggtggcatctcatggttttgatgtgcatttccgtaatgattagtgatgtcaagtatgtcttcatgtgcttatcggccataagagtcatttttttgaagctctgttaacgtcaaacttcaaaccactgagttcagttcagtccctggtactttggggtcaccaccaaatatagttcttatcctaatgggacttgcagattaagacaagtagggcctgaggctattccacagtcaactgtagcaaggaagggtgagatcagttcctcaagagaggggtggataataagttctggagctcttgccatgggaggaggacatgcatttgtgatgatgctgggctcccctaagaggagtgataaccattccccaggcagtcaccatcaccatcttgacccaccacaggggatgtgcctcatggaggcctgttctaggaaggatggctgggtggcaggaggaagttccagctgctgcacttggatccagagacagctctcccactggccattcctgtgtgccctttgccaaaagggatggtctcactgctaatttggggtcgtgcagaaccgcctccctgccatgaccagcacgtggctgggctggtcagccccagggagagctatttgagtacattttattctgtagctaagtttccctccttctcaagctccaggcccacaggggtgagctctttctgagccaggagaagtacctagggctgctgtgtagtttttcagtacccaggatggccaggatgctgagcctccggggcaagatattccatctgatttcgggagacagtccttcctaatgcagaccaaacttgatatcctagtggctgtccctctgaggtcagtgatcaactgctcctgtcctccctgccccagtgagctacaacataacaactcgctctcaccccttatttaatcctggcttaaatgggagcactattgagtgggggcactaagatcccctagccatgaccttgggccagacactgtactgggtgctttgtgaacatctttttgttcaagtcttatgacaacctaatgaatgtgagaattgctttctccaattataatgggacagcataggatagagtttaaaagcagagaccctctcaaatcaagctgcctgggttcaaatttcagaattgtttttttccagggagaacctggggagcctagatccagggaaagaacagcacagagagttataaatctttgcattcatgtttgcatttttcaatttcatattctttgcatatgaaacttcctgtggttccatattttaaaagtatatatagatgttaccctggtactgctttgcccagtgtcaattctctccctcaagagaatggacttgcaattctctcaccagaggtgaccaattttgcatttaatttgcagtttgcccctctttgttatgcaattgtgttgctagcattagaccctctatttctggatctctcattctagaattctttgggcctcttcccccagctttcctcccagccccagcctggctccgctgagctgcctgttgatgcttttgatttctctctcagtggctccctcctggcatcgcaggacacagtgtctagcacggaacgtttcaggggagccacggggagctctgcgtcaacggagatgtaacgctggaatgaatgcctacacgcagagtgaatatctgcacgagggagacagttattggggccaggtggggcagtggggggccgtgtttgccctggagctgggcatgctgcttaggtccatcccgggtgacagctgctttccttctccaacccccaagcgtgatgctccgtttgaactgggatttgtcaaggaagccgtgaacaaaccgggatgtttttcctctgatgaattgccattgccaaattttggagttacttcctgggcctaaatgctagacggcaaacccacagtgcttatggtgtgccagacacatagggtaggaggtgagggaacccagatacctttctctgaccaagaagggctatgggcctataggggctttgagcaaatcactgaatcttcctggggctgtcaacttcctcatgtgggaggaaaccgggcagaggagtggggagcagggcaaggcccagaaagtcatgagttccccatccctttgctgaacacctgtcacctgccagccactgctctaggcactggggcatgaagatgagccccgacagccctgcacttcaggggctcacctcctagtggaggggcagatgtgtgcccagccggttatgggacaaaatggtaaattcagacaaagctgggctcgtatgggaaggcgttccagagaggttgcatcttgcttgggaaataggaagagtgttcatttgggggcacatttttttttccttattctctctgttttttttttttttctgctttattttttcctggctcaaatggtcctagccctagtgacctccccttcaagaagcagtacagcccagtggctgttccaggttcagtagtgtccttgtaaagctcatgtctactctgcagctcagaatgtggctgtgttggaaatagggtctttgcagacataattccttaagatgaggttatatagcattaagaggggccctaaacccagtgactggtgttcttataagaattcgacatgtggacccagacacacgcagagggaggaaggccttgtgaagatggagtagagattggagtgatgcagctatgagccaaggaatgttaaggattgatagtaacccctggaaactaggaagaggcaagagaggattctcttctacagccattcgagggagcatggccctgctgacaccttgatttctgacttccagcctccaggactgtgagacaatttcatttgttttaagccacacagtttgtgatactttgttatgggagccccgggaaactctacagtggctaagcacgtagatcctggcatacggcctcatttcttttgtttttttttcttttttgagacagagtctcattctgtctcccaggttggagtgcagtggcatgatcttggcttgctgcaacctccacctcccaggttcaagcagttatcctgcctcagcctcctgagtagctgggactacagacatgtgccaccacgcctggctaattttgtatttttagtagagacggggtttcacaatgtttgtcaggctggtctcgaactcctgacctcaggtgatccacccgccttatcctcccaaagtgctgggattacaggtgtgagccactgcacttggccgcctcgtttcaaatcttacttaagctgtgtgaccttaggtaagtgacttgactcctctgtgcctcggtttcttctttgtaaaatggtgatagtattagcatttacctcgcaggactgtgtgagggccgtaataagttaatgaaggcagagcatgtaaaatagtgcccagcacatagaaaacactgcgtgtttgtgattattatttgaagtccatctacactcccgcttctgaaccacagagctctcctcgtaccccagagtgaggccgagctgccttgtctgtctgtctgtctgtctgtctgggccttagtctccactgttcctagagaggggctgtgggcacaccctcacagcatctcaagtggacacgtgtgggcagcttgtccccctgttcctctttcattgtccttgtcccgcctttattttattcaggctgcaaggatagaaagtgggagaacccagacacctttaaaagtagagtttcctccagtggagaagagctgtgaacctaacagctggggggctttgagcaagttactcaatcctggtgggcctctgtttcctcatgtgtgaaacgggaatgatggctcaccccaacatcagagggctgcctaaggatgacaggaagtgagaccatgactccagggagcagctgtcaataaatgttccatgcaagaaaatccacaccagaaagacatttgtgctagtctcagtcaggcatagaaagaagcacatttttactatggcttaaacctcacacatacggggccattctgcatgggctgttggcgtcaggtgcccaggcgatgggaccccacagccctgcagtgtctcagcgtgggcatcggtgcagtgaccagctttcctggggctgtttctgactcagtatagagtgaggatggagttggactccactcagtgtgggggccctgacgtttccccttcaggcatgggtcttctttggatgtctgatggatttttgctctgccaatggcagccacagagtgggacatactgctggccatggggccctgggatgtgtgtgtgtgtgtgtgtgtgtgtgtgtgtgtgatgcagcagccaaaacagcttccatgaagcatctaccaggttggagaggtaggaggagctgggagaagggagggtcagaggtcagccaagtgcaagtctcagttactgtatttttgggtaggaacgaggtccatcaacagagaagtgtcttgtgaacatccacagctaaatggcagctttaccctttacacaccttgcctcatatgtaagctaagggccatcactttgaccaccagcataaaatgtctgcactatgggcacgtgttaaagaattcagagacatgctgaagaaatgaactgttagagactttttattttatttttattttttgagatggagtctcactctgtcacccaggctggagtgcagtggcgcgatctcggctcactgcaagctccgcctcccaggttcactccattctcctgcctcagcctcccaagtagctgggactacaggcgcctgccaccatggccagctaattttttttgtatttttaatagagacggggtttcaccgtgttagccaggatggtgtcgatctcctgacctcgtgatgtgcccacctcggcctcccaaagtgctgggattacaggtgtgagccaccgtgcccggcctgttagagacttttaatggatgcttccacctttatttctttggattcttcacatttgattcatgtaataaattgggtatttagaaagcaatgtatctgggctgtatttgctttattctacaaaattgggtttattgaattacagtttaaatgtgttcatgagccatatagagttgattagaaaagaaaaaacaaaaccactcatttgaagaacatttctgtctcttgtagaaatataagaacatgtcctctgcaatgtcacacacaatcttttatagaaggatctatgctacaggttcttttctggagctagtgtcagggaaaacatgtttatctctacagctgacttgtagtgacttgatttgtttcccttttcaccttagctgccaagaaacctgtggccacattcagtgcctgattgtgagaattagttcaccttggactcctgttaacacatactcctttgttcccttttaataagtctattttgcttacattcctaattatgctattttatattacatcttctctcaaatcctttaaaaatggacaattcttctgggtgtatacccaaaataattgaaagtagatatttcaacaaaaaacataaacatgaatggctgtagtggcactatttaaaatagccaaaaggtggaaacactccaaaatgtccatcatctgatgaatgaataaacatgtggtctatctctataacggcctattattcagccataaaagagtgacattttgatacatgctacaacatggatgaacctaacctcaaaaatgtgttaagtgaaataagccagatacaaatgcatgtgcatattttatgattccatttatatcaaatgtccagaattgataaatccatagttgccagggactggggaaagggaagaaaggggagtgtgactgctcaatagatacaggatattttttggggggtgatgacaatgctttggcactaaatagaagtgatgtttgcatgacattgtgagtgtattaaatgccactaaattatacatgttaagatggctaattttatgttatgtaaatttgccctcaattaaaacaatagtgcattaatttttttaatgagtggagtatataaatgccacttgaatgaaaatggtgtgctgggctctcagtggaacatctcactgctctgggtcacaggcagggtgtttccctccctgctcactgctctgtttgtctctcccaaagctgccttccatccaaggtggcagctgtcccaggagcccgctctctgatggaagttgacgcagaagttatgctctttggttagctttttaggacgagttttcatgatccatttacaaataaatcagaagaactcagtgatatgagctgtatgagagaaggcttctgctttctctaaagactctgtaaacttagaggaatttctaaataaaaccaggggcaagttgctccaggtgttcgctctctcctgcccttggggaagacccagcagcatcatcttcacaggcaccacctgggagagttgttcctgcatctgagctttccctctggccagtttgttcagttccaaaccatcatggtgcaaaggcaagaaaccagttgaggaattgcagaggaacaactgcttgagatacaggacattctgtagcattcctttatttctttgaaaacctgaggctagggcttttttgggtttcattttaagaatttcttccatcttcaggcttccgcgaggaagatagatcaggtcattgctctctgttttggaatcgggctgctcttcgaattgcttctctcctggtgcttccaggaggccagcacagttagaggggtctgaggctgcctccctttgagaggccctccctattcaagaaaaacatttcttcctaggtgtgggctcccttcattccctctttcttagctttttcttggggcagtgcttcataaacacttgtacatcattgcacacagagaaattgataatatttgttatttgtgtagcaccatgaggacacatagaagagggtatttacagctggatgtgacctgccgggtggcctccccagatcctatgtggacagtgtctgtactgcattggctggcaagatagagtttgaaggtagggaaggggatgagggatatgtttagcctgcttttgccagaagcccagaatgagtctgtcatttacctgtcagtgcccagatccattccctgcccttcaggcctgacccctggaaattacatctcccaggaccctttgccaactggctgggggctgggtttggccaatggaaggcactgtttgagtctgtggtcaggaacagagagggcaagctccctgcctcactctctgggtagtggtctttgcatctttagcaatggttgtgtttcttagtatttgcagcttctgctgggcagtccctgctgttcctggctcctgccagacggctctgaccctgggcttcacagcaccacttcctccttttatcccttcagcctggggtctttctgctgttgcttatctctgtgttgccttgtggctacctgtttggctttttagcaactccaagatgtcacccgtttccccattaaatttcctctctcaagtataggatgtgaattccgttttcctgactggtctctgactgatagggcatcctagccactcccatgtggtcttccaaatagcaccagctggtaacagaacacacattggattaaccttgttctttgtgcatacaccttccttatcaacccatggcggcagtaggcagctgcctagaatttaggaccccgacagctggccaaacatcatctccccatgaccaataatggggaagaacagaggtttggggcagctgcttctcttgtctgtctagaaaactcctatgcatccattaaggtgcatatatcactacctcttcgtcactgtcttctttttcctctcatttcctctatcttggatcagttgtttcttcatctgtattcccaaaccagtttatagaacttatgcctaatagtagtttttccattataattacacatagatttatttcccttattagtcttcaagtttgctgtgggcagtacctggtcccactcaactctgtatgtccaatgcctcactcagggcacgatgcttggcacattgcaggcaatgacatcgttttgttgaattcgttggccctctaacttgattgcacactaggatcccctaaggaacctttaaaaaatactcagactctactgcagaccaatgaaattgcaatctctgagggtgggctccaggcattggcattttcaaaaggttccctaggtgattttgatgtgcagccagcactgggaaccattggtttatttgactgcttcagcttaccacttgctgtttattaatgagtcctgccatcaaacccagctcttcctgcagtttaattcaacgtagcaaatcactgtgagtgcctactctgtggccaggcattgtgcaggcacactcttgctactcaaagtgtgttctatggactagcagcctcagccatcctgggagcttgttaaaaatgcagaatctcagaccccgcctcattctgacctatgagtcagaatttgcattttaacaacatgcccaggtggtttgcatgcactttatagcctgagacacagtgatgtagcatcatgcaaatgtcaaattgctttctcactgtgaatcttatttcctttgtgtccactctattttgattccctttagaggggtatcattttatatccctttctccagctaaaatgggacatccaaagggggtggagaccaagcaggagtcagatgagatgaaggatccccttgagtgtgggagggatgtgggagggaagaaatggactttgagagatggaagccttcctgggcacacagagtgccagtgtttgggaggccttggggatgggctgtttggaagggatgtctcctgtttctgacattgccacttccttggttatgatccaggcatgctggagggatgttgtggccatagtggctagaggactgcaacagatcccattgcagggagtggggtgacatcgatgcaaaccaagtagccttacttgcctcatgcctttgggatccacacaccgtaggaagtttctgcaggctggcctcccagaatccacaaggttacctgttgttcaagttaaaatggaatatgatgacttgtgtccacaggagcagtggcttttaaaggcagccaggaaggggctgagaatctttgcacatctgattgcatctctgccatctcccatgagctgagcacatctggccctggtctgttgaggctgtgtttgagggtgatgctgatgatagctccgggaagccaggaggggccttggcttatctggggaaaatagccttatctggggacctgcttcttttgcctgcagcagaggcctctgccatgtactgtcgcatggttggtactaaacctttgagaagacaaagaagaggcaggatatccttctccagagaaaaaagctcttgtccccctaatatactgctttgccacctgagtctctgtgactggatgaggccacagtgatagcacataacctgcttcaacaggacagctgtgtgtatttcatcttgaactcttcagatagatttaacagaagcttttggaggaattgggattgtgtttgagaaacgatgtagtaagggtgtgtttgggctctgggcaggaagtcagaaggtgttggggggaaagagtgacatctgtgggtagctcagttgtcctgactgcctcagcactgaagacagttccaccacccagctcatgggacaactatccccgcagtgccatcctggaggcaggtgcctggggactcgctggaggcaggtaatataatagtcccagcaatcaccttctcatgaaaccagcctgttagggtcaagcaacctgacaaataccattgagctcctggcccgagggctggggatgcagccaggaataaaacaggccctgatggacccacaatgtcggggcggagctagacgctaagccagtgactccgagtttgactgtgaattccctgaaggaggaacagaaggttctgggtaatgtagacctggggcgctgaccaagcctgggcctgggggtccctgaggaagcacatttcccctgagacttgaaggagttgaccaggggcaatggtgtgtctggggacagtctcagggagaagcaccagcagacactaacaaaggccctgcgtggggcctccgatgcagagacagatggctgtggctgcagggctatggccgaggtgggagcagggaaaggagctgtgagccaggaaagacccggccccgcccgcctggccactgtaaggagtgtgggtttctcctcagaaccaggactctttgaggtttctggagaggttttttttttttttttttttttcgagacggagtcttgctctgtcgcccaggccggagtgcagtggcgcaatctcggctcactgcaagctccgcctcccgggttcgcgccattctcctgcctcagcctcctgagtagctgggactacaggcgcccgccaccgcgcccggctaattttttgtatttttagtagagacggggtttcaccgtgttagccaggatggtctccatctcctgacctcgtgatccgcccgcctcggccttccaaagtgctgggattacaggcgtgagccaccgcgcccggcctgtttttttgtttgttttttggtttttttttttgagatggagtctcgctgtcgcccaggctggagtgcagtggcgcgatctcggctcactgcaggctccgccccccggggttcgcgctattctcctgcctcagcctcttgagtagctgggactacaggtgcccgccacctcgcccggctaattttttttttttgtatttttagtagagacggggtttcaccgtgttagccaggatggtctccatctcctgacctcgtgatccgcccgcctcggcctcccaaagtgctgggatgacaggcgtgagccaccgcgcccggcctctggagagttttaataagtgtcttccaaggcatctctagctgctgtggggaatggattagaaaaggcggctgagcagatcccggaagatgaggtcggcagctgttgcaactggacccctcttcattaagctgtccacattcataaggcacactccaggtctgcaggagggagcatgagggattcaggggacgcccttgtcccctgtacacacctaggggccggttcgactacagtaggtaggtcagggttatgggagactctgttcagcctgtgtgccttcccatccccaaagtccttaggagccttctcttgtagtcaggcccgccattttatttattcagggcctggagaacgagtaggggccaaaccggggtgagagggctgaccctggagtcaccgttttgggggcttaggatagcccttgttcagaagcgggctgtgtgcagttgggttacctttcagtgctcaggaaatagagggctgtggctggctggcttcctgtatccctaggatgatataccagagctcatgtctgtagaagtttgtagcctcctaggaagagatctgtggcagatcatgtaataagtgtgatttcacgtaagcatcgctgccatgctgggctcttggacctctgtgggaccttggggagatgcttgcaggagaggcctcaaaggcctggctggtgagatgggagggtctgagagccgaggcccacgtaggccagtctgggcggtggacacattctggcttgcggtttccccatgctctcttgaaccagggaagtctgtcatcccttgtgtttctcaccccacacggacactaaggcatcaaggctccagctgaaatgcattttaaaccctgaatccagatccctcgtcttcccaccatatacagaaccacatgctaagcttagcagcagggggagaaaatcactttttatgaacgtcactgtcagccctggattgttttcttctttctctccaatttctcagcactcctgagaatgctgattttcctggtaggaagggcaggactgatgtgggatattgcccagactgtaacaagaatctcagaaacgcatcatctttcccatcatattcctttccttttccctcacctcctgtcaaagtggtttgatccaactgagtttgatccaatgggagaggggcttgtacctcaccactcaggtagccctgctctgctgagaggtgacacctgatgaatgtgcctgagccagagactgtgcccagcaggtggcacgcccccagtgaatatttgtccagtgactgcagcctcgcttcccttcaccagcaggtctggatgtatggaatgagagtctgtggcttgggcgggctcccattctcacacctttatgtaactgattagttcatccagaaagaatttttaacacctcctagggtgcaagcagggtgcaaaggaaagggcctttctgaggggagaaaagatacacccacaaaaactctgatcccaaaacagactgtgataaggctggaaggagaacctggccaaggatcagggcatcaaaggaagagtttgtagagtgagcagcattagaaatggctgattgtaggagtagaagtgatcaaaatctggcttccctacatttctataatgtgttatcgttaattgtgatttttgttatagacagtggcttgttgaatcatctcaagaactctgtgaaataggcaagacttttttttaatttttcaagttagaaggtaataggggagagagtatgccagaaggagagaaatcccaagactggcgagagcaggtgtctgaaaggcattagattgttgggattaagagcaactgctgcggaatccaatggaggagagagtttgtatctggacttcacttaaaaaattacctttgcttgactaacacaagaacagaaaaccagacaccacatgttctcactcataagtgggagttgaacaatgagaacacacggacacaaggagaggaacatcacacactggggcctgttggcaggtggggagaaaggggagggagagcgttaggacaaatacctaatgcatgtgaggcttaaaatgtagatgatgggttgataggtgcagcaaaccaccatggcatatgtatacccgtgtaacaaacctgcacattctgcacatgtatccctgaacttaaagtaacatttaaaaaaattatctttgcttttttttaaaaaaattatttttattgatacataatagacatacatattttggggtacatgtgataatctaatacattcgtataatgtgtaaagatcaaatcagggttattgggatagccatcaccttaaatatttatcttttctttattctaggaacatttgaattactttcttctcgctatttggaaatgtacaatagattaatgtgaactatagtcaccctactgatctattgaacattaggtcttatttcttccatctaactgtatatccatacccaataatcaacctcttttagccgtgtgaggtttgagaaggtcgctcaacctcttggtgcctttcatttataaacaagaatgataaaacctgttcgttagggtggttatgggattgaaatgagattaggggggtaaatgcagagactgacacacagtaaaagctcaaacagtgcaactctttattcttttaagtggattattggggtctgagtcatgcggtaggagacagagctggaaagacacacatgggttcccatgtgtagcagctggtagacaaaaaggtgtcttagtttgggaatccctagaagcagatcctgagagaaatattcaagggcaagtgatttatgtgggaagtaatctcaggacttctaggtaggggaatggggaactgagatgggaagtcaggaagagtgtgtaccgagctagcaatcactgtgggaaactggatctgggatatttgtccgccatcattgctaggagggctgctcctggggtattaagccctgcagacacttggcccactccagagaaagctctcaggaagagagaagcaggtgctggccactgggagccagctagcatcaaaaagtgggaaggtctgagggacatcagtgggacacacagagtgtttgcttggcaagatttgcagtgtctcatccagcccctgcccaaccagattctcctgctggccagtggcattttacttcctagggaatcagcaatgctagttttccttctttatcttctggtctttggtcttgttagttctgggatctcacgtttgtgggaaacaagactcatgggtcacactcagcctttggacacacaggtgtggatgctctccttggcaacatccttctctccaggacagcactctgtgcagctgcacaggtcatggtgaggagatgggcttgaatggaaacttgcaggcagcctctgaggaatcctaggacaggaacaggtctggggcccaactggccacaccctgaagatggacatgaatgggtcgcttagtcaaaagggcatctgtatctccataactcccccaaatgactgtctggagcacacagctgagcacgggacagctttcagaaacactgactcactttttgggttctttgaggtttctgctttagagaatggggcattctgcctgttgctgccaactatgacttcacactgcacagagcagctggctgggagaggagccctgtctcccaaatgtggagatgaatgattgaagggaaaggccaggagagaaagtcagtgaagtgggggagatgtcgaacggaagtgaagttgaaagagcctgagcaaggctgctgagatacaggctggtggagaaaaaagcccctcgtgcctccccgcttaggattggattagctaggagaagacctggaaggcaagaaacgaagaccaggaggaaggctcctgcaggttttggccagcagtagtcagctggagaatggctattaacagctgtttgggggtcctaatctgtggaaccctgaccttcttcagaggaaaatagatcttcacatttaggccttgatgtagtcttttttttttaggaatccagacctgttggaagggcaccatctatgacaaagaaatgagggaggaaatagaagagagagtgacttggaacatcattcaaatgtattttataaagttgttatcagtaagaagagctctgtatgccctatgcaagcatttattccaggggtgtgaaaagaaccccttatgagcagacccagtggacaggggctccttggcaaacaggcagtttccattaagaaaaagcccaacatcatggtggcctggccctgtgttctgaagtattcggaccccaagacatctgcaggcagggctagcacctcacagttttaagtacagggaacagcagagactcaaccttctctgctgggaggaatggcctttgtgtccagatggcgtgaattgggagtgttttcctcagggatcatttgcaccttaacctctctgcactcctgtagcatgtacgaggtgtgcaggaggagagggtttgttgtcacacaggttccttgagagtctgagctgaagactactgtgaagtttattaccattatagaattcagatgcaagtcctgtgctggcctaggttttgaattcttgaattgcacatgatatggtggcttcacacacccttagaaccgagggacaacacccatgagacccgtgggtggtaggtgtctgcacacttgtaaatgcagcttttagtcattttgaattaccaatggcatgctggtgaggaaaaggaataaaactatcaataggtgggctcaggtcaaagggaaactaaccagctgctgggctggtccccagagtctagccagcactcccattccaacatatcatggtgggtaagatatcagggcttgaatctgattgggactggtctggctgaccgtggtgcctaatgtggtggatctgggaagcactcctgttgttaaccgaaaattaataatgcggcgtagacagggatctacatggtttgagattggtccatgagccattagcaagatgctgatgagaaagtgtgagcaggacttgagtccctctgccaggaaaaggaaagatgatggtgtgctcgctgcattgttagagcctagctgagcagctgggatttgggcagagctcttgtcccagattttcagcatctcattgaagtggcaatcagagcctgtgatagagaccctgtcatattgctaaggcgcttccagtaggcttggagggagggctgcagcttggtggttgtattagtctgttctcccactgctataaagaactgcctgagactgggtaatttataaaggaaagaggtttaattgacccacagttccacatggctggggaggcttcaggaaacttacagtcatggcagaaggggaagcaaaaacatccttcttcacatggtggcaggaaggagaagtgctgagcaaagagggaagagccccttataaaaccatcagatcttgtgagaactcacccattatcacgagaacagcatgaaggtaattgccccatgattcaattacctcccacagggtcccttccatgacacgtggggattatgggaactacaactcaagatgagatttgggtgggggcacagccaaaccatatcagtggtgcaggaggggaaatctctccaggaacaccagatgccaggcagagggagctggcacatagtaggtgcttataaataaatgaagtggagttccaggccatacctgctgttgggattaggcctggataaatcagcctgacctaggcttgggagaagttgaacccactgagtaaagatgctctaggttggcggccagtccgggcaggtgggaactgatgagtggcttctggccattgagtccttctttgtggtgaatgcagggggacatgagtgagctctgtaaccagaggctcagagcctgggctcaatcatgctcccaatttattcacggtcacccactatctggactgccatgggctgtgcctcttccttgtgcatagtgtgagaagagagctgattggggttggacgtgagaatcctggtgtgttctggctctgactcccctgactcccacctgtaggtttttccttctctttactcagtgggcaccagcaccacttcctttcttggaagtggtggcccaggctgtcctgctgaactccatttcaggagccagctgtgaggttctacattcccaagcccctgggatctttgagtaaactctgctgctactggcctagagaggaggaatgcttgcaggggtgagggccaaagactgggtctccccagacactttccccggtgctggagttaagggcacagacaccactttgaccttgaggtttccactttgtgcagcgcagaaggtcagtcccaggagatgtgctccaccagtctccctagaagaggggcggttagagtctttgttgcattcccctgtcctgccccactatgggactcctgggatggtgccttgggcctcccttcactaatttggacaattcctttcaggatattaaatgttcttgcccaagggtgaagctgacagctctgggaaggagaactcctgctgcatccatgcaacatttactagggctttttaggagccaggagccccatttggcaccagggatgcagagataaaagacatagtccctgccccaaggatcatggagtcttgtggaggagataggcttgtcaaagagtaccggacgacatgatgagtgtcctgggagaggtgcaggctctgtttggagtggactctcaccagctcacatcagttaaagcctggaagttgtgaaagtagtgaactacttccataataaagggtaaatatttgctccctgagccccccaagtgatgatgcccaatattccagtctaccagccattccagcctgatacctccttctccccaccccaccctgtccctggatccaggaactaaggatcagtgcctggcttaggatgtgatgtccatttggtcctgagtttgtgctctatgaagtgttacttgtctcaaatatcagccctagttccatgatggacagcacagcagagaaatttgtgactgagaaacagggggccaaggaaggctttccaaaggcgaggacatcctggctgagttgtgcaggatgagactctgaggagtgtgtgtcagtcagcatctctcctcagctctctgttttgtgcttcttgggcccttggcattggacctcagccctgtcccaggctacttagacagctctttcccactgcaggttggagcccacctggtcccagcttcaaggagaagcttctgggaatttctgcaaggtctgaatgcttactgagcgcagaactgagcatggggcacgaggagggtgaacaaaataaatagaatgcagcagactttgttgtcaaggaatttatgctctcacaagggaagccaggcagataatgcctagacacacaggtgacaggattacatacatacatcagcagccacctagaaaaatttctcaggaattagagggtgaggctgggatcactgagtgactgtgactgggtggcgatggtttgttaaaagcttaggggagaggaagatgtggcactttggaaccccaggaggagacattcagctccactgacattctgagtacccagaggtgggcagggagaggcaccatggctcagaggacactggagggaaccatatctgggcagccagggctttgtttggctgacttgtaaagtgcaggctgggttatgagaggaggaggaagcagtgggtaaggatgggaagggggtggctgggaagagtctcacactacacgtctgtcacagcctcagccactgaagctacaagtagggttaccctccctgccatggtggccccagtcctgacctcaattcctgcccaacccgaggattgcttttctttttgaagaggaaaataaacattctttgagccctagcatatttcagggaatgtgctagggctttttacaaacactattttagttcattgttatgatgcctccatgagttcagcatcattatctctattttacagataaggaaactgaggccatgggagatcacctagcttgtcagtgacagactggaaagtgaagctcagtgctgaccccaaagctgttattttttttcattataacaaaccgcttccaaaaatagtacagggaagaaccagaggggagacggcatgatgatgcctggcaggtggatttctctgtagaagtaagcacacctccctggagtagcttgatgttttattttctttgagaaaaagatgaggacacatggggacaggaagaatgagagtcacaaaagccatttacacaggtcccattagcaaccccctttcctctcagcttccagctggattcaagcctcaggaaagcatctcagtagtgcaatggtttggacacgggaaacagagaaaaagttgcttctgtcctcaaagggtctgtagctctgtttatagtcccttctcctcagtttcagatttcctgcaggcttaaggcttcctaatagaagtttggtttggtgtgaggcgtttgatagccattgggatgtcttgggcctgtaggggacatgatcgatgtcatctttgtaaaaaatggagcctagaacaagttagcactcaaagaatgaaagctgaaagggttgctaagaggtcctcctatccttctgggcatgaggctgtctaagatagaagctgtagaaataaaaagacaagggaagttacttgcaatatcaggaaggagggactgatgggacttgaatctgagaaagaaaagacctcacagagccttttgagtagatgtggtcaatggatgatactttcatggtccttccatgtactgtgcccagggcagacatcactaatcaatcacagaggtttttttttttttttttttttttttttttttttgtcctgctcaaccatagacctcttctaatcacagcactctgtgttagctcttgccaacccactagtattgtacataagttaaaattgactgaccatctctgctgccatgtttcaagtcaggagtactcattgaaggtagtttgggaaagttcaggtgggaagagtgagccattctgtccatatttgctctttagagttcaggggaatgcatattgtgataacaagaacttcaggacaggagacaggttaggcatcaagggtagagctgtagaactagaatcaatctctaattaggcagtaattgaagtcatgtgaatggagagatgccttcccagagggtgagtatatgaggaagagaacagatggtttattgctggaggaaaggaattgggtggcaatgatgaagtaagggagagaaaagcgaacaagagagaaacctgcatttccttcacttgggtgaggaaggctactgctccagctccttaaatggagccctctggaaccttcagaaattccagagctggtttccttacagataacaagggtgaatatcatttcctccctttcaggccccagatgtaagtaggtgttcctctcagtgctcaggtcttacaggagctggccctggggcctgcctccctcctgcagcccctgctccacattcttctgcagcccccatcccagcccacccttccttcttcatcctgtgacttctctcttcttcactgtgcctcggtcgcatcccggcttgctgtgcacgaaagagagggccaggcatcacaaatgtgatcttgtctttctgatgcttaccttgactaatcacactgacaccctcaggttctgggataattattcctgcaaagtcaaggactccctttcctcctagtgacctgaacttaccctctaacaatgaaaatgccccaagctttggagcgacttttctgcattaactctgaggcagagttgcagtgagaaaatctacccttttaatgggcgaaaatattgccctcataagtctttatgcaatgcacttgagcttaatgctcactcaccaattcgcctttataacttccatattgagtgaattaagtcctccatgcgggtagttattaaagaagtgataagtgctttataattcagtaaagggtggcctggccatttcatattttcctaaggaaattggccacccaaagggcagcattctcagaacccctggggccagctgattttaggcacagagctcgcactattggattactttcaagccagctgctcaggcctggaccaaactccttctcactcaggcttttccccccaagaccccttggggagtaagggtcaaaatcaatgtctgtctccctgcccgaggctgtttttactcttgatcaaaggcctccattttctcccctggttcaaagctaagatgcctagtaaggatcagaggttttataatcaacatgatttgattctcatttgtagacaggaggagactttctccaaggggctacaagggttccacccctctgaccccaatcccatgggcacagcttgctcctttatgctttagactcttcaagtggttggaaaaagtgctgtcccaatcaagaccttggtaaccacagatttttcatgacttgttgagaggtcacagggttctgaggagggacagtcatttattaatttgtttatttaaaatttctactatgtaccgggaacttggatgagtgctgcagatacaatagtgaataagacaggttgcctgccttcagggagcctgcaatgcattaggagagagacacaataaacaagtgaacacataggtgacataatcagaggttttggtaagtgataataaatgagttatctagagcatcatttctcaaccttagcgctactgatattttggaatggataattctctgttgggggtgggggctgtcttgtgcattgtaggagattaataacatctctggcctcaccccgctagacaccagtggcaccgccccaatagtgacaatcaaaactgatgtcttcagacaacccaagcctggggggcacagtccgcccctgacttgagcatgagcactattgatctagaggaaggttcagagaatgaccctagctaggttggtcagggaaggcttctctggagaagtgacatttcaaaagaatcctgaagctgctgtcttggccgagggaaaaataaatgcgaaggtcctgagaggagaccagtgaggctgaagtcaagtgaataaagagagagggaggtttcagctgaggagggaatggcatatgttacatgaggaaggatcctgctggtcatggtggagtcagaattttcccccaagtccaagtgcaggagaagccactagaggttttttgtttgttttggtggagggcatgattaaatttatattccaactaattcattggggtttctgtgtggaggacagattttaattgggccgcagtggaaacagtagtcatgtttgggaggcaggggtctttatgaaaggtgatggtggcctggacgcaggtgataatagtggatgtggcaagaagtagatagagttgaagggtagaatcaatgacagggtttgtctgggacaactccatgataccagtgtcatttattgatatggagacagctcactgggaggaaagcaggggctggtattggatctgctaagatgtcagctaaacatctggagctcagggaaagttctgccagagatgcacatttgagtgctatcagcacaaggacggcgctcagagcagagcacttgggggagatcaccttggcacatgagagaggaagtgaatagaggagccccaggctccctgggagactccaacatttaaggatcaggcaaagaatacgacatcagcgaaggagcctaagaaagaatatccagagagtagaaagaaacccaggagagagtgtagtcaaggaagccagagaggaaagaatgtttcaaggaagaaagagtggttaacagggtaaaatgctacccagagattgaataatgggtgacagagaagagtcgattggatttgcaaacataaaaatcactggtgaccttgacagtgcagtttcagtagagtagtaggatcgaagacaaactaggatggagaatcaaagggaggcgaggaagaagggcctgcaggtgtagacgattcttttaaaccatttgccataaagaggcgtagacacatgagttggtagctggaggaggacatggagtcaaggaggttttttttctttttgtagatgagctttcctaaaacatgtttatatgttgatggaaaaacatagcagagagacagttgagggtagagaagaggaagaggaaaaatgaatatgttcctgagaaggtgggaaaggttgaggccgggtagaaagtccacatgggaagctgatagctaaatggttaaggtctgacattgatccctttggggattcgttcatttattcgcctagtggtcactatttgcataacactggaaccacagcctcctggccttgcccttagaaaactcatgctttggtgaaggccatagtcatgtagggacaggaaaggtggaaaagatgtgcctgggtgccaaggacatttctgcttcctcttcgtttggtgtgtagggccctcctacttccccactgctgaccctgacagtggacatcaagctgagacctgggcctgggagggagctctggatatggggcccttgagacctctgagatcaccttccccttgctgctgtgccctgcagttatgcctccagcatgcctgtccctgggtgggatgttcagtggtgtgctcggggccacagctctccccagagatcaagttcagggtgcctgtagggtcagaccagggccctgggctgctcagggggccagggtgagggccgtgcaggtactgagggtggagatcctctggcagtgaggtggggcagctgggtggctacatagtaccgccctggatggctttccaggtgtatacttactcaggggtagtgccccaatttaagattctgggggtgagtaaatggtgagtaagacagatatgatctctgttctcatgcattatggttctaatgtagagacactgatgacaaacacataatcaaataatctaataagacaattacagatggttattaagggctgtgaaggacataaacaggcgtttgtgccagagagcaactggaggggaaatgcaggggctgctaacacagtggggtcagggcaggcttctccgagaaggtgatttttgagtggagatctgagggattgaaagaagccagggatgagtgtttcacgtaggaggtccagttgggaataagcttggcatatttaaagaccagaagcaggacagtgtgactggagcccacaaaacaaggggagtgtgttcagagaaggagccctagaggcatctggtggccagcttgtgcaggaccttgagggtggcttccagtgatgtctggacatcactggattttattgtcatagccaaaggaagccattggagggttttaggcaggagagagtggttgcaataatgtagattgttgaagagggaaagcagggaggccaggtaggaggggatgcttgttctccgggttagaataggtggtggttaccgggagcattgatgtgtaggcaagctggggttgccatcctgtgccagcccaggcagcagcagtaaaaatagaagcagataggctggggaggggtaggataggaggccacaggctggggttcagccacaatggcctggactccccagtgaactggctggctcccaggtgaaatctcgctcctgggagttagcccttttcttagtggggtagcagtgaagatgtgcccttgatcttttcctgttaggagacacagcatctttgcacctgcagaacacaggtgtgtgcacaaacgttcttcattcctggcacaatactttggaattgatcaggaagccagcacagatgctgtcgtcttccatctgtttgctgcatgatctgaatgttcctttctgtggtcccaggggtggccccagatgcggggctggttcaccgtggtccttggcgcacagctgcttgtaggcttgtgtgctaacgtgctggcatgctggggtcaccggcacaagccgtcccaacccctggctgcctggggctctcaggtctggctccccaggcatctagcacactgtcccccacaacagctgtcaagggagggagagccaggtgacttggctagcgtgatcccatgcgctccttcccagcccccttgatgccttagcaccatggagctgttgctccagacggtttgtttatgatgctaaacatatcagataattgaaagctaatgttgctgtctggatcactagacataatacgcctggataacaaatcaatttcctcattgccctacaaggcttcggagtcaaaagcgcggcacattgtgcgtgtgtgtgcacacgtgcattcatgcgtgtgtgtgctccaatgctgacttgttaggaaatggaattccagactagcttctgcaggcactagctggagagaagggacacctgtatgcaatcttgtttttgaagcttttgaattttgtgttggaggagtagagtactcacatataaaaaacatccggaggcctaggcaggctgattgcttgaggccaggatttcgcaaccagcctggccaacatggtataaccctgtctctactaaaaatacaaaaatcagccaggcgtggtgacacatgcctatagtcccagctactcggtaggctgaggcacgagaattgcttgaacctgggaggcagagtttgcagtgagctgagatcactgcactccagcctgggtgacagtgaggctctgtgttaagacacacacacacacacacacacacacacacacacacacacacacgggaaacatcagcttcagctgcctcctgccagtattctgaacataatgatagtgtcgtacgcttaggtaccgccatgtaaatgtgaattgtgactgcacctccaggaaagcttcacttaactggcaacttcagttatccaaaagggggagcaaaacaaagtcatatgaaaacaagggcaaatatctgcctatctgtatgcatgtgcatgtatgtgtgtgtgaatgttttcatattcccttagatcctatttacgcttactttacatgcatttctaacaatacaaatggaatcagctatttattccactagtgccatgcatccacagtgaattgaggacttaggcattaccttctctaaccctcaccacaactagttttgctatggaaaatctgatggctggagaagctctagtaactggcctgaaggcatctggcttccggtgctagcgtgtcatctccaggtcagcctaattccaggtgccagctcttacctattgggctccaagaggctgcagaggatactgggcacagcacatttgggagggaggaggggccctggggacagcttaagaggtgatggcctgcagcctaatatcaaaaaaagagccagaaaatagttaaaatggatgcgataaccgttggaataggaagtcatatcagggtagggccatttgtagtagggctacaaattctgcatccatcaagagcttctgagggttttgctgtgctacagcctggcaggctcattaggctggtcgtattgatgtaaggtcatcaagaaaatgtaaatcatgatctgtctactctgtttaaaaaggcaaggatgtgtgtaatgcattttaggtggaaaaaagaaacatccagcagggaagttgaaaatgcaaagggttttgcatttaaatttagttgtctggaaaatttggttatgaagaagagctcattaatagcagtgagaagtcacagtgaagataacagcaatctgacagccagagaggagcgggaaaagcttagaaaaatgaggcaatactgggcctgctacctgtcgagaaaggaaggatgttcctaagtcccaccgaccgagttcctgtcttgccaagtgcccagggaagttctgccaggtaaagggtgccttgtccctgttgacttcctcaatcaccttagtcctctggggttagatggtggtgggcgtctttgtgttctacaattttctgcataggagaggagtaaacatgaaacattaaatattgaaggtagaaacaactcttaaacatatccacatgacatatttttaattaaaatatggaccacacattctgtaccatccaattttggaatgcttggagattgccaattcgtttatcatactggcccaagcaaaacagaaggaagaagagaaaactggggtacaaaagtaccatctggttggcaatggtggctcacgcctgtaatcccagcactttgggaggccgaggcaggtggatcacctgaggtaaggagtttgagaccagcctggccaacatggtgaaaacctgtctctactaaaaatacaaaattagctgggtgtggtggcacatgtctgtaatcccagctactcgggaggctaaggcaggagaattgcttgaacctgggaggcagaggttgcagtgagccattgcaccccactgcagaggttgcagtgagccattgcactccagcctgggtggcaagagtgaaactccatctcaaaaaaaaagaaaaaaaaaaaaggaattgcaatctaatttattctagcacaaagaatgtttgtagtccccatgaatgtatcaattaatatttaatttatgccatgtcccattataaaaatggctatgaagcagctatctgtggtcctaggtctctgggacctggtgttgctgttatgagtcactaagagtgggtatgtttcagactgattttttagaattgccaaagagactctgcatggccattccctgactccatttcccttctaagcccacctggcagcatcatgagatcttgatcccaggggtctaccttgacatcactgaggtttttgagttcctgccctaagcccgactctgactctggaggtcaatgtcatcatgtattatgccccactgtctccctccgtctggaaaagtggtgcccaactagctcttggcagagtagtggctctgtggaatggaagggcagtggtgagagggtaggagcagggcattgagctgattttctgaatggagcatttcacatttctatggaatgaagaggcatgagaaatccaggagaggaactttcagtggagagaaaaggctcttggccagtgggttccagccagagatggtgagaagagaccactgttgcatctggaatgtgtagcctggcttgggccacggtccagcaggccaacacacccctcatttcctctcaagaaatgcctgtgacttgagagggtcctgggagctgtggcttgcccattttttcctctcacctggactcagtgacctagaggtagacttttttgtattggcctgaagcctggtagtgtttgctgcaaagcagtcattttcaaaattgatgttgttttaagccatgagactcttgctttaatagccctcttaggcagaagctttatataataaagcaggatttctcaatcctggtgctgtggacatttggggctgatgattcttagcggtgggggctgtcctgtgcattgcaggatgtttagcaacatctctaatctctacccactgtaggccattgttactctctttccccagctgtgacaatcaaaaatgtgtccagatattgtcaaatgtctgctggggggcaaaatcgcctccctttgagaaccaatgtattatgagactaaagtggaggtaatttatttaaagtaggagtgggcacctgatgtgccacccctttgccctctttctcctccctccactctctgtttctgattgaaccaggacacccagattgagagcagagctgcaggttcctgtgggggccatcaccatgcactctgcagaattgcacagtcccttgggcattgctataaattcttttcctccacagcgggagtgggtttgtaagatgtccgggcagggatgagctggtccagcctgtggtcctggaacagggaaaccagtcaccgcccccacagggtttaggtgcctggcctgcctctagaagttaataggtattgattttttcttttttttttttttgagacagtgtctcattgtgttgtccacactggagtgcagtggtgtgatctcggctcactgcagcctcggcctcccagattcaagcgattctcctgcctcagcctcctgagtagttgggattacaggcgcccaccaccatacctggctaatttttgtatttttagtagagacagggtttccccatgttggccaggctggtctcgaactcctgaccatgaatgatccacccgcctcagcctcgcaaagtctgttttgcaggcagtattgattgattttcaaatgacaaaacaaatgctcaatgaaaacaacctgtacagcccagaaaatcacaaaaaaggagaagccacgtgtaatcgttctgggttgagatactcaccattgacaaaggcaaaccaaacctgctcttttactatatatatataatattttctagagcctgcctttttcactgaaagtggtggtctccctagtagcacacacacaccagccggcagagtcacaacactgacctcctggttgggtaccaagtggtgagtcataggagaacttggcaggtgcccagctgatgccatccggaaatgtcagggcctcatcttcatcctcttgctcttcctcggaacctgctctgatgtggcatctatgcactccttgaacctgtgtataaactcctgctggaacagttttcctggaggccatgaatgacaggtttccttcccctccacactctgccacatggggtttttatcaatgattgctgagacatgacaacttccagcagaagcctgataccatttttagcttgaaaactgagaacaagactgctcagtttccgtaaggcacaggaggaaaataatcagcacagccagctctgcctgagaacttacatgtgccccacactgcaaaggggttttcttttttatcatagtcttttgatcttcacatcattcttacgaggcagttattttattatccccatttaatagatgagaaaactgaggcacagacagagaagtaacctggacagggtcatatagataggggtactggtggggccaggatatgcattttgaccatcagctcctagggcaggagtcgacaactgttttctgtaaagggccagagagtaaatatttcaggttttgcaggccatatggcctctgtagcaactattcagctctgttattgtagcttgaagagagctatagatgacagtaaatgaacaggtatgaacatggaaatttgaatttcatgtagttttcatgtgttacaaaatataattcttcttttgatttttaaaaatgtaaatgctatttttagctctggggctgcaggaaagcaggcagcgggctgtagcttgacgaccactgccttagagccctgactcctacccacactgttgcactgtggctacaaaaatgccattccctgatttaggaaaactcagacctactcaacggaggaggtggggactattattctacttaccggaggactctttgcagcaaggagttcattcatttctctgccatatctcagtgcttgcctaagtcagggaagggtccgtttgtgggcataaggacatgagggctgagaagggtaaggcttgagaacatggtaatgattgacaactcaaccgtaacaacacatttatggaattctaatgtgggctgtgaaaaatgatttcactgatttaaacaattggataaaagttgcttgttgggagcagatccttgtaggaagctggagtcctgtgaatgagaagtattctgtacaatcatggtgatctacttggtaatttacaaaacccggggaatacactgggggacctggtggcacagatagttctactcctctggcgctttcttttcatctgaaatgttgccaggttctctgccatggtgagaccagaccacccaaactgccctggggctgtaaggcttccagggagaactttggcattggaatccaacaccaacctggccacctggtccatgtccccagcagatgccagtgtctctggctgctcagcagggactttgggagaatgtggtacaaaacaggttctcagcataccttgtcaccgtgtggctctgaaatgcttccagaggccctggcagtcatagtcctgctgccttgctggctctgactcgagttggtggcagatggcagagctacgggtgtggtggtgctggggaggagatgtctggggaaggtggctgtcacttttctggacagagtgtgcctgggttagttctgtcccaggatgagctgtcacctctctgcactcttcactaagattgaagtacttagaattcatggccactgatcagagtaaaatcctgggaggatggggtgggcagtggaaggccttttcccgagatcctttggtgcctcttgggatcacaggtgtgtatgaatgggcacattcatacacctttagagctgcaaagggctttgataattaatagtgtaatggttctcaacctggggatcccaaaagcagtaatgaggggtgtttgtttctggcatttggtcaatacaaaaacaataaacccagaaatcagatccatacccatgacaagccttctcatgctgacagaatgttgagtttctttgctttgggctggaatttatgcagtggatgagttagcacgggtttgtgtctgttgataaaaagctctggttaatagtgatttatattgctgattaataaatccaagaagatgaattaattagtagttaatagatgtagtgtgcttgctagatataaacctccttaaacatgggatctcttggggcaaagttctaaaaggagaccttcatgatgaaaaggggagaaactgctgatccagtgcaactctcctcttttacaaatgaagacatgagagactcagagaggtggaagcactggctcaaagtcactgggtcctgaagtctcagatgaagctagggtttgtgtcctccactgccaggttcccattctttccatgacactctagtggctccaggatccttaggtggcccccactctctggagtcagctccaccaaatcaagccattggttttttgagctccaggagggattgggctgtgggtcacccaaagggggcttccagagtctagaccctggtgatgctggaagtaggagtgtgtccctccttggctatgcccactggccagccggccaccccgtccttttttaaagccatgtcatttgtattgtctttatgggcaataactaagggaaaaaaaaggccagtccttaggaaattctgaataggaaaaagaaagaaggggaacagaggaaaactgagttaggaagacaagcagggagattgaacttcacgtctttagcatctttttctagctgatggggagacattcaatgcaatccatgggccaggaacttggatccaatgaatccagttaattcttgcaacaacccaatcaggcagacggtgtgaaccccaccacgcagaggaagaaactgaggctcagatttatttggtgacttggcaaaaggcctggcaatcaattagctcatcggggatcaaagccaggtctctgtggctccaaagccagccccatttctgttgcttctggctgaccgttacctttcctcctcccctgcagacacatagagaactggcgcagtcttcacacgctcaacgccgtggacatggagctctacaccggacttcaaaagctgtgagtacacccggccacagagaggcctttccctgtggaaggggtggatgccacctggtctgccttctggggtggcgtgaggggcacagcaagactgccatccgtgctttctcccccaggtcttcttttggtagagttggcaatatgcacttaggggacaccagaggcttcaaaggccatctcttcacacccctttgtctcaccctagtctagagaggcaagggggttgtgtgaattcccatcttgaaggtagggtttcaaggcaggcctagaacccaggcatgctgggtgagtgtcctttccctacccttatgcttgactgatgagccccatggagtatgagatttcccagctacctccacccttggatgtcggtactagtgactgtggggacctggagtggggagagggacaaggaacaaagagggctgcagccctgccattactggaccagcagaagccctggtccttacctactggccaggatgggtggagggcagctgccagtatgacccctgacctcccagcctcacggggccctggggcgtgtgagcccaggtgcctccactgagcaaccccagcaggccacctgtgataactggcaatgaagaggtgtagataatccacagggcggctgcagggccagccttagcctcaccccctgccagcctcagcccagagcagatatccctctgccacttgagctctgctgatcctctttttctctctgtctaggaccatcaagaactcaggacttcggagcattcagcccagagcctttgccaagaacccccatttgcgttatatgtgagtagagctgggctgcagggattgggggcacatggcaggtactcttggggcagtgaaaccggagacctgaggtctagacctggctttttgcctccaggggctcttgggcaaggttttgaactttattgggcttccaattttgcctcttaaaaggattattttgggtttgatgatctctaagtttcctgtcagaaggaaaaatctaggaccaggggctgagagggagagtcagtctcctgacacccaagtgtgttcactttcatgatgaaacttgcaattttatgggaacgtaaatgatagggaattccactcatatgtaatgtgaatactatacttctgagaccataagtaggcccataagagtgtgtatgtgtgttaggactggcggggggcgggggggggttgcaagaagaaagaaagtatggctaatagccagtgttatgtctaaatagatctgggttcagtggggaaaagctcagagaagtggaaacacctgtgtaatgtcacacagctttgtttgggacaagctagaggtcaggtggttatgggtgggggttcctgtctgtgcctccttcatcctgtctctcccctttccctagtggggatagaatcacaagagttgatgcttcctctctaagccgagttctgggctgataaactttgggatttaatgaggactgccatttcctggggagaaagtgggcatgaaaggaagcctggggtgagtgattaggggaagtgccaacctgctgcacctgtagaggggtatttgttgtctgggtcaactccaaggatagtggccatctcggacaccctttgggcatgttcccaaagagcagaggctctgcaggaaccaggtggggaggggtctattgcctttggggagaaagtggagaagtggtgtgctatgggctagtctttcctgtggccacttaaaagtttcactgactgagcactttgcatttggtaacggagggcagctgggctggagagaaattgcatgcaccggggcagaacatccaggggagctgtgggaagtggagggtagggaaggtggggaaagggaagagatcacagtgaatcctggtggaggagttgttttttcttttttgggggatcctgaccttacccccaggctctttgtgttttcccaagcacatagtgagtgcttgataaatatttgtttatcagtatggccacctctgctttctgcggagctttcttttctctctctggaaagaacaggctctgtggtcactgttcagggccaggtgtatcagccccaggggactgagacctccctttcagctgcctaattaactgttgccccttgccccagggtagcctctgtggtgagagtctcctgatgtgtgttctttgcagctggaggcatagctgggaccagaggagggtcttggaccagatgttccaggtgtttattttattgggggtttgagtttcactgtaaaacatcctaagggaaaaagcttttgacatctgagaagtctccgttttcatagtaattcatacaagggtcacaaagccaaatgcccatggtggaccaggtggggtcacgtgtcccctccaaagaggcaaccagtcatcagttccagctgagtgatgccacgtggaggtggggcctggtgtggtcagacttgtttccagaagacttggagattccgtgaaacaactcaagttttaaatgctgccgactaaaaacaagacctttcaactccatgggccaaatgaaactacttctatgagcagaatgtggcacacagagtgccagcttgtggtgcgaggtcgtatttgggggagggatgctgttgatgcgagacaaaccctgttctctttgaggacaggggctgggtgctcaggcctcagaaccttctagggcacggtgtccctgcagctcttagggagatggagaggcttcaggacccaggctcaggagtgggagcagggttacatcttgggctgcaggtggctctgaagtgggttgtaccagagcatgtctttggcttgcccttgaggatcctggaagagggctgtgacccactgtctcttttggaatgatatggggtctgctgagtggtggcagcgatagaggctggtggaggtttgcaagattcccaaggctttgtgggtaggaggacctagttggaggaggacccaaggataccattgaacctgcccatgactttgggccctgttttctcctggacacattggccagctcttgccaaagtacttgttattggctacagggtgattaccgagaaggatggatgaccattagtttacccccaatttgagtctgtctgtgcattaggggcaagtcagggtgctcaacctagttcaagaaagtcagcacccagtcaagtggctctcataggcacagtgggatgcccagaggagcctgggggtcgcagagagacgagtcaataggatgaggcagaagcactggctttatccacgggttttatttattaacttttcttatttatgaagacacacaccaaattcccaattgagtaaatttcccggcagctttgggacattttctcctggcaaatgggccaggtttctttgctgtctcacaacatcttctatttctgtcctctaaatgcatttacaagtcttctggccccagctgagcaatcacaagatgatcacttactccaacactaattgccgagccctggcttggtggctttttttttttttttttttagggtaatggctgagaagtcttttcttctttcctctgtataaaataagaagtaggaagtgatatcattgcccctagtactgatgtcagattggtcaagttgttctgattggttgaactgtctcccacccctaagctactgttgcgttaatcagtgtaattcttcctcatgccagaaaatgaattgacaaagttttggccaagttgtctgctgtacagtaggctggagattaggactcttgggccttacgtcatggtttatgagtgactgaccatctcctcttgactgctttagttttctctaccttttgtagattgcggaaaatgagatatggatgaatacatatcaagggaaacccttttttgagagatgggaatattttccacccttgtatcccttctctgatcctaagaattctggattaaggatttttaaggataaggatttctgagattgataattgcaatagctgtatgccaatctgaaaagtgggcataataatagtggctattctagggatgggatgtggtcaagattaaacgataagaggcacatacagctctcagcccagtgaccaggaaatagtgagcgttcagagagaacagttgctagtaatgatagtaattattgttattattcctggtggtgatgatagaatcaaagagaaggggttaggtgaccttgatgggtattctgaccacttctttgtcctgaaaaagctgaatttctgtctcacagtggagcccacctctctggtgactggaatactcatattctccagcgtctttcttcattgtacactgatgaataaattcggataagttctctattctcctcttttatccccttgctctagactgtatgtaggcctctctgtagatgctgtcagtttcagaaaggagttaaggaactgaaactgatgagctgacaactttctttatttccacctgagttgagatctcctccaccagcattattgaacttgggttgttctcagagtcctctgagcccagcttctgcagctggcccctctttccctttatggggtgtgttttctctggcatggctcacacagactggatcgccacagtctgggatccccatacatgaagaatgtagacgtctgtctgagctgcactcaaacaatggtacttcctttcacctgtagagctcttcgtggttttcaaagtgcttttccatacattatctcattgaattctcataaccatccttggggcaggggtatggtaggtggctttgttttacagcacggaagataggcccagagaggctctgacttttaagtagcagaagtagaactgtacctaaatcctctgattctctttccaggaatctttccactatagctcatgggccagaagaggcaatgttttttcacagaagcaatttaaaaagttactatgttttgctagtcattactatgtttagaaaaccacataaaactgctggtatcagaaaagaagagggaaaggctaatctggttgagaacttcctgtgtgccaagaactgtgcctggtgcatttgcaaatatgaactcacttactccccacagtaactctaagttaggagtcctctcttcccatttcatagatgcaaacattgaagctcagaagttataactgagttctcctaaggttatacagtaagttagtggaagaatcaggatgtggactctaaatcctttgaatctgaagtccgtgtacttttttacgtcccaggagcgttttttctctctggttttcacagcaagaacttcttataggagaggtgggcatctttaaagttccgtgaaagagctgctctttccccctggggattcagcacgctccatcctcaaagagctctgttgagaaagctctgtttagttcctctttctattcaggtcaaatcctataatgacagttacattacaacctgaatatctttattatgaaagatttcttagcattagcctatggcctacttatttccaagaatatttaatgtaagattccagcaagccaagagaatttatttaatccctagagttgattgtggtgggatctctcttgggctccatttcttgctcttttccaaaaagctctggatgccggactaagttatttctccttttggaagcaaacgtgcactcaatctttagctgggagagtcagccatcagagtggggtaaaagatggagaatgtcctgatttgagcatgattgtatcaactgtgttatgtttgcaaagagaggaagtcagtgatgctgtgcggataggaaaagaagaggtggctaggatccctaccctttcaggacactgactgcataggtaataaatttctcttgagattattgaggtgaaaaaatggtgacatggatttattatgtattataaattactcaatgttctttctccttggaataaccccagattctgagtttcaagatgacatgtagacagtatctcagtaaatttttgcttttctgccttcccccttacctctgcactgagacttttctccaagtcccaaaaggattggcaactggcacactggtctccctcactgcttctccacaagtatcctccttcttctgttctttgtggaggacttagccatgaaatgctggatagctgacagtaaggagcatgggctttgaagatagaaagatcagggttcaaatcctagatctttcacttcctgctgttgaccttaggcaaattattgaacttctctgagctttgaaaggaaaataagagttcctacttcataggattggtcttagccttaaataagacaacgtctggaaagtgcttaagacaatgtactatgaaagactcaatatatatgtttttgctattaaagatttcctcccaacacatgttggtctccaattgtttagaatcatagatagttaaagctggaagagtccttagaaccaactcccaaatttgtattcctatcgtgccctttagtttcctatatcaaactgcctacttgcatgccccagtcatgagtcaaccttaagctggccaagacaggattcttgatttcataccaagcccttcctcctaacctcttcttcctcaatgcttcttgttcttgtaagtggtaccatccatcaaattgctcaggccaaaaccttgggagacattcttgatgcctctctttcctttacctgcctactcccttcttctgacattcagtttaataaattcataaaatattttgtatccatctgcttgtttaccctttccatcctcatatctattgtcttggtccaagtcatcatcccctcctctgacactgtgacagtagccttctaacttaggttttccacaccttcacttttgtctgctacatttcattgtccacacagctgccagagtgatattttaaacatataaatccgatcatgccacttagctgcttaaagccctccaattacttcttgcgttacttacaataaaagctaagcccctttccatggccacaggactcacatggatatagtttctgtctccctctctaattgtcttgtacttttccccttgttctctctgccgcagccttacaagccttttcagtcccttaaatgtgccaagctcattcccacattggagtttttgtccctgttggcccatctgacccaaacagataccctgccctggatcttggcatggctggccccttctcatcattcacccaaatgctactttcttagcaaggcctcccttgactactcaaactttgtggccttccttctccttacaaatagatcacattttattccgtcatgtggctgaataatttccttcgcctttattactattgatcatctgcaagtatctcattcagctatttaagagttgatactctatctcccgcactggaatgtaaacttccgtggagcagaaattttccctgctatatctccagcactcagaacaatgcctgttatatgccaagtgattggtagtgatttgttgcatgtacaagtgactctagtctgacttgatcattttctggatgacaagaaggatatcttgagtggaagaattctgaccaagatctccatgggtaagagctgagccaggactagaatgtgggccttggtacgctctgtgtgacattcctcccatcatatttatcctgtctactttctttgggtcttacctagccagggatcctcacacttctatgtatggtagaaactattgcagccctgtttaaaagaagggacatatgggccgggcacagtggctcacgcctatacttctagcactttgggaggccgagacaggtggatgatgaggtcaagagatcgagaccattctgaccaacatggtgaaaccccgtctctactaaaaatacaaaaattagctgggcatggtggcgcttgcctgtagtcccaactactcaggaggttgaggcaggagaatcacttgaacctgggaggcggaggttgcagtgagctgaaatcatgccactgggctccagcctggtgacagagtgagactctgtctcaaaaaaaaaaaaaaaaaaagaaggggcatataggcaaatattacatgcatatcacttatattattggaacgtacaaatataaatagtacagaatcatatcgcagtatcaccctgctgaggtgtgatacaaaaatgtacagtgaaggtaggtcgcctctttgagatttcttctcattcagttcttcttgctcagagcttccatcaaacatcctgcttaagctattgcctctaacccaccctcatcactaatttggttatttcgataagtagttgagaatatgtgctcttgaaccacatggcctgacattcgattctggctttatcacatatatctgtatatcttgggcaagttacttaacatatctatgccttaatctcctcatttggaaaatgggaataatatggttgttagcaagattaaatgaattaatgtatatgaagaattgaggagaatgtctggcccataacaatgacccaatatatgttagtggagattgctgttattattctttagaaaattggaacgtacaaatataaatagtacatatagcagatgatcaatatcaatatcatctaaaattgatattctaaaatggatcaatttgattctaaaattgatcattatcatgatgaaaatattctaaaattgatcgtcagtattctaaaattgattcacaactctgtgaatatatgaaaaacttttgaattgtacattttaagtgaattgtgtatatctattgctctatctctttatgtctctctctctctctctctatctctctgtgtctatcctgtgttccttcttagaagatgctttcagagcctgtgtggggcctactatgtctcttttcctctgccgtggggcaaaggatgttactgttccagatggaggctgctccattagctggcgtcttgttgggaagatgatgggagcaaagccacagctgacctctgttgacatgtagtgggagagagaaatacacttttactgtggctaagaaaaagaaagaaaagataaaccaggaatgacagaggctgtaatcagtgtatgcagtagataggctactgggggtgcatgaaacttggtgtctaatctattacccaattcttttctgtcctactcaagacagggtctcagaacacaaatgagagagatgttattacagggaaagttttgaacctcctctaatttaagtataaggaagtaaatggtgagtggtggttcttcatcagtggctatgggttgttggtgacacagctcacacctttgacagattgcagaaacggctgacattctccagggacttccagcacaaggcagtggaggtgccgctggagggctctgagcagggctgctgacccgagatgggcgggaatggctgggcagccttatggagcaggtgacagctggcctggctttggaggagagtgggcttgggttggcagacagcctgcttatggcacagggctgcagcttaccatggggtgtgcacagctgtttccccctggactttctgctagagctgtttggacatgtgctgatgggtacaggccactgagcctgtttatcaggtatactgaaaaaattgccaagggaacagcatttggaaatggagccatttgtccacggaataggattttcacagagtgaatgatgtgggaggcttgagtcaggactatatgcagtggtgtgtctgggtggaggccaggagggaagatgctgggctttgggtccatatgagtatatgggaggggctggtggggatggctgtcaatcattagaggtattttttggctgcagcagggataggtggccacatcttgcacatccctttggctctttcttggccttatgctgtgacgttggataagctatttaacccatttggtctgttttcacatctcaaacatgagacagtgttataagtggcccaatcctgacctcatagcattttgggaaattcttcctggaagaaaggttgcatctgagacacagctggggccactgaggggcaggaccagaggaaatctgttgtctatttgttttagttttacccactttattctactcccccatctcacctccctggaggggcaggcattccaatgcagtgagttccagggacataatatcagtgaagcactgactatagaccaagcattcctctatgcactttatatgtcatttcatgctcataatagcaagtggacatcattgttgtccccattttacagatggggaatttgaggcacagagaggttgagtgacttgcctaaggtttcataactgctaagtggcagagccagaaaccaactccaggttgcttgcctctagagctccagagcctccactctaccatctcttggccaaggccaactctggtcagccttggctgttttcaattcaggaacccagctggagaagagagggaggcagtaggcttcagagcagcactcctcaaaatgaagggcagatggaggggaaggcccatgggagaccacgaagggagtgcctgaaaccatgtcctgctttgcacctggttgctagcagggtctgggtgaatgggcaatgccccttagcctactggctggcactggggagggccattaacagatgattacacagagtgggtatttagcatagagaatggagcctgatgatcgagcaggtggagatgaatcatgctgtgatatgtcgatgcaggagtggcagatttctattttccccatttccagggagcatggggctacaccagccctggatgtctttggcccatttcgggcaggattatgactgtaggtggcacaccctgttatagaatgggaaagaaggggatatgggccagagtagataagctccaaggctctgtctgctctaacatcccaaaattttgtgcctatgtgcgcaacttcaacatctgacacctcctagtacaatccagccatgctatttctgtaggtgtgcctgggtccccgcattctttccatatcccagcccctatggcacatgataacactgagtggcgcctttattgtcctcttttaaatggatccttcctgcttttattgaactccaaatgtgttattgaaccccaaatgtgttttgcaccgcagaattcaccaagcttcagattttcaatggatatttcttagtttctactctcatatctgctgcctccaaagaaagtaaattcccagtcccctcataccattagtctcctgggtgcctgcctcttctgaggccctgtaaaggtactgctcctggtacccttgtgaggcaggtggcaaacttcccaaattgaatttcctttttcttgtctgcttgtgtctgtcctccagacgccctgtggtcctgagattactcatgccccccaacccccgatcatttctttctgttcactttgtttgtggaccacattctgattcacccagggccagataacatggccacgtgcctcacctgctggcccactgcatgtttgtgatatgtactttgaaattcttagtcgaaaaccctaacctcttcttggagactgttctttctgatttcaggtatctcagttctctagaatcccctggactgaaccttaagaattttcttataaccctgtcagctgttgcctttcaaaaactcagtgtaatgctgagtaaacattctggcctctgggctgtgcatctcctagtcttggggattagacactgtgctcatgttttccatccttgattattctcagtagattttcttctcttttttccccctcttccctaaggcttcattacctcccatttgttcacatctcttttctccatttttcttgttaaagacagatttagaaaatgagtttagtctcttggctattttggagtcatcattaatttctgttcctcttcattccttagcaggctaacaggtttgtgtctctttctcccttgtttcctcttaatgggtctttgaaagtctcttttcttgctgggttaacccctttgcctgttggggcttgccttgggtccaagaggcctctgccctttctgggtggtattctaggtgatgcagccactgcgattgttctgggtttaaagggtactgggtctcccagatggagtaagtcatgcactgcctctggccgacttcatgcaaactgcagacagggtctcccaagatgcaccttgaaacccatctgaggggtccaggcgaggcctgaaatatgcctgtggaaaggtatgaccctctcaatgatgtgtacgccccatgggggcaaagactagtctccctaaatcctgttttctcaatgtaaaatttgtatttggagaacaaatggccgactgaacgaatgactgagggagggggagaaagaagaagggaaaacaccacacactttgaaggtgggcagactaggctgtgaacccaagtttgactttgccaactctttcactttgcattcttggccaaggagctgagcttctgtgtccttcctaggacacaaggaaataattcctaccctgcagggctttgggtgaggattaaaggagtgaacataaagcacctttctcagtggctgcacatggtaggtactcagtaaatggcatgtcccacaccttggaagctattttagaaccttgatccttattaagggtgctcagaagcccaagctcgaagcccctgggtttgaggcgtctttgggattctgccccctgtatgtggggagagcagaagctaaaggggaaagggagttacagagccggggtggggatctggctggagccccccagcagagaccctccatgtcttctatggcagcctcaacacacatgcacccttgccagctcatcagtgtattgccattaccaagagggagctttgtcagtgtattactgttattctcaacgaggaaattgagatagaaaaaaggggtgtggtgacctggagccagtcctgtggggagatttaagagctggatttagagcatggcttgctggttcttaagcctccattgcagcccacttcagccctgagtccctctcccttcctccgacagctgtttctctttggatctggtcaactgtccacctcaggttttacaactgcatttctttaatgtggttgcctttggctttttccgtgattgtgaagtctccacccaggataactcccatcccatttgcatctggagggctggtttatacacacagaggggttgaattctctagagggcctggggtggaaggcaccactgagggctacctgtctgtctctgtgatagggtgacctggctagatgggactgcatctgtcttgctagagctgaggctttgctgatcatcagagttgcctggggttgggcttaggggagtcgttcagttcattttagaactgactttccagagtgatgagggccagggaatcctcagggaccctacagtgggcctgttgggaccctgatccatagcctacgtcctgagggtgtggcggtctggttcttctgctgccctggtcgtggtcaacatgttgttatggaacatagaaagagtgcagacctgttctctttagatggtgcacaggtgacttccttctttctctgttcctcatctataaaatgggtacaaaactgttgcctgtacatccccctacagggttattgtgaggacagagtgaacaatgttgagaaaggactttgacaaacatagaacctgagtacccaacagggtgctgtgggatgtagtgagggaacctcaccaaagcactggactgcaggaaaacttgatgaaaggactttatcctcttgggttttactaaaaatagagaccaggaaaaaaatgcaacctggtctcagtttgaagatcaagttatgaagatcttgtgaaaaatgttgctgatgcaaattatgtcaacctcattgcctgaaacaagcattccccctgcccttgaagctggcatgtaatcattgattttttgtgctttagagtcctacaaagtccactcacaatggcccttggggtcctgtggggcttttctgagacattaatacattaataccctccaggaacatctgttgagggccttctctgcctcaggagaattcatgcaaattctcttaattcgtgcaaaggtgaattaagtttaggtctttggcttcagtgggatagtctaggggtggaagagggagacagcgtgtagagatgcttactatacagtgtgatgaggacttggggctccctgggagcatttagcacaggtgggggatgcatctttggggatagggaggattctagcaaggaaggcttccaggccacctgaaacctaaggatgggtgcaagtcagcagctgaaagaggctttctggggacatgggtgatgattgtgccaggtaaagggaaccatgtgctgcatgtccagatgcctggcagtgagagagaaagcctggtatatttgcagggcctaggcctgtgggacccactagacctggaaccagactgacaaggtgactccccaccatgcttccctgtggccccaaagtcagtgtactaaagggttggaatctttgattccaggtaccctgtctcccagtatggccctgtgacctgagatctctctcactgaggcagcagagtgattcatattagagcagaagaggggatcagggctgcagaaagacaagatcccctccctgtgtgcctcatttgctgccaactacaggtatctgatgcctctgtggctccttccagaggggcatcttggtgcttcctccacaagggccctaacctctgttacatacaagtgtcctaaggatcacagaatcctaagaggtctcccttgaactacctgccatactctgaaccattctacatgtgttccatgcactctgcaaggaggctgattaaacattgaaatctcatcctcttaaatgtgcctctgatgttcttaggatatgaaccaaactccctgccttagtctgctgggtgagtgtgaggcccatgcagaaacctaggtgaggcagcgtggtatggtgtgggaccagcctcaagaccagttccagcatctccctgcatgtcctccagggctctccgctcaagccacattgcgcttccctcgatacccccatgtgccatgccacctctagctcatggcctttgcctgtgccgttccctcgacttggaatattttcatgcagcctctgactcgctttagttaatgtctattcctctttcaggtttcagcacaagtgtcatgtgcacagatccataggccaaagacatccagtgagttggcctgaactacatgacaatagaaagtaggctgctgcctttgagtgacaacagcctctcctgatgcttgtcgaaactgagtccatactgtgctggtgcctctcaggagcaggtacctgcttcatagaggaattaagggagatgacccccaagtcttcccccaggagtaaaagggcaccttggttcttttgtccttactacatctggcaagtccagctgtgtccctgaggtgggcagctcactccctgcaggaggcagtggggctcccctccctgtgccagctgtccatttgcagctcagaaaccttcgctgatgccagcaagggtggtgtttgcaaagagcaaccgtgtgctccttatttattgtgtggaaaagaaaacaaattaagctcttgtaattatacagtcagacatggccttaaataaagcttaagcagtcaaactccacttagaatattaataattgcctttcccagccctgatccccagcagctttctttctttgtactcctcccttcccttcccacccatctccactcttcttctcccccggctccctcattggtgcagacctctgcttggccctcagaaatctctggaagaccccctagcagtgactaggaagaccccttagcagtgactagtccctgttggacttttcacatatcactagtggcatttattaagtgatttcacagtcatggggttgtgctagaatattcttgtcctgcccccacctcccttattttggttaatccatgagaagttgcataatattatgattgaagacacaagttttgtatcagtcagaactgggctctgttcctaccttgtttgctgaccagctgcgagatcttggtcaagtcatctaatctttttgagctgactcttccctctggtaagaaaatcatctccctcataagcttgttttaagacttggatgacataatgcatttgaagttttggcacacagcaagtttcttacaaatattaggcctttcagttactatagctctagatcatacctcatatcagaattttatggagtttcttactttcatttttctggactcaaacatttattgatgtgcccagagcctgcaggtacgtattaggtctcccaaagcgtctgtgaagtgaaatggatgcatctgcttggggcctggcaggaggacatggagtcggggtggtcagtaataccatgtgatgtgttgttctgagggtccactgacatgcctcccctcacgactaatgaccagttctctgagcaatatgctatcttaaccattgtggctatagtgctttacataccacatctcaaaataccatcttatttaatatgctataataagatgaagtagctagcaattaccatcatccctgttttactagtgaggaatctgagagaatgcattgtccaagaccacacagctagaagtagtagagtaggagccgggacccaggtctcagactttttcaagttctagctctttttttgctatactgggctgtttcctatgctgctgccaacacctgggaggagactcatctggtttctggacctcagagtcgtgatgctgcttcaagacttagtgtgaatcagtcagtcaccaccttactgtctcttttagtttcctttcctgtgacatggaaaatgcacagcagcactggctttacttgtgatatgatatgtgatatgatggtagttgggtctttgccagaaactaacttgaaagtagtttggaaacactgaaagatggttaggttcaaaatctctattaggtgattatatggataataccataaagggccttgttcaatgcaggtaacaggtgctttggaaatgctggccacaggattcaggaaggacatgggtcttaagtttgtccttggaggaatttttgcagtattatataggaagaggggagaaaattcatggaatgtacatgtgtgcacatacaagcaagcaggaaacaaagtgaagagaaaaagagacgaaatatttattgtgttaagctctgtgttaggtgttcttccaacagtaatccatcttcttgttttatacatgaggactctggggctcagagaggttatgtaacgtgctcaaggtcacacagctactgaagagatttattcatatctataaatgtctggtccagagctcatgttctttctgttgtaactgatataaagaccaggtcacctctctgagggtggtcaggagtccaacgttcccaaatgaatatttaaaaattgtttcttcttgggagggaaactgatactaccatttttgcttactcaactcccagcctccatggttccgtccctgggggttcagcaccatggccagagcccagggagccctccctttcctcctgggcagtgaactatgaacagctccccagagagaagcgcccaggccctagtccccggctcaccttcccctagcattgccacagctgctagtgggctgacctatgtccttaagcgaatgccactgccttggcacaagcaaagagttaggtgcatgtggtggacaggtggcctgcgctctgtttgccagccctcctgctgggatctagacccagatgtaaacagtagagggagtgccccttccacttctgccttccagaggcccagtctagagtggacgaggattgtgatttatgactttgattaccctgcattgaggaattatctagggctgtaggattccaaaggatcctgagcaggaacaggattctttcttccagaccagagctcccagggtcaggtctgttctgttactgttgaatggggcctggagcaagtagatttgtcatgtgctttctcacaggaatagataaagtgggccaaatggtgagaaaagcacagcagagctggctgagttatgatgtgggtgggtttgtcccctaggatgatgtgattttttcattcttagaaggttttcacctgcatagtatagaaccaagtccccagctggagatcaagacaacttcttgctcatgcgcatgtgcacatacacacacacacacacactcaggtgaacacatgccaagtgtcatgacaagggtgtggattttggaattagacacgtggactcaggccctgtgataacactaccagcttcgtgaccttgaactagctatctcacctctgagccatggattattgaattgcttatctgtcaatgagagcaaatcattataataatacagaccataaaatgttgttgggaagattcagtggacaaatatctttaaagcgtatagtgattagctcctaacaaacacagagtaaacgttacttattattttgatttctcaggaaatgatttctgtatcccaattttctttagtttactctcatgattattggtaatgactatggaaaagtccttatagcaaggaaaaatgattagcaagttaattaattatttgcacttatgttcagatctcaagattttaaattaagttgaggtcagccatagcagtagtgcaggtctaagaaataatgagttgagtttggcaccctgttcaatgcaagacttaggaaaattgagccattcagtgaaatttacctgcatgcttttatttaacaatgattgtgatcaaggtgtaaatcattccttccactttgcacaaagaactacaagcagaaacacagttcacaagtcctaatgttagtgattattcctgagagtgccagcctttggccaggcccatgcatccacatgcccttttactctgttctgttcccgcttgtttctctaagtctcaatgcagattgcattgtctctatggcctcctcaactcagttcatattcaatcctcagctccttgagaatctacatggaaccaagtgggatgggggttgactctagggtccatatactcaatatgaggtaagaattcttatcttgtctcttccttgagtgagtctatgtgaacactaccagatctcttcaggagagaggccatggggtgtaggcatgaacactgcatttcccaaacattttgcagaattggacaagagaggccaaaagactgcatggtataaattacagaaaatggtggtgtaatgacactgttggtgaataaattaaagccctgaatcataaggccagtaacagagagggggcagagaagtgtaattaaaaggagaaaagagatgtttttagctgacactggaagtaagacagagatgggggcagggtggggagagagggcagctcagaagagaggacatgggtattgctggcagtcaaggaaggtaagaaatgaggccagtacttatgaaactaaggaggagagagggacaatgggggtaatcttagtgggaacaaaacaacatgggctttggcagtaaagatagctgtcagatgtactctgcagacacagaataagatgaatggaagagttctgatgaagacagatgagatcctggagaataaggagtaaaatcaggggttaactggatctccctggagtcacagcattctgaagattgttctccagtgtcacttgtatctgcagctggcctttcttgcaaatactctttgacttatcctttgtaggaatgagaagtaaaccaagacatctggggcaagagtgcctgtcttggaccaggtggcatgggtaaggctgtggccagcccggctgcagcccaccaccgtgtgggtccagcaaggggccaagaccgtggggaaaattcaaattctaagccagaagtaatcctttttggacaagagttcttccctggattcctctggaaatggagtaaatgaacaaatttctatggggagctgccttgttcaccccatacacccagtacacccacatttcccagcacagtataggtacctaattagtgttgaatgattgcatgagcagagatgacttttaagatagagaaaacaaaatgatgctaaagctgactctgtttatagcatttgctcctctcttttgttcactgctgtaaagtgacacctagatgcacggcatatagtaggatctcagtaaataacacattgtccaaagtgggacactttggagaatggaagggaaactgacctgatgaaattccaggataatagatgtgagctgggactgtttgggcagaccagaatgtgtggtcacctgtcactagtaattaatacaatgaattagtcttgtatccttggaactatctcaaaaagaatgaaggtcctgcctccttctggccacattacctccatttatgcttgggctcattcaataaacatctactaagcacctactctgtactaggtatcttgctaggcatcaagaagacaactagagggaaaagctgtcgttttactccaggattccctccattcaagaggcagctagacttttgagagatacatgatttgacattgctgagcttgatggatggatgaaatgctctgggagcatgtgagtggggaaaaccagtggtctggaggtggtggtcagggaaggcttctcagaggagggatatatcagtaagtcatggaagatgattaagaatttgccaggcattctgggagaagactgaatgtcaaggacaactgcccagggcacagggctcattatagatcagctcaacaacaccaggttgctggatgctgggaaatattgttgtgactaagacaaatgagccgttgacctcatagataatatgaattgcttgctaccagatattatatagtccattggggctgtgttgggggaatttctgtatgagttgggagcctggaggaggggcacctacccgacatggagtggtgtcatttctaggtgctgacattggcccctagggagagataggaggtagggagagagacatccagatactcaggtggactgggaagagaaggttttgtgtgcccttcttataccaagtgtatggggtgcctctcactcttttgcagctaatgttacctgggcaaacagagtggccacagtgctggaccaaggcagcaactgctcatgtacagacctagaaggtctagaggtctccctgatcctcctggaagtctgagaatgaggagggaaaggctgggtgggaggtactggaaaaaagagacaggaagctggagaaagaggaggaagctggggcgttgcatagataaagcccatctgcctccccatccaaagcaaaatgttcctcattattttccttggatgagtttgctatcctgatgatattaattattcttaaaggtcaacagcgctctttcgaatccccttctgttctatcatgtaatcagttaattaattggaaaccatttagcgcgtatgctgagtgcgttgtctggtgcgagttttcttgttttgttgctcctgcagtgatggttccctccatgctcctgttttctttcaaggatttggaaacttgagagtgggcccccttctcccctctccttctgctggctgatcccccgttcattcacagttggctttggaggtgttctctttagctttttcctttgtgagtccttactggcaatattaattcatttccattgagtgcctaccatgtggtgggcactgtgtggggcatccgtatgtgttatttcacttgattctcaccacctcatgtggtagagattttgctcccatttcagaagagaaaggagtgagactcagcctagagaaatgagctgttcatgagttgtctagctaaaatgtgtggctgagtaagaacagaaccttctggaagccttatatcctgatttgctgtggcgctggtgcttcagagtatctgggagaggagacttgggtcttgtgatagggttttatttagaattcttagtcccaggcattgctggtttattacaggagtgagcacttgaaatatgaagctggagctctgtcttccccatctttctttattgtgcttccattttgctcttccattttgctctgatgtacacagaggggattcctcagcagctggagggcagattagaagcaggaatgcattgcttgtggtaaaaaatccctgccagctcctgaatatgcccagccccccaggacgatgcagtcccaccaaaaggccgacctctgtgggactcatgagcagctcagcatgtttgttcagctgggatctcctgcccaaatccctcctggagaggggctctaggatgctccagccctgatttgtcactgtgtgatcactctacaagacctctccctgcctggagtatgtagctcatttctggttgacctctctccatgcctttccctatgctctcctccatgctagtggatgggtctccattttttatggctgtcacacatggtcccagttagtccagggaacacagtgaaaaattggactccaattcccctctcagtgaccagaacttcaagtctttccagacctgggggtgaggaaggctttccaaattttacctaagaatcgtaggatcctgtcctagtggtggtgacaggcagtgatcgctaggagcacaggagacagggccctagtaacgtagcccctcctgctaatgctagcaggtagtaaagggcacagactctgcatccagactgctggggttcaatccctggcttcccccacacagcagctactgacccagggcaagttgtctaactcacttgctctgtaatctcctctctgtaaaacagagatgatgataatgatgatagtagcatatctctcatagggttgttgcaatatttaagtgaactcttatatgcaaaacccttaaagatagctggccaagagcaatcaccatgtttgttagctgctattactattaccacctcaaatacctctgtgaccccagcagccatgcattgagtacctgctatgtgctaagcactgtgttgggcatttgacatgcattaatttatcttgatctttagaattgccccataaggctgatattattaggacttgcatggtcaagatgaagaatctgaggtccagagagattaaataactttctcagggcaggtcccacaactcaggagggtcagagctgacagcttagcccatcttcgaaaaccattgcctacctctcccctaaatgcttttccaaacccacacagccactgttcccttccagagtagtgtgctaaggaaagaatgagcttctccatcatacacttggatggggctttctccactgtcagttgcccattgacttggtcctaaaagtgggtctgctaccttgttcctcacgtgatccccagggttgagtcttctggacacccctaggggagaaggcccctaaaggccaatggtgtgctcacatgtcctcctggaccctgctagaagtggggcagaggaagtccagctatggctttttacatgcgcaggatctactctggaaaaggggcagggcaggaggtctgagctgtcagcaaagcccccactcttctgcgctggccactccagagagcagccttagtgaaccctttgacgctagccgctgactctgccccaagcctctaggacactacctcaggcactaagctaaggtctctgcttcttagctcatcctgtagcctcaagggctccccatcctcaggcaaccaggggtatgggtccctcagtgggcctaggcacagctgtgactccttgagtgtggctctggctggcctgttgctacgtgctcgtctcttccctctctctgctcagcagcacccccttgaccatggctggggcgcccctccttcctctgggttccccagctccagctttgggtctcactcattggtttggatgctctcgtccgagtcctgttttctcctctgctctcttttgggaccatctccactcatcccgggaccctcactgcccctctcactttctctggtttctagcctctgtcgtcctctaggctcaccaggcatgaagttcaagcaatgtgtgtgtgtgtgtgtgtgtgtgtgtgtgtgtgtgtgtgtgtgtgtgtgtaggaggctgggtggggtggggaggcacagattcatcttgtaattgagtgcaggaagcaggtgtaggaggcactttgggcagcagggacctccctttagtcaatgtgcagtgctgtgatggccctgccctggaccagccaggggcacgtccccattggagattctccatcaagttccaggaggggattgtgaattcccctatgtggttattaacaatggcatttgttcccaggagcctgcacaggcatccctcggctccctgacagggcatctcttttcatctgctcacatgactctttcatttccttatatgtgcatatacgattgtctacttctttagggcagagggatttgattggagccaaagtcaacttgcccatggggaaaacaaaatttcaccagatcagtggttcttaaagtgtggttcccaaaccagcaacatcaatgtcacccagggaacctcttagaaaagcaaattctccaggcctgctgaatcagaaactcaggaggcctggtaatttggtttttccaagcctccaggtgattctgatacccggaatgggagaacctctcccctcaatgctttctcaaatccacacttggcttgtgttccctctaacctcttatcttggaggagggattggatgcagcgttggcctaatcagatttctttatgaaaaggcccagagcagctttctgttcacagttttgttgtttttaagagagtcatagattttcctttaatctgaatagtagctcttagaaaggggactgttgtctggcctggctaaaaagtaatgaacaggaatgtgcttcctcagagcagcttagcactcttgcccctgcaggctcccaccagcctttggggaccctggcttctccagccctgacagtgcccgccctgggcagctctctctcagcccgggggcttggcctgcagctgtacctctgttcccttctccctctctatcccttgctttgcttttagtcagtagctgcaaggggttcttgatttttcccacagatgctttctgcgtctttttttttctcttgtcatgacagctcttgagtaaaaatgagtgtgatgtcttgggcacatcagcacatcatgtgctggcgcctctctggggtagtcagctcccacgccaggcctggcctccacctccccgggtggtggatcccgggtgaaaaggcccagcatctgcctggcagcgcccacctgggactccagagagagctcacatgcttcagggtaattagccttaggttaatttatctgaaaagaaactcccaaggagcaatgcccacccaccccgcagaatagtttcaataacactcaaggtctggtgcaaagcagacaacatgaagaaacacagcagattttaaggcctttggtggccttgtgctgcagcggagacccagatgcaggtggccaatagacctcagggtgaggaccgcattttccctggacctcaggccctgcccaggcatctgctaggtgggctgcaggaggcagcacaccagcaccagcccaaccctaggggagcaggtgctgcctgctgtcttgttacagcaggtctctatattgccttgtgaactcagactttactgaatacaatgatgcctgaattcaaggggtcaccacctggacctcctgtatttgttttaatggcgtgggcgcgttgtggcttcggtggtgactggcaatgggcagaaacagtgacagagcatgttcactgagtgcccactgaggatgaggcactgtgtcagctgccgtccataccccatttaatcctcaccacagctcaagtggacatgccctattattattcccaacttccagatgagcaaactgaggtacagagaggtgaagtaactcacgcagagtcacagggcatggaggcagcagtggtaggaccggcacccgggcccgtgaggtgccaaaggccatgaccttacccatcctgcaacactaaggatcagaagtcactcctgtagccaagattggccaagaggggaggatccctcagctgccctggtttgagtatcaggaaccctggtgccagctaccagcctctgctaccatccagctgggtcatcttgggaactggcttaacctctgggatccccattttcctctcccgtagtcagaatccaggactccgggtcctggctccaacagtgacttgcctggtgacacaaacaagttatctcctctcccaagtcctcctggatctcacagtctcggcgtccctcgtgtaggccaagggaggtgggctgagggctccccactgttcccccatgttctgcgaggttctgagtgtgctcctcagcgcagagacgtgaaggtttgtgctgacaccgagaaaagcatgcctactggagggaacagggaagggctgctggctctgggacctgggctcacagagtcagctcctggtcctgctcggctccacacgtgttcccatcaagaggccagggcaggatgggccctgccgaggcagcacagaccagaagggacggggatcctgaagggcagaaacccaaatgtccttgagaggcagggaggggtcaaagaggcagagctcctcagaccccctaagaagagttctcagtgtgtttcttggtggagccagacggagacagctgtggggataagtgtgtatgtttgaatatgtgtgcgtggtatggtgtgtagtgtggtgtgtgtgtgtgagagagggaagaagagggagcgagagcgccttcatcctcttgacacccactgggagagtctggcttggctgcgcaatggctgtgtgagttcatagcagtgtagaagttggcttcacagggacagaaagaggtcccaggacaggtgggtggaggagggcagtgggaggagcagaagccgcaccctgcagggtacaggattgtctttgtccctaggcctttttctgctgaggtctctgcagagtctctttgtgcactgtggttgctgtgtagaaagaaatgcttccttccagtgtccctagaaactcaggttggttttaggtcccttcagatgaaagagttttgtgggtcttccgttgaactttccatacgttctttgagcacttactgggttccaggtgctataaagaaaataaaactgaaaaagaaaaggttgtcttcaagaaaagcaacctggtgggaggccaacacaggcacagctgtcactccaggccagcagtctgagacgcaggctgtgacagtcgaggcccaagaaaaatgcagtgggagaaagcggagggaaagaagattttagagtgggtggtgctagccgtctgcagagagaaccactcacactgtgcttgcagggtggggagaagggcatgaaaggtgcggtggtgtggagcaggagaagtgccagggagctagctctaagggtgcagccaacagggcgatgccattttgtcccaggtaggtttttagggttagctagggggaggggctgaaggatgggggaaggaggtgggtagtgagagaatatatggaaacaggaggctgatgtcattttgtggaagtacttgaattctgaggtggagtttggacttgattaggtgggccaagcattctggaagagtccagttctctgtgtccatatctggtctcccatgtgccacggtccttctccacctcctcagcacatggcaagtgctcacctctcttttccttcctgctctgagctccagcctgagaggatgctggcagctactcagtgatgttgcactgtgctctgggacaactggagtgatttccttctcataaaacaaactatgtgactgctggattctgggatggattgacatctggggaaagaaaacctgacattcctttggagaacttataatgacagttttctacctgttgactgcttctctctactggggacttcaggcaatgtctggatttttcagatggtccagagccgtgtcttctaatatggtagcctttggccactcatggctatcaagcacttgcaatgtggccaattcaaattgagatgagctctgagagtgaagcacatatggatttaaagacttagtacaaaaaagaatgtgaaatacctcatttatatagatagatagatagatagatagatagatagatagatagatagatgatagattacaagttgaattgatgttttggatatattgggttaagtaacatattgttgcaattactttcacctcttttcactctttaacatgtgactaacagaaaatttcacgtggtatttgtgtcttttattatatctatactggagagtactgttctagacaaggggttgtcacactttttctgaaaagggtcacatagtaaatattttggtctctgttgcaattgctcacctctgcttttgtaatgtgaaagtggccctattagttgctcattgctgttgtaacaaattaacacaaagtttgtgacgtaatacaacacaaatttattgccttacacccagaaattcaacatgggtctcatcaggctacagtcaaagtgtagggaggtcagcatttctttctggaggctctaagggagaatggatgaatgggttttcttgcctcttccagcttctagaggtcactcacattcttggcttgtggccccctcttccatcttcaaagccagcaacattgaatgtctttgtgctttccttcattagtcacatgggtccctactttctctctgccttcctcttctacctttaatgccccttatgattaccttgggaccatgggataattcatgataacttcctgatctcaaggtctatatgcttaatcacctctgcggtgtaagttaacctattcacagattctcgagatttggatgtggataccattattctgcctggaacatgaccgtagacaacacataatcaaatggacatggctgtgttttggtagaactataaaaacagactgccgacctacaggctctagcttgctgacccctggcttagagaacatttctctaaggatgttatgtgggtattttttggctagacactccatggagaagattctatgctccagtaagtttgagagacacagtttgccaggtccttctcttacagtaaaagctctgagaagttctgcagtaaataagcatgcttaattttaatacaattttcaagcaatatgatctttttccccttgaaatacccatgaacatattgcagacctcagattccaggaacacgctctgggaaaccctggtagagcccataacaggctgcacagaaaaagttgcctccagtctcctgagctaaggtcaagacaccagtcacgtcagttgagatttgattagagaaagcattttgacttcattaaagttcattaaatgagccatccagtgtaatttaactgaataaaaatggctcagatggctttaaaccccaccccattttacagcaatttaattgagggaaaagcaaatatatcaatgatgtaggaaaatatttcttggccttcaagaagaatgttgggcggcagcagttgcttccttgtcataggcattagattttaaggggttggctcatgggccctccttggtgctggcagcaggccttggtgacaagattatatggtgcctccttccttcccactgcttcaacccaaggaggctggcggcagccccctaacagctcctttggtggtaggctgcagatacctctggtgtggagctgatggtgcacagaagtagtcacagggtcaagactgaggaggtgtaggttccctggctcttggagaagtgggcagtaggctgctagtttcatccttctgtggtttgttcttttttttttttttttttgcaaagtctatgtgggcttggtgctgcatcagggaattctcttttcttgcagattcttaattagttctggtctagaacagcactcttttcttgcagattcttcagcaaaatcaaaagaatcctggtatggtgtgtcatgagaagggcctgatggtctccaagatgattgctatgatctgaatatttatgtgcccccaaaattcgtatatcgaagtcctccccttccagatgatggtattaggaggcagggcctttgggaggtgattagatcatgggggcagagccctcatgaatgagattagtgctctataaaagaggcccccgagagctagctagccccttctaccatgtgagatttaaatgagaagacatctgtctctgaggaggtggatccttgaatctgctgccccattgatcttggacctcttaacctctagaactaagaaataaattcctattgtttataagccacccagtatatggtattttgttatagcaccatgaatggattacagcaaaaaccaaggagatatctctttcatagtgaaaaaaaagaggctgggcacagtggcttacacctgtaatcccagcactttgggaggccgaggcaggtggatcacctgaggtcaggagtttgagaccagcctgaccaacatggagaaaccgcatgtatttttagtgtctactaaaaatacaaaaaattagctgggagtggtggcacatgcctttaatcccagctactcgggaggcgtaggcagaagaatcgcttcaacccgggaggcggaggttgcagtgagtcgagatcatgccattgcactccagcctgggcaacaagagtgaaactccatctcaaaaaaaataaaaaacaaaaaataaagaagaaaagggatagatacttgatgatgttagatcttaagaaagagggaattgcacctttcaaaatgctgtctttgtggatgaaagaaataagatttgcaccataatgattgcagccagcaagtcacagaccctgggagcttgcaggattgggaggggttggacattcattgttttctggttagctgtgctggatgcaccaagaccaaacggtgctcaaaagagtgcctttctgcaagcagcagaatgaatcctccaggaagagtcagtgactgtggcatttatgtctgggatgcaaactgagtatgcccctggttgtctgttatctcttttaataatctttttgcaggaggaggctggagtacacccagggggtgggcaagtgggcagataccagattagatcttagtggctggaacctgattgggaggctggttccctggagccaccaagcatagacagagcaagggggtgacagaaaaccatgacttggaggctttcagggatcacagtgaggcagccaacttggccgttaaggcctcagggcaaatgaggggccgagaacaggtgtattaatttgcaattgctgctagaactcaatgccacagtctgggtgggttaaacaacataaatttatttcctcacagttctggaggctagaagcctaagatcaaagtgtcattggcagggctcatttcttctgaggcttctctccttgacttgtagatggccattttctcctccctgtgactttacatcttttctttatgtctgtgtcctaattctcttcttataaggacactagtcatattggattaaggaccacccatatgtccttacttaactttaattaggtctttaaaaatcccatctccaaatacagacacaatgggggttaggattttgtttgtttgttttgttttgttttgttttgagatggagtttcactcttgttgcccaggctggagtgcaatggcgcaatctcagctcactgcaacttccacctcctgggttcaagcgattctcctgtctcagtctcccaagtagctgggattacaggcgcccaccaccacacccagctaatttttggatttttagtagagatgaggtttcaccatgttggccaggctggtctcaaactgctgacatcaggtgatccacctgcctcagcctcccaaagtgctgggattacaggtgtgagccacggcgcccggctgggtaaggattttaaaaacgaattttgaaggaatgaaattcagtacattacaacagaaaacactcaagtgagagggaccaaggaggtgtggaggtggagtgagcatccaggagctggagtgggagtacacaggtgaggcagtctggtttaatagctcagagacgcagaggacctgccaccagcaatcccttacacatgcaaatcctaagacatacctgcccattagcctgcctctaccagtagaagaggaggtgcttccaaatgtcagcccaactcttaatccaggaaatccacaaatccttccatcttcaggaccactttttggatggggcttaatgtctcctcaactctcaacccccaaaggggcaacagagggactcatctggttggtttctcttggcaacagggtccgtcttattgacccttttgtaacagtaggtttcccagggtagaagatgaaatcctccccatttgtgggctctattcctgccatacttgggtgccaccattaggaaggtcataggactgcttactgtgcttaggtttctactggtcagaggagaggttgcctgggaggacccctgttcattatggggttaatgccagaggtgacatctcagctctgtcgttcctcagggcccagggttcagccatctgtgtgtctggctccttgttcccggagcacccagtagccacatcatcattgtttactacctctggaccccagagtctggtctgtgagagggccagttttgcagcacaaaattaatggctttgtttggtagtctcaggcgagagatagaaggggcagtgtcacggaacttgattttgcggaagagtttgatgcatcatctcgtaaaatcttgctcaccaaattaattcaatggtcagatggcttggaaactggccattgacccaagcaaaagtcagagacgggtgataatggatctattagggaggaggcccacagaaaaggctgccgtggggctcagaggcagggtgttcttaattaaactcttgtctgatgagcagggtaaccagctcatcaataattgatgacaggtgcatataggtgaggccccagctagaaggaaaaatcaggggcaatgagttccgagtgggtggcaactcatacagaagcttgtttatttaccctgcgctatgagaatttatcaatgccggtgagggcagggtggccagaggcatgctctgcttgttttgtggtgtgtatatgtttgccttatctcttgtctttttgtataagtttttttctggggcttggtgcttctactgtgtgtctggcagggcattgtgtacagttgcaagggttgtgcacactgcaaccctccctgaacttgtgcaatacagtttccaggctctgcaaacaggcactgggttgtctgtgtctgtgggcagatcacatgagtgcttcagccattccatccacccaaagagcgggaggaatccaggtggggcttgatgggtgggggaggggcaagggggagatgaagccaaggcagccctgggagagtaggagcccacttcccccttaacaggtgtcccaggacccctccttcctctgacttgtaataaggcaataatgctatttcttagtctttatttgcccagaatgtctgttattttctttctttcagaatccaattttcttttgacatttctgcctaatgtagcaaagcatgacctttgtgagaggacatcgctggcagcctgctctctgcctcgggttccccaggactcctggcaggctccctgcctgctcctccctctgagatgggcagggctgcccatttcacctggactgctcctgtctcctggcctgctagttcccaccagttgcttttgtaccttaccaggggcatgttcttcagggctcaataagtctgagctttctggctaccaactgcccattggatgcagctgctcagcttcagaaccatgggttttgttcagggaggcactggagaggggtagggagctaaaggcaggggacggacatcttcccaaagtgccgcagggattacctcatggatttggaagctgggggcttgtccagcttttgctgccgtgatgctgttgtgcatagagtaaaccaggcaaaatagagcaaaacagaagatttctacctagatgaatcaaacacttagatttaataaaacctcataaaggccagtggcaatggagactcagagcagtaccaaatcctgttgtcctgaaccccaagttcgaactcctggtctaatagggtgtggttagtgactcagtgggagtgtgtgtctggtctccagctccacccttctgagcaggagctgggctgctgcatggggctttgccccaggtggtgtcctcaggtggtcatcactgcagttcttcttttatcacacctttctgatcggtgggggaacagtggaagtttgtaggaataagctgtatagtcattaggggttttgtggagctgagcatgatggatggcttaggtgtataggcttttagtgagcatgtgctgtcataccagaggtctcagccttgcagagaggcggttggtgacagtgtagggccatggggactatcctagaggcttaaaaactctgaacagagagggtactgggtacagggaagacagcagaacagtaaacttgggagacatctacctatgtttctttcccttctcctccagtaccctgcacccccagcatgaggctgcctcctctgcacagtcatgggccatctcagggacctagccagttcaggctggggtggaaccaagccactgcaccaaagagggctgcgtccaatgagaagggaaagccatgtccctttggttgttcttgtattttagtgtctggtactgttatgaactgggtggactccctccctatgtgatcttacccagccccaacctctcccatgagctctagacccaggaatccagcaggcaatttgacttatctctttggatagctaacagtgtgtcaaacttcatatttgcaaggggaaggtctctatcccatcgcctccatgtgatcctttggcaggctttctcgttctactcaatgatgtcaccatttacctggccactcacttctctttctctcctctccaaaatccaatccaatagaaatcctggcagctctacctctaacacctatcttgaatccatccacttgattatctccactcccttctcttggttggaagactgtagcagcttcctagctggcctgccaacttccagtcttggtcttctattttttaaaatggtaattagactaggtcacttctctgctgagaaccatccagtgccttcccaccactctttaatatcaaatccaaactcctccccatggccagcaagtgtggcgtgaatgcctctcccccttatcccaaagcactcctcactacttcctgactggcttccttcctggtcctctggatctctcaggccttgacacttgctactttcactgcctgaaacactcctcccttggtactcagctctttcttcttcttggctcaggcctgatgctaccttctcagaaggcacctctctctgagccctccgcactcctgtatcagttacttacatcacggtgttgatactcttccttctgcttattcatctgtaacttgaatataagattccagagggaacttcccttccccctcaatggtcaactccctcattcgtcagtgtagcctcaataaatatttgttgtagaagtcatccaaatataggtgcgtgtgtaagcatatgtgtgtgtataaacaagagtctgtgtttgcctttagtacctacatgtttaatagacacaagtatacacacatcgtgtttgtgtggatagatatttacctaaatggaatcagcactgccatttgttcccatcagtagatgagtacattgttcctgggatgccacttcaattctagcagtgtctaactgctgcctttaagggctgttatcacatcaaaagttgtttgttgagcctggcaaagtaataaccgtgggcgtgtttcttcttttatccagaagactaatggctgctcctttcccctgtacatcctaatgagaacaattaaatagccattaggaggagaacagacgtgtgaacaaaaggctgatgtcttgatcattggtgggcatgtttgctgggagagacactggctaaaaggaattgtaggtgacctgcagagttttttgacctgtgtgcgtgttaagaatgctagtgggcttatctactctgagaactccctgtcctcttagagaaggatggcttcataaaggctctgtaaacttttattgtggggaggggatatggaagaatgaccatgagaatttcatggtttctttgatttgtaaaatcttgccctttaaaaggcctcaaaagcctatccaaacctgatctatgccctcagctattagcagatgtatcgctagcctaacagcatgaagaagaagaagaagaagaagaagaagaagaagaagaagaagaaggaaaacaaagccaggctccagtgaaatgattaagcttactacctagagcattatttgtgccagacttgttttaaaatttccctttatttgtcaatcttgcagaaacctgtcaagtaaccggctcaccacactctcgtggcagctcttccagacgctgagtcttcgggaattgtaagtttggttttgaagactgtccaggtactgaagtgctggtaatgggtggatggggaggagtgtcaagcagtggaaccacctgaaggctgagcatacatctactcgaagagcctacttgggttggttgacacagagtgtaccatgttcagtgagagcaattaacccttttgcttgacttcggatgctctttctgggcacaatctatttcagaagacaggagtctcttcttttattatgacttagttttgtgatctgtagataattagttataatagtataaatacttataataaagaatttataataaatcacattcataatatataactttatagactattaggcatgctttcatttatataactttagatttatcatcataagagtcataagaggtagatattattattctctgcattttatgggtgaggattctgaggcttagaaagacacgtgagactcaactaagatcacatttctagggcctagccaagctgggacttgaacccacaccttttgacttcaagttacatgtcttttcaccactcataatcttcttcagcttatttgacttgagtactggcatgtcaaggggtttggggaggccatatattttttcaatctgcatgtggactgcttagctttgctgtggtccaaggctgatcagggcacccctatcccagccagccattctgcacaaacaaaggaaggccaaatgagtgaacattcgtgaccactgctggaaaaaataactcatgttgatgagtgattcatcggggtcatctctgtgcatgaaggacatcatattatgttgagggtataaatcaaggaataaattgaaaaggaattgaggcatggatcaagttagggagtcagggttccagagacaccgctcatgtgttccctcttacttggtgacgcagatccaaattcactgaatgctgattgctttactctctttaccaagaggcaatgaccttggacctctgcctatgctgttggcctttcaacttgttttcccttcacctagcaagacctgacttcatggatgcatcaaaaccttaccttttcagacccagctcttgatgctttacatcaagcatcccagtagcctatcaccccatgatgaccttgtgtactgtaggtggaaaaggtaaattaacatgactactacgatttactactaacactgatttctgagttcttcctctgtgccaggcattgtgccaagcaatctcttaagttgtatacttaatttaatttaatccttatggcaattccttaaggtaggaattattactatcacttcactttggaggacactgagatgcttagcaaggttaagtatactgtttaaggtcactcactgaatagtggcagtgtgtggacccaaagctttgaccactgtgctcaactatctcccagtgttttcagtctgtttccaacacaaggatctattctaccataattttaaaaaaaacacatgattgtggtctttcttaagttaccctagaactgactgagggccttgggggatctctttcttgggtgtcttgcatgtaattattctggaacccgtagtcccttcatctcaggaggccagggatggcatctctccaggggacatagggggtctgctgttggctgaattattgagaaaatgttcagtgctctttctaaaaaattattggatgtgaaatcaatggtgtgctgctgccctggtgacctgttacgtggagttttagaaacagttgttccgtggatatatatttaaagaaaatgtcagatttctcccagaggatcatgggattctgcattcatctttgcctgggatcaatacaccagtgagttagatgtgacttatggaggaatgaagacattccctccagtgtgagtcagtgtgtgagtaccaccatgtccatggtgtgttttatttctgtcatattgttaactaagaaaaaaatcatattggagaataaagaagcccccctctaaggagcaatcaccctggtaggggtctattttttgaagaagaattgaatcttgggagaggaaaattcatcttttggctggaggggccgcgtgttggctcttagctgtggttatgattaaaatccaaacaatcccagttcctggcaaatggaagagggggtagtattttcttgtctgacttccttattagtccacatggcgccatctgccatgagccatctagactgccagggtctgctcgatggagcctgtgggctggggcgtggggatgggttgtgtatttccaggaagaaagaattttggccctggaggagaaagggctcagtgtgttgtggagccaggaaagccacaggccagaagtgtgaggtttaagtgaccctctgcagggacagaaggggcagagggtgtgcagcaattccttaacatgtttctttctgtcactaaggacctctgctgtaccccaaccagcccctcgcccagtagaggatccttgctgtaagaatggaagggctgagtgtccatgacttttccagtagggcagaaggagaaggaagaggcacatcttgagcatctaatgtgtgtgaggttctgtcttatccttggaacaatcctacagggaggtagcagtgtgaccagtgttacaaatgagggatttgaggctcggctaagttaaacaggtagttcaagatcacatggctagtaagtggtatatctgggaatgagtgttatgatgtttaatattatcactaccccgatctgctgtttccaaagaccaggctgtttctcttacctgactcaagcaacacaccctacatgctcggcctctccttccagaagcccctctcaagatgtcgggtcccttgagtggaatcaaaggaaaaaaaaacaaacaagttaccatctcagagttcctgcagtgcaccaagacccttcctctactttctctcatttatttttgtgggatgagggagatggtcttggccaagcccctgactcacagcttcccctctgtccaggggggcgtacctcttattgagtgaatttgaagcatcttcgcatcttccatgacttgcattggagtaaccagcacagtttcaatggcacaggttggaaaaatttgacgtggcattgtgcagtgctctcagaagtttctggttatggcaagattattttttttttccttgcagagaagatgagacctgtctgtccaaaaatcagagcaggaatcagagagattgtcttagagataaagaatgaagtaggaagaaaagaagcttagattctgaatctcaagatacaatttaggcaatgggaagaggtctcagaggatgtagacctacagcacagaaacactccagcagtgccctaaggatccttaatgtatcttgaacaggcttctctgaataccctgcatgcatggagcagacatgattaaaatagattggagtatttcattttcttttaaaggaaagtgataattacctctagtatcatttgaagatttaatcagcttggtaaaatattaactcagtagcggggatgggtttgggctggtcctggtgcatttctcttcccagtcttggccgtgatgactttctaccgttcttggagacgtcactaaacaataatgttactaatagtattactatagtgatcatttctggcctcttaatagcttctttttgttcccaaatcatgctaacatatattatcatgaatcctcctaataaatttgtgaagaaggaaggtcaagcacaatgatctccattttgctggtgttaaaagagaaccttagagagttaagttattagctgtattcatttcctaggctgcgttaacaaattaccacacacttggtggcttaaaacaatagaacattattgtttcaccattctggaggccagaagtttgaaataagggagttggcagggccacactcccttcaaaggctctgcgggagaacccgtccttgcctcctccagcttctggtggctcctggtgtttcttggcttgtggcagcatcacttcaacctctgactccatctcacgtgcctgccatccctgtctctttgtctttaatctccaccttctttctttttctatttcattttatatttttgagacagtctcactctgtagcccaggctagagtgcagaggcatgatcttggctcactgcaacctccgcctcccaggtccaagtgattctcctgcctcagcctcccaagtagctggaattacaggcgagcaccaccatgcccagttaatttttttttttttgtatttttagtagagatggggtttcaccatgctagctaagctggtctcgaactcctggcctcaagtgatctgcccgccttggccccccaaaatgttgagattacagacatgagccactgcgcctagtatttcttttttaagggtaccagttattggatttaaggcccacctgaaatcgagagtgatcttatcccttgatccttaacttgattacatctgccaagactctatttccaaattaggtcacattcacagatactagggtttggacttggatatatcttttgggaggactcaactaaacccagtgtattcacttgaaatgatacagctgtcccaactcagatctttggtttgtgtgcttttcctaccatctgactgttgttatctcaaggaggcctgtgctgatggctccatcctttggggatccttttctgggtgacagcagggctgtcctggctgatctgggtcccctcctcattttccactgcctggccccaggactgtcactggaagtgttgatgctgtgcagggaagaagaaaaccactagagtgatgaccggagggaatcagtgttttctaaatatccagtggtggccttggctgtgctgcaaagtgcctgtccttacaaactcagatggggctgagttaatatgtggggagccatcagagccctgcgattaggccccaggccatcttggggcaagtgccgggtgttggtaagctttgccttgcagcagctgctgctgtattattaatgcgactgcctgcattattcatgaagcatggaaagccatgctttaggttccgcaggactgcccccaaagtcctggctaaaggctcccctgcttgagatctggttcaatgggaggagggacacaggatggacagcatcatttagatttaggatgtgccggtctttgcttcttgcccacctcaccatttgaatcctctcttgtccggatataaagacgattgtggatttgctcagtgggctgtctagggtgtcattgttttaagactcaaaatgttttctgctgtgtgtgtgtcttgttctcttggaggaaagtccagaaggatggggggaataccccacagttcttttgcagtttcccataaactcagttggaacaaaggaccaggtttcaaggtgcatcccatctgctggatcaggtcctgtaagcaggaccctggggggaaaggatggaaggaagcagaaaatttgtacaaagcctttgcctggcagcatccttggcacatcccaaacatctcacctaattctctggccagcctcaggacattctcatgctgtctgcctttggggggccatgagatgctgggatgtgcagcagtgcagggaccagacaggaggcagcacagcatcaagtgctgtgtggcttgcggcaatgcagccaagcccctcgcctgtctagtcttttccacccaggtggataatttgtatttttacacctacttaataatgaatgactgcatcttgtcaagtgagcagctgggaaaaccaggctgacctggttcagttcacatatattcaagcatctggaccctccttgtcattctagcagggtggccaggcctctccttgcagcccctgcagtgtgagcccacactgctccacctcctctggcctatctttcctgcatacactgggcagctcatctggccttctgctcttcttgtcatgagggttacgtgaagaaatgcgtggaagacatttagtctagtgttggcactacggcaagtgcgatgctaatattatgatcctataatgtctattatgttcgtctcattttttcctgtctaccttttctcttttctgtgtctcatgtccagctacacagacatcttgacataaccccaaggcaacacctccaaggcttcttgacttgatccttccctttccccttctaggaccttggtctgtccctccccagcctcacccccatcccaacctcattcgtaatgtgtcctctcttcctttctgctggttcttttctttctcttctgttttcaaccaaagacagttctccctgccgttgatttcctgtctcttggagcttaaaatcttggggtcatcttttgctttttcctcttcttttatcccctacaaagcaccacgtaccattttgccttccttgtgatgttaactggatcttctcttccctctctccagtttttcccactccactctaggcccatattaactaggcagcagttctcaagtggtggtccagggtgtcctgggggggccctaagaccttttcaggagacaatgaaatagaatctgttttcatagtaacactgagccattatttgcctttttcactctcatcctctcatgagcataccgtggagttttccagaggccacaggacgtgataacatcattgctctgatgatgcatggagtttgtgctaatgtattctggagttttacatctttctcagtgttaatttctaattggtagatactgatagatatgactcacataaacaacagctctttgaggccgtcagtagttttgtttgagagtgaatggagttctgaaaccaaaagtttgagaattgacctggaccctgccagtctatatggtgcctatgtgtgagttagaaaagatgccccatctgggtgcatgtagccacgtgccagggttacagctgggtctggccaagagtgtacagagtggattttatcctctgtctatccctttggttgagtactttgagaaatgctcaaactacacaactgtacgtgttgaccctgtgtttataagcaatcttaaccagcttctcaatctctagttttcctcctctccagcttatcctatacactattgttggatttctctttttacagacctctttgttcacattgttctccagttctagaggcctcaatggttttccctgcctcctggatgaattccaaatttcctgatgtggcagtaaaagtcctctcttatctggcttccactcgcccttccagctttgtttcccagcactccttgacacattttctgtcctgctaagcctttcttttctgttttcacacctcacctacaacttccctttgcctttgttacttccttctacttacccccaccccccacactccccccctcccaccccaacatggtctttgcctatatgagctcctgaagtcagggctcctagcttgctcctctctgcttctctcttgcacccagcaatgccttgcacatgacagatggggtggagagtgcatgagttttgaagtccagcacactgaggtttgaaactgtgctgtcttgcacaccagccaaagaccttgcacatgtgacttaacccctccaaacatcagagagggcccctccctccttgcagttctgaccatctcccagggttgtcgtaagaagcaaatgctcagtaagggttagttctttcccttcacctttctgacagagtaccatgtgcagagagtacttttaggctaagaggatgataccacataggggtatttgcacattctgcctccggtgtcctagtaactagaaagcactgattcttttccccaggagcctcacgttttcctgaaagctgattaattttgatgcatgcttaactattttggagttttccagttgtcaaaaatatcctaggtcttagtgcggtgtgcccaagtgcccctccctctggtttccaacagattcatctccttgatggtccagaaagagaatcatgtttcctctaatgatccaggcattcagatttatccggtgccctttactctgagttttggattgattaatgctgttcattgtctccttaataatcccattgagaggggaggtgacttgcttcaagtcataaggaaaatcagtagagaaggaagtccttgaaggtgactcttcccctatcaaacattcttcttcaccaggctgagtgctcctggaggacagggactgtcttcttcatctctgtgtcagcagcactcagcccatggccaattatggagcaggtgcttattaagaatttattgaatttatgaaagaataaagctggtcccaggatgggctttgagcatatcttggaaatagataaccacctactcccccagggacagtcagtcagtctcgttctctctttttctctctttcctttaacaagaatttatatgccaggctcagttctaggttagggaatgaacaaaacaggcaatgttgctgacctcaatggagtttaatttttattcagggagacagataaacaaactaattaaaaataaatatttaaagtgatgccagtagtgataaattctagaaagacaaatatagcatggcaagggactgggcagtgttagactgagagagccagccttgtagagatgttgggtaagagcttggcaggcagtggaaacagcaagtgcaaaggtcctggggtaggaacaaaccagtcaacaggtgaccttgcagacaccaaggtcagtgtggctgaagaggaggagggagtgagggaagatgaggtcagagatgatggagaatggtgcagattatttagggctttgactttgattttcaatgagatggaaggccattggagggttttaagaagaggagcatctcgagctgatatctctctcttttttcttttttcttgagacagagtcttgctctgtcgcccaggctggagtgcagtggtgcaatctcggctcactgcaagctctgcctcctgggttcacgccattctcccgcctcagcctcctgagtagctgggactacaggtgcccaccaccacgcccggctaattttttgtttttgtatttttagtagagatgggggtttcacagtgttaatccggatggtctcgatctcctgaccttgtgatcctcccacctcggcctcccaaagttctgggattacaggtgtgagccaccacgcccggccgctgatatctctttaaaaggatctcttagacagttgcatgaagtgaggtggatttctttattttttatttttgagacggaatctcgctctgttgccaggctggagtgcagtggtgtgatctcagttcactgcaacctccatctcctgggttcaagcgattctcctgcctcagcctcccgagtagctgggactacaggcgtgcgccaccacgcacggctaatttttgtatttttagtagagacggggtttcaccatgttggtcaggatggtctcaatctcttgacctcatgatctacctgtcttgacctcccaaagtgctgggattacaggcatgagccaccgcacctggctggatttctttttttaaaaaaatgagtttattgttttaaaactgcaatttatggacttacaaggatttttccacttcttttgtaaccttgttaaatcccttctccccttaatccctgaacaggtcgggtcccccttgtcctcatagccctgggagggtcctgggccatcttcggttcagaggttcccttcccctctctctttgccgacaggcagttggagcagaactttttcaactgcagctgtgacatccgctggatgcagctctggcaggagcagggggaggccaagctcaacagccagaacctctactgcatcaacgctgatggctcccagcttcctctcttccgcatgaacatcagtcagtgtggtgagtgagtggccgcctggcccagctggctccagggaggcatccctcagacaccagagatggtgctggacgttaccttgggatgccagagccttcctttcgaaacgccctcccagccttgaactctgcagttgtgtgcagacctcctgactcatcattccccttcttggtcattcctgtccctttgtgcacgagccataggaagactggtttcaggaattcacacaggagttaaatgtgctccttctcatcacaccagattccctttctccctgtgagttacctgtcaaccaaacctgaaggagtgtatctcaaaatgtggtctctggattccctatggcagcagcttctaaggagtttctaaaaaagcagatttctgggcccaaacacagactttgagaatgtctggggatgggtcccagaaatctgaattttaagcaagctccccattgggagactgaaacactactattcagataaccagagcccaaagtgtaatgatgccattgagcttaattgccagaaatgcattccctaagcactgcccccaccccgcaacctgccgctgcaatgtgggagactgcaactgcatgggcttcaattctgagttctgatgtctactggggaggtgatgtaaagcgtcttggatttgcgggtcttccaagaactcaagcaggtggtgttagagtcattactgggcaaggcaagaagtgccaccatcagccccatggacagagcttcctttgggtagtaagtgtttgcctgtcttttcacccactttgtctggctcccagaccttcctgagatcagcgtgagccacgtcaacctgaccgtacgagagggtgacaatgctgttatcacttgcaatggctctggatcaccccttcctgatgtggactggatagtcactgggctgcagtccatcaacactcaccaggtaggcatcctgggcttcagccccatcaggaggctagggagtgatcacactgtagtcttgaagaagagggaaaatttgcggtcttgttactataggaaaaaacacatagacttgggttacatgcagctgcaatattttctagccatttcgctctatacatgctactcaacttttctgtaacttaggttttgcttctgtaaaatggccatagtactgaactaccgttcacctcatagggttaataggaggatggcctgaactattgcctatgaggagcctggcatttggccagtgtgctttcacacaaagatctccttcgccttccgctcagctttccttttgattcctaaaggtatttggggattaggtagcagagccatccttgtagaagctatctgattgttatctttttattggggttttcagaccaatctgaactggaccaatgttcatgccatcaacttgacgctggtgaatgtgacgagtgaggacaatggcttcaccctgacgtgcattgcagagaacgtggtgggcatgagcaatgccagtgttgccctcactgtctactgtaagtgcatgttattgtgggggatggctgtgtgtgaggggcaactggcataggaggctggagaggggccaaggtgttgtcaggggtgagctagagcagtgagctgatctaccagtagggacagaaggactcttgtagggcaggactgagaagtaagtccttggactaaaaaccccagaaagagcacctttgtccctcagaagatggtgtggctccaagtcaactacatcttcaggacacttctaagttggcctattctgccttttatgaaacccctaagaggtcccaagagggagccctccagctaaggtggatctaggaagcttgcataaagacagacatctcttcccctctgctgggattgtggtgggacttctgcttccctcagccttttcagagtgggtggggaagaaccgggattcccattttagttgctggaaggctactgcaggaggtggtagactctgtgtcctggatttcagcaggcttctcccttgacagatcccccacgtgtggtgagcctggaggagcctgagctgcgcctggagcactgcatcgagtttgtggtgcgtggcaaccccccaccaacgctgcactggctgcacaatgggcagcctctgcgggagtccaagatcatccatgtggaatactaccaagagggagagatttccgagggctgcctgctcttcaacaagcccacccactacaacaatggcaactataccctcattgccaaaaacccactgggcacagccaaccagaccatcaatggccacttcctcaaggagccctttccaggtgagggcagcgtagctggatcggaggtgtatggattctttctacaagcttgggagatggggcatggtagcttgagaggagaagcagcatcagtactcatactgttatcatgggcaacaaaacacacactggaacatgtgcaaccaccagccgcatctggtataaacaaggatagagtctccattttccaatagcagtcatggtaaccaagacttcttagaaataacagttgtgcatgttagggcacactgtatgatagtagagaaagcagagacagtaatggtagagaattctgacccagccctttacttgtggggagactctgggcctgatagtttgcttttctaagcatcaatttccttttctatgaaatagtcatgattacactgctcctgtgacttttaaatgagtcaaggtatataaagcacgtcacagggtttgacacctgatgatggttccgggatttcccattgcaaaggacttgagagtgtgtccagtttaaccctccatttaacggatgaatgacctgatcctcattctacttgctgatctgtgacaaggtttgacttggatctaggcccccaggtctgtggcttcattcctctcttgttccatggtgagctactgtgggtcatacctgatgccctcagcttatgatagtgctaatgtcaagtggaccaggaaaaattattgaaattactgaagaactttgcttgatttgattttgggagttgattctgtctttctctgtctgggctaagatgctttaaatatctccctgaagttggaggagaaaaaaacaccaaaagagtttagtgaaagtgattgtagcatctttttgtgggttccgcaattgataagttttgcccataaagccatgtgtctttgctgagcttggtgcttcattttgggaagtgactaggagacctttggtcttcaatccctaggaatcaggagttctaatgggatacagtgtaaaaactgataagacacatacacacatgcacatgcatgctcacacacgtgcacaaagggaaaaggcagaaagagctagcagtatgtagcatctgtttttatgaagtcaacttcacagtctacaaattaccagggtgtggcagctccaggaagctttatttatgtcagtgcaagggaactcgtactggaggccctgagagtaaagtcggagaaatgtggctgcattaagctaaattcttgccgttgaggtcccagggatgatggagccgtcttttcggaggcagttgagaatgtgcagatgtttgaggccctggaaatcccatgtagtctgaaacttccatcatccccagaatgctcagtaaaagcccccatgacacttcccctcctgggtcacactgtgctctctttcagcaggtagatgagtcctggcctgcacagtggaagaagaggcttttagagcagagatattttgctcttatggtctacaagggcaggctaggtcttgttgacataaaagactgaaacgttgccctgcctgtggcctgattagagaataaattctgtttttaaagaggaaagtctatacattgttgagggaaagtcttgattggtgaggaaatgaagcaccctgaagcaatgtttctgtttccaaagagaagcttctggggcctagggaggggggaaccctagaatgctcaggagggaggagaagacactctggctccttctgccaggggtatcctgagaggtgtggggtagcagcagcagttggatgatgtggtggatacagcttctccgttctctcctttgtctcaggaggaagcaatactttgcgtcttctcagccctcagagctatctcagagatacctcctctgcccccacgagatgcagcagccccttctgttagtctctggatacccttgtcaccatagtcagttatcagtgctcctcaggccagtggttctcaaaagtgacctttggtccatggaccagccccatccacctcacctgagaatgtgttaaaacttaagttctcaagcgccactcacatctacggaatcagagattccagggtggggtctagcagctatgttttaacaagcccccaggtgactccagtactccctcctttgcaatctactaccctggaattgagtgggaatctggccccaggaggatggagggaggatagagtcacagagaaactcaaagagaaagcacctcacctgaggtcatttcctcagacccatctccatcctgctagggtcaccctgtgggaagatttgcttgttttgtgagtctaggttaaagggatcaatgggtgatgaaaaggcagtgacagggaaacgatgccaagtgacaagatgcttaaacgctcaagagagtcaattatctgggggtgcaggaagagatgagtcatagccctctaaaccgaactcaccccagctaagcctagatgcaaagctggtctgtgattcttgctcttctcttttgatgtgaaagtgtggagacatcgtgattatcatgtgtgtttctcttttgcttccaggcagctaagcatggaggctaagagcaggcagtctgaaatcagacagacttaggtgcaggtcccatctgtggcccctcccagatagccctcccatctggtggcctgggctcctagcatggggcttagtgcaaggccagtactagatggaggacaatcacttctctgtgcctctatttctgtatccatgaaatgggaatgataatatctcccatctaagctaccatgagacttaaaggaagttatgcctgccaagtgcatagcagtgcgtctggacagagaaaaggcttactagctgtgggccattgttaagattcttaggatgtagagctgagatgaattcaagagttctagaaccagtagtcattttctggtcaacctagtaagttctaacagataatgttaaggtagtctaggctagttgtcatggaaccacgttgccagggctctgactctgactcaatcacttgtcagctctgtgacgtcaggcaaattgcttcaccttcctgcttttaccttaaaggttgtggtgaagattaatttacagaaggggcgcttcttgaagagttatggtctgggactgtaggagacatgtgtattcccttcatggcacagccccagttcatgtccagattgttccttggtgtgctggacaagcgctcctcccagcctgctggtgcagtcagaggtgaggaccagtcctgggtaccatcctcttccaggctgaatgcctgaaccctcccacaggttagagaggagtcaggatgtctccttcttccaaagcttatgtgctttctggatgtataaatgcttccaggccctggcaaaggccttaaacactcataggctgatttggagataacagggttcacagacttgaccaaaacatttggctaacgtgagaatattctctaataaatgggagccttatgagacatatgcaaatgaatgtaaactgcgaattgatctggcacctctcttctctcaggctctgaaacccaggctagagcttccatttcctccatcctccccctgccccagtcaggcttctggtcacctgctgttgagaagagggtgttggcacgaagggtatgcccaggaatgtgaagatagttctgtgaccatcccccaaaacaatacagaacagacaacaaacaagcaaccgaactgcgtgtaccataagtaaggctttctttgaaggactccatcacagaaagtatccgattccccacaagtagttagagaatatctgctggttcatacttaatagagctaagactgtgagggcccgcaatgagtgaatgaatgggtgaatgaatgaatgaatacacttttacttttcagggcatggtgggctgaggcaggaggctgtgtagtattgatatagtgcattccaaagggaacagcagcatcagcgtctgctgaaaacttgttagaaatgcaaaatcttgatacccaccccaggtctactgaattagaaactctaaggtgaggactagtaatctgtgtttctttttaatttttaaagatttttaacttttcattttgaaatagtttggaattcatattttaaaaagttacaaaatcatacaaggcacttccttccaccctttgtccagcttccccagatgttaacatcttacctaaccacgatgcaatgatcgaaaccaggttgttaacattggtccatcactattatctagtgtacagatgtgaattacatttcatcacttgtcccattgatgctttttccttgtctaggatccaattcagaattacacactgcgttgagttcctgtgtcatctcactctctttaaatctgggacagttccctagtctttgtctttcatgatcttggaactttgcaagaatactagtttttttgtagactgtctttccatttggaattttctgatttttttcttaatgattaatttctagctatgcatttttggcaggaactctgcagaagtgatgctctgccctctcagtgcatcgtttcgggggcgcgtgatgtcgataggttttggtactgggggtgttgactttattacttggtcaaggtggtgtctgccaggtttctctgctgcaaacagatgattttcccctttgtaagaaatcagtataatatttttaaactacataaatagcttgtttctcatccttctttcacactctaacattcattgatgattcttgcctgaaacaattattactgtaatatttgtgaaatggtgatttttctatttttatcattccttctacatttaaaaatcagaattctcttgtaaggaagagcatttcattcttccaccttttatttattgaattgtttatttgtatcaatatggactcatggatatttattttgttctatggctggtaattcatgtattcgtttgctaggaatgtcacagcagtgaaataccatagactgggtggcttaaacaacagaaatttatttcctcacaattctggaggctggaagcctgagataaaggtgttggcagggatggtttctcctgaggcctgtctgcttggcttgcagatggcagtgttctctttgtgttgtcatgtgattttccctctgtgcgtgtgtgttgacgttcaaatttcctcttataaggacatcaaccatatttgattaggactcaccctaatggccttattttaactttaatacatctttaaagaccttttctccagatagtcacattctgaagtactaggggttacagtttctgtatatggattttgggactacataatcctaatccataacaatccaggactatcattgttttgttgcttaaatgatcctacatttggctattgagatcccctgtacattggctcctgtgccctgtctccaggcctccattaatctttgagcactttcttactttttagtattacaagccattccaggcacatgttgtactttccctggtccggccctgaaatcatccatttctccaaggaatcctcactccttttattggatgttggtagcaatcaccatctgggtgcttctgttgtgtgctaaagtttgagcatttctggtagagtgggcaagagcctggacggagatttgaattcagctctaatttcttcttaaatgagtgacatccaattagttacttaatctgtataagcctgtttccttatctgttaagtggggataatgctaccacctcttagaatggtaataaggattgagtgatgtgctacatgaagcatttaacaccatccctcgcttataatcaatgtgcaataaggattagctttcattattagttgagctatttctagagaccaaagatcaaataacatgttaccatctgcaggacgggcagattctagagggattctcaagaacttctcagtgacctgctagaatcaactctgcatattactttgaataagtttatcttgagatcatacctggcattttcaaagaatgtctaggggagcccaccctgtcgccccattcccagcactttgggtccttaagaaagcagagctgtgaatgagacagagggtctagttttaattccctatcatctcataatgaacctggtttggtttctcgttcctagatgggccacctcccttgaaaccaggaactttatctctcattccttctccatttggaggaccaccccctaaactggtagtgtagcatggggagacgggtgatgtgccatgcattttagtttgtcagttgccatgagaacagggaatcatggtgaatgggagagatcatagctattaggaccaagtagtgtgtctgttctggtttttattaaatttgttaattatctctttgtcctttttttgcagagagcacggataactttatcttgtgtaagtctgctttacctgttgctttgaaactgatttattctgatactatcggtaactattgaattcaaatagccctctctcctattccacatcatccctggcccatggcagctgagggcatctgagtgaactgtgaaagggaaatgaagggtagcaatgctttttaggcagttccaagcccacttttcttgggtaatcactctgtggttcactatcccccagggagttttctaatgtctgatgatgttgtggatctctttacctggataaagaggggctgtgtgaggatggacatgggtttcatgtgcctcaatagacccctattgatcatcttagttgttcttgcagagagaatatggaacctataaacctgctagtgtttctcacctgcttcaggagcctgagcacttggccaggactcgcctcatgagagcttgacttacaaggtttcctgataggctcatgtgtcctcagaaggaattattgaggctcagtttataagtgatttggggctagggctagacaatcctaaaagaatttggggttttgtttatggactgtagggaaacctgtgtttattcctttttcttttttttctccatgggaggtgggaataatagcagcaactgctgccatttttgcctcgtgtctggcttgagataataggtgctgtttagaaacaccctcggctttctggcactgatgtcaatatctgtgatttctttagttgtcttcagccttagaggacttgtaatcttgcagaatattccttcagagaattctgaattggggccatttcttgtcaaggaggtgattctagatggtggagtgaggggaaaattgatacttagcttcccatcctggccttgctgggtaaaggtggtgtttcccggtcagatggttctatttttttaacttaagctgcccttgtgttctgaaatcagtgttaggggaatggatagtgggctgattgatggatccccaggcctcctggatctcactgaggagtaaagaaggaaagagggagggcacaggaaaggcagggagaggaaaaggaatgcctgtggcaaggagtagcagaatgtcagcaacagctgccaccaccagtaacatttgcctaatccagaccctggccaggatcccaaaccatgtttctttttttctgttctatagctcatggcccaagttgcccaggttatgttattttctctggggttggggcagggaatgggactgaatgtcctttattcctatggagcctgtgcttgaactgtaacaccagccagatggtcagataggaacctggtctgtgggggtggggggtcctgcaaagcctggggaaggcagactgcaagagcctggctttcagaggatgttctgcagggggaagtctcaagggagcttgggagttgggcagggactgtggctgagcctccccagccgggaagctaactgtcctcctcctttttgtgtttggttttcagttgacgaagtgagtcccacacctcctatcactgtgacccacaaaccagaagaagacacttttggggtgagtcacttcttggtcaagaggagtgtgttgactggcatagtcattttcagacttcatttgtgttgctaacttttccaaatattatcttacttgaaactttgaaaaaaaaaagtaatgaattgaactacgttcaggcagtttaaaccttccttgttggatggaaatagttcattgtttgaggaaatgtttgacgatctgctccaagccctagggttcagaaaatccccagtctgttaggagcccagctgggcctgatttgcaggggctgctaactgtacaagtttcctacaaaaggccaagttgctcaaggcatctccttgggtgtgttttcaagcgcccactcctactatttcagagcctaagattactctggggaggaggagaaaggattctttttagaatccagatcttttcgactttcctggataagaatgttatataaggaattttaacatgaagatgcagaattcacttgctaattaaaacaaaatcagacgcctctctaggcttgtttttgcatctgttagaatggccccaggtgagaaggggctcagaacattgaatcgtggaactttctctaatcaaattgggtaatttatatacttttaaatgttctaagggtctcatatatttcttcttctaaagaccttactcagtattgcagttctgagaaggctacaattactatggcagtaggactgttcttatctgggcacacacattattttcaaggaaattgggttttctgtgattgttgctgactctctgtttctggttcctcacaggtatccatagcagttggacttgctgcttttgcctgtgtcctgttggtggttctcttcgtcatgatcaacaaatatggtcgacggtccaaatttggaatgaagggtaaggtgggagtttcattttcaagggcgtcatggggggaaacattactgcttttgatcaaaagatactgttttaatctcccattgctctctgagagggcctccggtcatggggtctaactggtactgatggaaactcctgtttgccgcttgttcttggtaattatggattgaaggcagtgttgggatctgtgggaaccaaactgtagatccacatggttttgctttgactgctgataaacattgcttagaagggcttatgcaatgaggataatttggaaaggaagttggatttcagggcaaatgaagacggactttggtttattttcattacgggtgagtaaagggactcctagtttgaggacacggttttcctcttgtttttgaagttgtgttgggaaggcgtcagcacagcaagatgtagggtagactccggcattgaaaagctgcccatgcaatgggatctcagcacgtagctctacacagagtcccagagtggatgccaagagcaacatgatttctaaatctgctggctggcttccatgacatacagtgctccactccactgtggcagggtggggtggtgggatatggctctttgccaaggctcgggtaaggggactggcatgaaaggggttaacatggtgaattagcatccacctgcctggtctcagagatggatgtgaccaaatggttcaagagaggctgggtaccagttccaaaacagaaacttgaatttcaagatatactcccagctggggtttccatgtttggcgatgttgggtgggggtgggtagggaggcatgatacgaggtttgataagttatcagtttgctgagccaggactcaggttggtgttatctggtgagactatgggatgtgtagagagatgaatttctatggattctctgcatgagcttgtgtctgtggttggggaccttggggcttagggactgaagaagagtacatgaatggcattcacagggacggtgatcctctgagttgtatgcaaatgttggagtgtttgcgcatggaaccgaactagtccatagctttcgctatattctcagaaacctctgtaactccttgaaaattcagaacactgatatatagggaaatacccagagaggattagaagggtagaaaaccctgtaaacccagctactcaggaggctgaggtgggaagattgattgagcacaggaggtcaaggctgcagtgagctgtcatcacaccactgcattccggtctgggcaacaaagaaagaccctgtctcaaaaacaaacaacaaacaaaaaatgggtacagggtgccctgtttccagaagatttctgcctttgcactctctgctcttgatgaacctgatcaactcacagcaaagcaagctagtttttcttaagtcatctgagatattttgaccaagagaaagacatgtgcaggcaaattataaaggtggatggaagtttggctggaatccagatgacttaaacaaaatcagaccacttttaggcacctagattggagatgtcttatctgcaaacacaacatgccaaacaaggctttctagatctagaagatgagacgaccactgagtgagcgcacagctttcaatctttggataattcttgggctcctggttttgaggactggcactattattgcctgtgcaaagttttcctaccatgcagggagcttttatagctcttcctccttccacctgagaaaacatcagggccttgaccaaagggaagaatggggcattgttgctcttcccctgaggaggcgcaccaccagctgagaccctgcgacatgcttggcagtgctgtaagagcagatttttcctattaattgtcatcctgtttctggaacagcatgtccccatgtcggatggattaggcagcacccagggtggttcctcccctcagctgtcctcagagcttctcccagcccctgctcccctctcccaggcagaccttcctttcttggccctggttgggtcaggagaacatgtccacgtaggtggaagtgaaatatcctctattgtaaagtcgggcaacttaaagtaagttatactggagttataggcaagatgagatggtgtatctaagactcaccttgtttagaattaagcctgaatctctttcatctttatgaagccagattatgtttgggtctcactttaggataaataagtgcaaaacaaaaataaaattctaagccccccaaccatccgaatgcatccctcttctcaacaagggcatcccaaagttaacctgaaaaactagttcagaccatgatgggaagcagggagccatacatgcctcattaaaccctccttctttttggaattactgatagaatagactcgttaagtctgatgagaaacatttgcaatctattctgtctgatgcctgctacctggaggcttcatctgcatcataaaaccttggtctccataacctcttattgaaccttcctattgaaaataactctttcaaccaattgccaatcagaaaatctttgaatatgcctatgacttggaagcccctgcttccagttgtcctgcctttctggtcggaactaatgtacatcttacatgtattgattgatgccttatgtctccctaaactgcataaaaccaagttgtggcccagccaccttaggcacatgttctaaggatctcctgagggctgtgtcacaggccattggtcactcatatttggctcggaataaatctcttcaattattttaccgagtttgactcttttctttgacataagcaaatgcctcaagctgcattaacctttgatcttttattgccagcgagcatcacagtcttggataaagagtgatgacaccggtaccagaagttccctaccttttacttagggaaagccttgtctcttcacatccaccccagtctcagttttgaattttcaagtctgggtgagaatgtacgataccacttaattgctcattggcttcagcaaagttactaccttctcagtgcctctgtttcctcaactccagaatggtaataatactacctccctcactgggttgctgtgagtgtcaagatctatgtgtaactggcatataaaaaggctccatgggaacatttctcccttcttttctttatgtataaaccttcataggttccttttattgccttccaaaaagggctgcccatccaagacgcaatcatgccctcttttgtcctgcacaatatttagtaaaatgcctttattatacgctaatcccagtacattgtcatttctttgctggtagaccatatgtctgtcctacttgaccaggagcgacctatggcagaaatcacagatcactcagcctagtatgcctgaaaacaccacgcaacatttgacaattgcttgttgaatttagaaatgaatgactttaattttaataataaaaaaagtacagcttataaattaacaatgggctagttagagttaattgggagatctgagatgtctgggcagtgggaagtagagagatgatgatagggaaaactcataaacaattccccatccacatctgagggccaggtgtatcgatagggagggcctactaataggagctttacttccttctgagaaataaaaaaaatacagaaaaagacaaagattaatataacaaacacccatattccctccacctagaataaatgacttactgttttgtcttatatttgcatttactgctttagtttgggaagatataaaatatgactaaaactaaaacccctttagtcatccccctggtcctattcccatccccatctccataggcagccactagcctaagttcagcatcctccagttcactgactgaagcttctttccctgtatctctgtctctgtgtgtctctgtcagctgtctctcccctcatggctgtctcccagataaactcacacctcccagactgccaaattagcaaccacctctactacatgaaagatgagtggctaaggctggtaaacagttcattttcatacttctacctatatgtatatgtacacatatatgcatatgtctctgtatatccatatgtagacacacagacatgcatatatatcagtatacttacaaaatgcattactctgtgagtgttttaatttatattcatgcttatactctgagtaacttgcatcttgctttatttccttgtcatatgttggagatctctctctgtcggtatgtgtaggaattccaatgggtgcccattttatgggagatgaatatattaaccagatctcctagaaacaaaccgaacatgctttgtctcagagccctccaactgccatgttgatcaaaattttggcttggggaaggggtcaccttgggacacaagctcatcttcttttggaatcacaaaggttttaagatggtgctaagtgtacagtgggggtttctttttgctattgatgaagtctaatgcttcagagtggcaggggtgatttgtgaagtatttggcatgtcctgggcactgccctatcagccagccctcctgctggagcagggccctggaggtccccactgtgctagacattaactctttgattgtcagatcatggggtggccagggtggttgggaggtgtgtacttgtggggttcagggcatgggctatttactgcagctacagaaacatataaaaatatttcagcattttaacaactaactagagtgtacccttgcatcctgggcctggaagtgagatggttcagaatttaggacaaattcattctcataaaatattgttaaattaggcattaaaagatcatgacagtgatctggctgggctctcctgtatccgtatttccaggtgaagaaaccgaggcccagacaaggaagtgacttgctttggtttggctgagttttagctccaacctctttccacagcaacacaaatgccctgactcctttgtcttggctgcacactgtccacatccatagtgcaccatcatcatttcacgtcgtcattagaacaataaccaggcaataggtgttagtgtgtctgaacaataataaaacttgctctgtagttttcatataaggtgagcatcaaaattatttaatagaaagtataaggtgagcatcataattatttaatagaaaaagaagcaagtgtgtggatcttttgcagtctgtaaaaaaaatacatacattatttggcctcttttcctcttgaccacctcataagtatctttaaatacttctagatcagagatactgtgagaattacttcatacttcttggcttcctcttactcccatgaagaaaacagaataatagtttatcagagctgaaacagaccttaggcttattaggctaatgtgcccattgtacagctaaggaaactgagacccagagagatgcagtgatgtgccagagcacacagctagcgagagccttctggccctgcttttccacatacttgacttgtgcagagaacctgggagggtcagggaaatgaagctggattatgaatacatcagctcaatccctccaaggctctgattaattaactttgaatgctgtgccacttaaatggggctttcgaaaattctcttattaatccactttttccaacctggggcactcctggccttggggaaagataggagctgatggaggagtaggctccaagaacttccttcatttattttcagacatgctagagactgcacgcgtggcaggacagcggaagtgggaaggccgggaaggaagggcatcaagaactgctgcttgggcttccggcaatgccttaagtgcctcatcagcaaccacttgcctttcttcctaatggctggatgtgtgctggtgcctctgatgggcctgcggatgagcacttgcaggactgttccattgtaaattagcgttagttaataggtacttaaagtaaagtggttgcctatttgattatgattgggggttattaacatttttttccataaacagatggtaactgtcctctgagtggattgtagaatcctgccagagtcttgatttggagggactggctcctgccaaaagatctcaggggctgctgccacattgaacattcttgttatccttctggtttcaccggttgtctaagggaatgattagagttgggaaggagtcatttctgccttctctcctaaccttggggcattggactgagaagggtttcttccaggtggagggaggtaggggtgggagggatctaggactcctgagttttgatgctgtaggttggcatttctttctcagctggaacagagtgtccctatgtcttagccatgtgtgcagagcaggggaattggtactggaagtgtggtgtgtgataggagatatccgaggtgactgaaagggggctgggaccatggatgaaagcactattggtattgttgagtaaaatagtttctttcaccctgcacaatacacttatttgactacatttagcagggggtcgggaaccaagagcagtgcaaggcggaaatgaaactgggtaaaggaattgggtttcctggcttcccaagatgtgtccattctttgctcctcctcgttttcttccttcttgacttctttttctatttcctcctctgaattgacatgtgcaagggaggagggtacctttggcccttgccatgatcctgtacttgggattcctggtgtaagatgactctttgaacataatgttgagagtggtttctggcttctttcctgtgttgtgatcccagggtcctcgtattctcctaacaaatgtttgcatgccctccctctcttttctgacatttgacagaccttccaaccaccccgcttcctcaaaaatgcctagtatttgacaaattctaaattaaagaggttaggtttgtagcagatccacaggcaggacataaatttatagaagccaggggtcttctgcgtctccttctctgctttgaacttcaatgggaggctctgactgcagacaaaggcccaccccacttgatgactgagttctagaatgtggtgcttggagctttgagaaggctgtaaagccatgtgtgtttttctggcatgcttttgctgccctgtcctttgtgggagctttgcaggggtgcagtgaatcatcatagaagtccctacacggtcaccattggtcgtgtggaggctgaacttgctctgaagactccagggaaccaactgttcccttgcatcgactctcctattcaaagggaattcccttgaaatagaggctgatgcaaaatatttttcctctgtggctacctgctagctggctcttcttggcaggcctctctatcctgttcagcagggccaaggatgaccactatgcttggctctatagccgaagtgatggcatctcagattcattgagtgttggcagcagagcacagtgcttactgactcgtgttgttgcaaatggctcccacagggttaacagccccgcgataccttacccagtttagacattctgcacctcttgtcccttgctactcatgtgacaggtgagatcacatgccttatgccctactgtggatgtcaccgggctttcccaaaagtgctggctctcacagtaattttacaccttaggaaactataacagaagatgagttagtaaatgagattttaaaagctaagaataatagtaaattcaaactgatttttggcttttaaaaagtcacaaactttagtaatttatttttcaccaaaaatcatggtgacatacttcctcactgatccagttatcctacagtatcatggtacaggatggaaaaccaagaggggctggggttgccagctttgactttctagcatccttctttgttccaaatgttttttaccccctgtaaagtcaagttgtggaaactgctccaacagaccccctcctctcttctcatggaacattctttctctctctgcatattctcctctgggtcttggaagctttcacttgcgcggaagaggcatgatgataggctttggctaatgagaagctgtcatgtggctgcagtacccaagacccgcgtttatgcagctcattctcctgtgaactctgcagagggctttaggatggccaaagagcagccctggaaaccaaagacagcaaaacagagagatcaaaacaactgctaaccagaaaacatgtttttggactagggaagaaaaaccacatgctgaaaacagcagccaccaagccaacggctgcaaatccccggccccagctccttgacacccactgccctttgtgctgtggttcctcatggaggataagctgggcaggggagtagagaggagtgcactgcaggtggaggaatagcatccttcagccagctgtgcttccagcaagcaggtgtgtctgccacctgttccagggaaggaagcagaagcctgaggctggtctatctctggcccttgcactcagaagggttaataacactccctgtctctcttcctcactatcccagcatacttagagagagaccaaccaagtaactctggtgcctgcttctttattgttttctcttggatgaactctgttaccacaagccagagggaaacatgctgctggcttcctccctaatgggatcggctacctaatttgtgtggcccagtgaaaaatgttcaaaaaagattagaatttccagacagctacagcacagcattaaatcccaagctaaggttcttttgagcacagagtcaggtcacaggtccacgaagctagctctgcttcctgaatacaaaatccatcatggcttaagatcctagctcctttgtctatcctgaatggtgatgaaacaggtatttctgtacttccttttagagagaagctgggatttgggcgaaagacaagaatatcagttggtttttcacttctaatcatagtaggggaagagagtgacaggcatcaaacattcattgagtacctactgtgtgccagacatctaatatatcttcaaatatagagacttcataggtggctattattcccactttaaagatgagaaaactgctcagaatggttaaatcactcaaggtcatgtacctggtaagtatcaaaactagattttaaatgagtttattctaaattgttggttctcaatcttagctgcacattctaaacatctgataagattatataacttcccaaacctaggccacactccaggtcacttaattcaggggtgggtgttcttttttacttcctctggtgatttctatgtgcagctaaggttgaggaacaatggtctcaatccaatagacgtccgcatatttcactggctctccaagtcatttatgtagtctgcagaccagctcatctgataatgctgggagcttgttcgatgtgcagttgcctagggtttaccccatacccactgaatcaaacttggggtgattggggtacaagcaatttctctgagtgatcctgaatgattgctggggtttaggaaccaccatcctatatctgtagagagacaatggctgataacatgaacggtacttctcaaacttgaacatgcaagtgaatattggaagattctggggatcttgttaaaaatgtggattctggttcaataggtctggggaaggctgcgagtcaacatttgttacaaggtcccagacaatgctgctctgtggaccatgctttaagtaataaggggtaaagttactggtaaatacttcaggcctgcgacctgggaacttagatcacctctctgctttttgttttttcctgagtgccagttgcaaaatgaacctacctcaaaggtctataggctgggattttgtgactataagattacaaactataaccaccatttttttttttttaaatttttgtacttttagtagatacggggtttcaccatgttggccaggctgatctcgaactcctgacctgaggtgatgcacccatctgggcctcccaaagtgctgggattataggcatgagccaccacaccgggcctctataaccactacttgtaaggcatttcagttctatcctctttgggtaaatatgcctctcttctttcctaaaactgtttctatagtggcttccttggttcgaaaccaaactgccacctctttccacatgacgggacttgtaaggtctgctgccccagttgatttcagtaaactgtcaggtcaatcaacactgttgcccccactgaaggagtctgggcagaagctcagagaggctagcaggcagtgggtagccagcattcccagctcagagctccttgagctgctgtgacagtcattcctctctttccttagaaacttctttatcctgtttgctctccctcccacccctgatctggaatgaaatgttgagggctataaaaaaccggaaaagcttgtgctggcaggccccggagtggctcggagtgggtctgtcggtgggcggaggaagccccatgggttaagttggtgggctgcccgggctgcccgccggcctcagagacactgccctaggtggtggctggaatcccattcttcccagtcttgctgctctggcggttggtattcacactgaaagcctgccctgccctccaatttactgcagaataagagttgcatagttggcagaagaccagagcagtttccaggactgataagtcctggaaatgccgagcctctctacctgacaggcatcttgaattcaaaggggcctctgtgctggagcagccctgcaaacctgttcccaggcaggggcagaagaatgccagcatctgtctatctgccagcaggccttgacatgaagccccaaggagggcgtccgggtggttccaggaactgcctttcaaaagtgaatccttccaaataaatggagttcagtgggttagccttggaccagttgaaggaggtgcagaggggcaccctgttgttggcctgggctctaggggaagcaggcaggatttgagtactgttatgagccattatgtgtgaaaatggctgccatagcaccagcccgctgctttgtgcctgctttgcaaggggcatgccaacctgagggagctgtgtgtgctgcttgctgccttctgaggagaagcgctatcagaaatcaggggccatccaagagcttgggaaaatggacactgtttgctgttgcccagtgtgtagaatggggtagcctttctggaaagtggcttgacaatatttattaaaaacctaaaatcacaaaagcccatgcctactgactccacttctgagaatttaacctaaggtaatactcacaaatggctatctgtatttgtggatatgggtatttatcccagtgtgacttacagagtaaacttgataaataaataattacttacagatctaacaataaatgactagttaaatattaatacattatggtccatatatatgataaatacaatgcagaccttaaaaatgacaacttttaaaagtaggtatttaatgtttctgaaaggatacatatgcaaatggtaagaaaacctaatagtataaaagataatggagtaaaaatgttagtttcagtcccttcctaatttcctgccactgggataaccattacttagaggttcttgcatatcctttcagagatagtcaaggcttatgcaaggatatgtttccctgttgcctttgcacaaatgcaagcttgtattcacattgttctgtgccacattatttctgctaacagcctgtctttgagatgagttagtatcagttcatagagatctactgcattctatttttatagttgcataccaagaatgatattttagcaatatgtattgacatgtgaacatgtttacaatatatttccaagtgagaaaagactccaagcagtttctctaatgccatttttttttgttgttgtaaaataaagagaaaatatttttatacacatacctaggaaaaatactaggatcatatggaattataagtcagaatgtaaacagtagttatctttgggtggtgggatttgggatttttttaatttcatcttttttgatgtcttctgaggtttctgtattgaaccttaaaaacaaagcaaagcagatgtgagacccatgaggacaggggagctgttcctccctcagtggatccagaggctgactcattcccccacccaggatccatctgcccctttgtggtgaaagccacggctctggtgtcacttaggattgctgactgcacagagcaggattcccataatgttgcctcatgccacatgcttgacagtcattgatggtggtgtgtgtgtgtggttgttgttggtggtggggggggtactgattaaagtgcagattcctgggtcacatctactgaatctcataccttgatagtaggccctgggaatttgcattcttaaaaaacaggctgggtggtcatactgccattaaagtttgagaaactattgtgtagatcaggaatttgccaactttttcataaaagagcagagagtaaatattttagactttgctggccatatggtttctgttgcaatcactcaaggctgctgttgtagcatgaaaacaatcatagccaatatgtaaatgaatgagcatggctgtgttccaataaaactttatttataaaaaacaggtgccaggccagatttggcctgcaggccatagtttcagaccccatagtttcatgttacccttaaaaaaaaagttagaccagctgtggtggctcatgcctataatcccagcactttgggaggctgaggcggctggatcacctgaggtcaagagtttgagaccagcctggccaacatggcgaaactccatctctactaaaaatataaaaattagccgggcgtggtcgtgtgcacctttaatcccagctactcaggaggctgaggcaggagaatcacttgaacccaggaggcagaggttgcagtgagccaagatcacgccactgcactccagcctgggcaatggagtgagactctgtctcaaaaaaaaaaaaaaaaaaaaaagaaattgatcagcaggtgggggagtctaccaagagctccttctatttgaagaagcaggtcataatattaatagctacaattaattaagtgattattataagcctggcagtttccagacaaaacctacaccttaatacagccctgcatagtagctataccaacaaggccattgaaagaacaaagtgattagcccaagcttacatgatcagtaatgactgggttggtctgaatgcagacttggggaagaaagcggtaatgccacagttctgttactttctggtctttgggaaagaatgatttcaaaatctcttcccagggcatcgggcacacacaggtccctctaagcccccagcctaaggaggaatagccacagccacgcacttggtggtggtgcagatcctggggtaactctgtacctcccggatgcctcgaataattggggttgtgagtggtgtggggtcttccaggtgcattggacaatgctcaggttgatgtggctccgttcactttcttgaagcgggggagagtgctgttgctatagaaatagctcaggtcactgtgctggacctttctgaaccctgctgctcagagtctcccatcactgggaccaagagcccttagagccaggctcctgacaggagacttttttgtgtccctgctccagtgaccatgcaagtttccacatggccagtgttaaacattcaccctgcttaaagcccatggagataggttagtgccctacttgtctgcagacagggctggccaagagagactggcagtggcaggcagaaggcagtccctcgcttccttctgtcttctccccaccccagccttcctgaccttcaaccacatcccgactctagggcaaagaaaaaccctctgggctgaattcagcctctggggctcatggttcagcttgatggctttgccaggtagcaacatgggtgatgctagtcccctgtgaggtaactgttataaagatactagtgttttacatttatagacagcccagtttgccttgacatgttggtttattacataaaatcttgaaggcttgggctgctcattggattaactgaaataatggacataaaacagaaaccagaggctgagcatggtggctcacgcctgtaatcctagcactttgggaggccaaggcgggcggatcacgaggtcaggagatcaagaccatcctggctaacattgtgaaaccctgtctctactaaaaatacaaaaaattagctgggcgtggtggcgggtgcctgtagtcccagctactcaggaggctgaggcaggagaatggcgtgtaccttggaggcggagcttgcagtgagccgagatcgtgccactgcactccagcctgggtgacagagtgagactctgtctgtctcaaaaaaaaaaaacaaaaacaaaaaaaaaaccagaaaccagaacttggaatccagaacccagaacacactgctcaaccaaatagtagcaaattgtatcattgttaccatccatattatgacaatcagtagtccacacagcagcccctttaaatcgatattatcattctgtttttcacacatgagaaaactgagattcacagaccctgctagagttctaaggagggtcacaggtttgtctggcttccaagccacatgctcttagtcactatcatacattttaaagtcagaatataaggagacctagggctgctgggaaccttagggagtccccatcccagggacctgcagaaagcccttgacagattattcttcagttccctcaatcacctgagagcctcctgccttcccacaaaccagtgagtgtcaaactccctaagctaacagcttcatactgtcctcttatcagttaataagctgcttacccagcctcaggtggacatttggctgcgggttaatggggccttttttggccctggtcctggccctttaatccactctcccacccctttctgctgtctttctctctctccaaggatgcaagtattagtacttcgggaaacaacataacacctcctggtagaaacctcaattccatattgcacctgaggtcgtgactagccacttgccttggaaggaccctatccaggttcaaggaggcagcttaggcaggtgtgaagcagcagcctggatagatgcctcagccattgagccccaaaccatgcccggggtgaacccccaccccatcgctcatcatctgtatctcagtgaatttcctgtaaactagagacataggagtcattcttgacatgtcttcttgcccagtccccatctctttacccctccatgctcttgcacagcccagtcttgtctttgtgacctaaatatctcctgaagttgtcccttctctctttgcacactgccaccccaccattccatctgggctcctcccacatggctctggacctggccccttcagtgtgtgccctgctctgtaatcacagtagcagactcaggactttgaaatgaaaattgggttctgtagtagactcctggttctgaaatgaaaattgggcccaggagtctagctcctgccatgtccccagtctcaccgagctatagggtttccactcttgccagccttgttccatgctccctaagactgaggttcctcatgcaccttccctctgtagcactttgcacagttattgacaggaacatttgattagtgctttgcctctccaagtagactgttgtgtttgctcactgcagtaccactcatgtcagcagaccacttaaggcatagggtgcataaatgtcctctgggccccttgggcattgcacccaaagggctggacctggagctcctcctctgaccacccctagttttgttactactgtggtgaagatataatctgggatctttccttttggtacctgtggattgcctgtaagatggaggcagggatattctgggggagaatgttctcctccatccaacagctcttgccttgcatttcttccttctgcctaccccacggtgcctgcagacaggaagacgctaggtctgacctgccttttcctaagatcccacctccatgtttacctgatcttctttcttccttattgtctctttctttacccaccactttgtgcagtatctggccaatgctatggcttcttttccatgccatgacactaagatttcttccccagtcatcctactggggctcattaaaatttagagctatacaggctgaggtcgaatctcagttctgctgcttgggagctgtgggacttcaggtgacttatggaccattctgggcctccacaccctcagctgacaaatgagagggataattcttatcatacagggttttatgagaattaaatgaaattgtgtatataaagcaattagcttagtccccagctgtgtagtaatcactcagttaatgtgttgaggggagaaatcatgatttttgctgcactcagaaaagctgtgagtaatctgcaggtcccattatggctgtggttcatacacttggttttatggtagaatcgcatggggatctttaaaaaatttcaacagctaggctactcccccagccagtgggtcagaatctcagtggatgggctcttggtgttggttgtttctatagctgctcaggtgattttcagtgggaagctaaggctgtcagcctgggctttcccaacgccccccgcccagccccccacctctttctgccagagcacatatcttggaactttaaaggaataggagggatgcgggctgaaaacatggcgggaaaagctctctttattgggctcccacgacgtctctggcactgtgcttggtgcttcactttcatgtttccatttgattttcactgtgacttgtgatacaaaaattattgtccctgcttcttttaggagcttcaggaaggacgagctccttgcttaatgtcaggtattaggtggcttaaggatgaaggaccacgattcgaggttggtgaggttggggtgaggacgctgtcccctcttctctccctcctgcagagtgctcctttggtgaggtgactgaacgccccaattttccccaccctctgcgtgaggcctggctactgcacctgtccactgcagtatttaatgacccagcctgcttgcggctcaccgggccctcgccagtgatctgccacctgttctaccttgcgcggtggtgctgtttgcttaacggggaaatttaagtgccttgcaaagactccccatggattgggggagaagcatccgctgactagaaatgggagcattgttgttgttttgttattgccataaatttccaggcactctgttgggttggaaaatagtgaggggtggatgggcagagagagggagggattctttcttgtctgactgtgcaagtggattagagagagaattctctccttcatagctcctcgaactttatggtgcacgtggagccctggggatcttgttatgatgcagattctggtttgataggtctggggtagggcctgaggttctgcatttctgccaagctccttatatgaggctggtcctattggtctgctagccacacttggcttagcaaagctatagcttccaagtgagggagactcaagtctgttttttggcccctgcaatttttattttggaaagtgtcatggaatgttatagaaatctggattctagcccaggctacactctgatttatctttggatatcttttgagctttacttttatcctctataattggagggatttggattaagggcttccaaggtccctttcagttgtaacattctatgattctgtcagttggagagggtagatcacagggagcatggagtgaggaggatgggaactagtgggaggtgggagttgtcaggagcacccattgcatatatgggctattctttttaggatcaccaggtttgaatcctgagaggccagaagtgaggaaaataggcaatgaacttccttttgtgctgtgtgtccaagatcccagcgtagactatgaactccgggcaggtagtgacagtgactcttacttcctgactcacatacttggcttctccaaatggcaggagtgtatttggggatgttagccattctgtgggtttcatggagggtaggcactgtgggacacagatacaagcaaggcacacttttcatccttggtgagcacagtgttttcttaagagaatggcatatctttcagaacctggagtcttgctgttactttcagattggaattgctcttcctgatactgtgtgtccagcaactggggtctttgcctatgggctactgtcagcgtctcctgatgtcctgactgttggttctgggtctgcccctacctgcccaacagtgtatctctaggatgtcgcttgctctccaccttggggtcctctacttgcctgccattgggatatctctgctttctgcccctctcccgcttgttggtctcttggatgcccaggtagtgaccacttccagtttggctctcccactgctgactgggacttagtgatgatagtacattctatttggtgggttcaggtctgagatcgtgtgatatttttatgttgctattccctgcagaggatttcacacacaggcaggctttatccattcttcccaattagacacatctgtgtgcaaatggataggccttgggctcctgtctctcactgctcttgagagaccaggaatgggccacaattgggccagggagggctttcagaacagggagcctgtgaagtttggagacagagtcctggtgtggatgggggtgctaccatgacctcttcagttcttctagaccaacagaagctcttgaaactgtgcattgagcctaggaagggacatgcctttattttgcacttcatagattttctttttgagacgtggtttcactctgtcacccaggctggagtgcagtaatgtgatcacagctctttgtagcctccaactcctgggctcaagtgatcctctcactttagtctcctgagtagctgggactacaggcacatgctgccctgcctggctaatttttgtagtttttgtagagacagggttttgccatgttgcccagcctggtcctgaactcctgagctcaaacgatctgctcacctcagcctcccaaagagctgggattacacatgtgagcactgcacctggcctgtggacttatttttataaaaggaatatatattcattatataaaaatctagaaaatattgtataaaaaattagtggtaatcttattattcagaaatgaccactgttagcatcatatgtgtgaatacatatatgtaaatgtatatatgtacatatgcacatatatctatgtaactgtagatctgtacctgagtatctatattcccatacttttttttttttttactttttgagacagagtcttgctctgtctcccaggttggagtgcagtggtgcgatctcagctcactgcaacctccacctcccaggttcaagcgattctcctgcctcagcctcctgaatagctgggattacaggcacccaccaccatgcccagctaattgttttgtatttttagtagagacagggtttcaccatgttggtcaggctggtctcgaactcctgacctcatgatccgttcccccttggcctcccaaagtgctgggattacaggcatgagccacatgcctggcccattctcatacatattttaaatgtacacttaagtgaaaatggtcttgagcaattcaaacagtgtttgacctatttttttcacacaacactctttcttaagcatccttccgtgtcattcagtaaccctgtctctagcttttccattactctgcaaagctcattttcctttcttacattctttcttttcacgttgcttgtgtattataccatttcacttggttaattcagaatctaatccatttgccccaaggctgcatggcaaaagggcaaagtatgcatttataaaatgtgaatgagcataaggaagacacaggccagggttgctcagctccttggcccagtaaagctccctctgtgcatgttttcagctcggctttgttcagggagcctctggtaggggaacttggcagaagccaagccaaccttgtcctgccggccgctgtagcagccgctgcatccattagcaattatgggtcatccactgtggggcatttcagaggcctgagggacacagctttgccatgagcagaaaccactgggtaagccggaatggaccaatgaaaatatgtaatcttgacaacagaatccttgaacatacgcacacatacacacctacaaatgctcacagagtgcaatggaggcagcggaaagcagtgactacgggtgaacactctgggctaagactggaattggagtcctagacttgagactttctttttgatttgggtgagtcacttaaactttctgaacttctgctgtcctcatctgtaaacgtgaatggtgctcacgtgagaaggtattgagagatttgactgggattacatatggaaagcatttggcacagggactccacgtggtccatgctcaggaagtggccaccactggcttagttttagggatctcagaggtgggggaaaggcagtgcttctggtgtgggggtgtgtgtgtgtgtgtatttccactcatgaggtacctttcctttgatgaacatataatactttatggagttgtttttatttaatgtctgtgtgaagcacaaggaaaagatatagccctgctggtaaatccagacccagagaagcagcgtatgtggaactagtggagcgtgtactacaccaatagtagggagatgcagttcttctcctgcctctgggactgcatggctgtgtggccttagctagtcacttgttctttctgatcctctcttctcattacttggaataagccagctgattggaacacctcattgctaaggtctcttctaaccccaaccatccatgactctttaaggtagcagtggctaggtccttgggccttccttgaatgttcccctaaatctggagagtcatctctgacacgttaaatgtagacagtcaggccaatactctccagcacctaggagagctgcagatggtgcctggaattggcaacgttaagaataagctggggacgaggagccgtggttgacaatcaggtccatggcctcactgggttgtgctttctctctctaggtgtagtttagtttgaattatttatgatgatactttctagtcatttgggaagatgaatgaagtctcagtaatcagagcccatgcacagcctctcttaactaaagtgaattgagacatcaatccatgaagagggtcaggactagagaatttcagggcttgcccccaggatgagccacagccagcagagtctcatcaagcaaagggacagcccaactcgcagaagcagagtaagggtgctctgtcttctaaacataaaaggacagggcagtagagaattaactccttgactctggcctcttagcccttgcaggtgtataacttgtcccctctgttctcctttccatctccctgctgatgccaatgagatgtttaggaatgccttctcctcactgcccctgaagtcatagtttccttgagctcagcacacaggattggcagtaggaagagacaagagagcatgaagatgtgatggctcaggctgcagaaaggactgggagagggcagacagccaggaaggggcagacacacacacaatttgaagtaactgaacttcagtgctgatagctgggaagtgccaccatcatgaggctgtcaagggcaactcactgaaagtcaaaacattgtgctgatgacagagtgagaagccagcagctgtaatctttagcctcgtgaaagactgttaaggaagcccacacagcaaggaaaaagtggccaaacattttcaagacatgagctcaggttacagtcggaaagataaacgttgttctaaggaaatgtgcatcttcattagagacagtagaatggatttcaaaaggaagctgataaatgtattttactttaaaactataatctacccgtgtccaaactggaaggaatctcatgcaacagttctagacatacctgcatgcagtgaaaagtcgtcatctttcaacgtcaaaggtggatgtgtccctgacgtctcatccaccttgtcatattgaaaccagtaacttagtgttatttgtagtaaaatattctataaagtggtattctctgacccaggatcagctctgcttttggaggcaaagcagatgtcttcttccagatgcctggctatttgggggaagaggaggtcccttatagcaagaatgctagactcaaaaggaagtttagtagcacagaaaacctaagtcagtggccagttatacagaagaatgtctctagtgtagaattgtccattggcatcccatggaatggattcctggttgtgctgctccagccacaacctctaggatatatctagagtctcctattgccctttggctctcaaaatgtaaggagcttgttatctctggttcaggtggggactctgtgggggaatgggaggctattggaggggtttccatatgccttaacccctcgctttcatgtggggatggcttatagcatggcactgaagaactgtgccctttcaaggtcactgtcttctatgaatcccctcccagagtcttactgagagtggatgactaccacgggtagatgggattttgatccaaagaaggaaagaagtttatatgtttgaacaatctaaggtcttttttgactgttaaacctatgggcagtattgaagctgccccatctttcgccactctggtgaatcagaaaaaatcatgttcttctctgcctctctcataccaatcagatatctgtccgtcgttgtgtgtgtgtgatttattttaaggaattggctcaagcagtagtgaagcctggcaagtttgaaatctgtaggacaggctggcattctgggaactcaggcaggagttgatattgtggtcttgaggcaggatttcttctctgggatgcctcagtttttgttcttaagaccttcaagtgattggatgaggcccatttatattatcaaggtaatctttacttaaaaccaactgattgtgggtactaatcacatgtataaaataccttcacaaggacacctagattagggtttaggaaataagtcctaccatctagccaagttgacacataaaactaaccatccttgcctaacctccttgagcctacgttcgtcatgcataaaatggagttataatatctgtaacacaggttattgtaaggattaatgtattgacatccatgtagttcttattctgtgcccagtaggtactttctattaggctgtttttcgtattactaccaaaggctgtgagtcatatggcagggaccatcaaaacgccttcatcaactctgactggagggtggttatacctttgtgcaacaggccttttgagctaatagagacaggccttgaagggtggtcggattctggaaggtgatcctcttggtagagttggagcatttcttagttgattagaggatgctaattgaaattcagctatggtagaatcttcttggggagatttcggagggggatggcacattcttttgggaatcttcaagccaattcttccttccctgtgtctttttttaattatcatggatatataatagttgtacatacttatggggtacatgtgaaattttgatacaagcacgtaatatgtaataatcaaatcagggtaactgggatatccatcgactcaaccatttatcatttctttgtgttaggaacattccagttccactcttttagtgattttgaaacaggtaataaattattgttaactgtagacatcctattgtgtctactgaacactaggtcttattccttctatgtttttgcacacattaaccattcctgcaagtttctttttcttttgtcctttccaggtggcctaagtatagaaagattgtgtttttttggtataactaaatataccaaaaatatgcttaattcaaatctagcaattcatgaagaattagaagcaccttctagaatgcctcttatgctggggacatcatcaagaaccatctcttgcttcttctgtcagcatcttcttcctgtaccatctataatgctgttgcataggaccaggggagatgctggcctgaagcaggggcagaggtcactgtggttctgggcaggtccttgtggttctggtggttggggataccccatttccgcttcctcttttcagcctattttatttttttattttattttattattattatactttaagttttagggtacatgtgtacaacgtgcaggtttgttacatatgtatacatgtgccatttggtgtgctgcacccattaactcgtcatttagcattaggtaaatcttctaatgctatccttccccactccccccaccccacaacagtccctggtgtgtgatgttcccttcctgtgtccatgtgttctcattgttcaattcccacctatgagtgagaacatgtggtgtttggttttttgtccttgtgatagtttgctgagaatgatggtttccagtttcatccatgttcctacaaaggacacgaactcatcattttttatggctgcatagtattccatgatgtatatgtgccacattttcttaatccagtctatcattgttggacatttgggttggttgcaagtctttgctattgtgaatagtgccgcgataaacatacgagtgcatgtgtctttatagcagcatgatttataatcctttgggtatatacccagtaatgggatggctgggtcaaatggtatttctagttctagattcctgaggaatcgccacactgacttccacaatggttgaactagtttacagtcccaccaacagtgtaaaagtgttcctatttctccacatcctttccagcacctgttgtttcctgactttttaatgatcaccattctaactggtgtgagatggcatctcattgtggttttgatttgcatttctctgatggccagtgatgatgagcattttttcatgtgtcttttggttgcataaatgtcttcttttgagaagtgtctattcatatccttcgcccactttttgatggggttgtttgtttttttcttgtaaatttgtttgagttcattatagattctggatattagccctttgtcagatgagtagattgcaaaaattttctcccattctgtaagttgcctgttcactctgatggtagtttcttttgctgtgcagcagctctttagtttaattagatcccatttgtcaattttggcttttgttgcaattgcttttggtgttttagacatgaagtccttgcccgtgcctatgtcctgactggtattgcctaggtttttttctagggttttaatggttttaggtctaacatttaagtctttaatccaacttgaattaatttttgtataaggtgtaaggaagggatccagtttcagctttctacatatggctagccagttttcccagcaccatttattaaatagggaatcgtttccccatttcttgtttttgtcaggtttgtcaaagatcagatttttaaggtaggaggagtttataatttgatgggacagagccccaggcattcactcagagggtcatgttttcaagtgggcaggtttcctttgcctgaaaggtcagtacccatgcagtatactttttcttatgcccttcttctgtgacatcctggctgcatgtctctttttgttctctgcactgctgtctgctatcaggtgggtaaattagctgaggcttgcttgaattcacagaagatggaatggtaaactctgtttccgccatctgaggtttaccagctcactactgggagttgctggctgccagctcagttgttaactatgtaatacttggttccccccagccagtattttctgcatatggctctccagatgggagccctgtggagaacaggggtgttgggaggatcagtccttttggctgtttggttataacacacttgtaatagcaccgaagcctcttgcattgttctttggagcagagcttgattctcattttgcttctttgctgtgtgtgtctccctttcacaacagaatcttaggaaagcttatatctgaaaggtggccagcactggggccagcacatgggggttttagggaacacaggagtgaggagtgagcttcaaggaatttgatggggaaacctttatcctcatcactggaagagtaattcaagcttaattaaacaagcttaaacaatctgtagtttaagctttgtctgtccattgctgcccttggagttaacttttaaccgtagagtcctcaaaaggccagagaaggtgcaaagtatccttgtcaactccatgtccccctccccaaatcctgaagccttttcagtagatgtgtgtggggctagtccatgctgtcggttatctctaactatgtgaaccgccccaccatagcgttcaatttccagttttaatgtttgttttttgttcatgtgagcacttagtaactattaagtcaatgtggtcatagaataaaagacagttgcttttaagtttcccccacccctgcttttggatgcagaattggagactcagagagatcaagtgacttctctgaggacagttttgattgtggcagacccggctagcacccaggctcttagctcccgatgccatgttcctactgctgtggcattttgcacttttatggacttaagttctagcctctttgtttcatgaatcattaagagtttcagggaatacctggccaactaagggatgagatcagtcagtaaaatgaaggatctaaattttgaatccatgttcctgttcataatacacgtctttgcagtcatttccccttgtccagcctctcttgatgagagacttttttagcttttagcaggtactgtagccaaagcaccttctctcttccatgttccttctccaaatcatcttttttcttttcatcagctggaccatgttttccttttcccttccaaagtcagtcgtgctccacattttgacggctttccctggttctgtgaattccttccaagttgctgccatctttctactaataagctgcccaatacactgtaccggtcacctccctggagcctctcacagcctcctggatgatcttcagcctctattctggaaaaaccaaggcttacacaccacccactacaatgctctttcagccctgtgctctccaggtggccttggctgttacatcttgtcgttcatcacccctaccacctttgcaagattaaggtgaggtatatgagcccttcgctttgggcaaaaaatttaagagggtgccacaaattaaaaaccccagtaatcaagacttttttaaacctacagattttttgcattaattttgttttcatagcatatcacattacagtattatctctcttgattactgagtttctgagcagctcccttgattttgggcccaagatgaatgcctgtctttcacactccatctctcccatgttcctttcctcttggttttgctcctccccatccttttctgtaattcctctagtcttctggcccctgcggatttattccttgtgaattaatgttctgtttacatcttcttccagattgttaataaagatgttaacacgttctctaggcctcactccaacctcgccatagctggcccgctatctggggccctctgctcaagaaaagaaactgcattttatcataagttctgttgtttaccgtctcctggtgagtatttccatcccacccaggttgctgttatccttgtccaagcgccttaatgtctcatgcgcgaggcttgctgaagctccacgagtggcttgaaagataagcccttgtaaataaagcttatgatccttgttaatgttgggagctgatggcatgcgtagtccagccaatttggattaattttccaagggagattttggtagatgctacgtcaacagattctctgaaatcccactctctcaccttgcctcccttttccttggccactcgctcgtttttgccaattaagaaaagatatcacttccgtggtggggtgtgatttactctttataaaccccggttgctcttccgtgctcaaagtccacttgctgcttataaacagtgcttttcctattggccttatcctttcagtagcagcttgaactagatttacctttgtttctttttgtcagaggaaaagatagatttttataacataaatttggcaaaatggaaggacactgtagaataaaacatcctttgcaaaaagtacacacttttagcagttcacattttttaaagaagatagtcgttttcttggttctctgttaccgaagtagcaaatgtccatgaaactaacttgggaaatagagaaaaacagtaaatcacccttgtgctagcaccccaaaataaacactgtttacatcttggcacctttccttctagtccttgttacatatttatcatgctgtagatgcaattttgtgtctttactttcacatagtatatcataaatagtctccatattattatgtaatcattataaccatcgtttttaaagattgcgtgcttttcaatccaagtaaatctgtctttttaaatttaatcattccccgtttattggtcacttaagttacaaatactattatcagtaacaatgaggtgaacatctttgtatgtatgttttccttagttaggattatcctataccttagattcctggtggtggaattactatattaagcgtgaggataaacatgttgctaaagtgtgttagagaagagtttgaccaatcaacaaagcctctatcagtgtatgagactatctcttcccattcctcttcttgtactgtgtaaaaatagttcttatcagtgcgttcctgtcactctaggagttactcaggtagacatatacataatcacactcttcatagtcctctggtacatttgtcatgctaacagcattaatgatagtagcaataatatcccaactgttctctgacacacctctttaaccagcactgttcaatagaaatatattccagccaaggatgtaacgttaaattttctagtagacatgttaataataaaaagacataggtgaaattgattgtaatactatattttatttagcccaatatatcagagatgctatcatgtcagcctgtgtcactagccaagtctcaggtgctcagtggccacatgtggttagtgaccactgttgtggatagcacagctttgagccataagcctaaagcactaccagactctcttcttttgtttagaaaggctgtcaaatccttctttgcttttcaatcttagttttggttctccaaaagtcaactctgagataaggacttgatgtgcaggtaatttatttgggaggtgattccaggatgcattagggagcaagcgggcaatatgaaagggagatgataaagtcaagaaagagcgtgacagtgagtggattgctgcagtgggtaactggagcttagtcctgctggggaccgtctgagaaactgggtggcacctgcctcaaagttgctctccactgcagatgcagggactggaacatgtatttagtgactcctgtcctccattaattagttatgggttgttccagtggtattaattaccccacacttctgggttgtacctgcttaaggccaagcttgctcttactgtgctggagaaagtccttaggcaaagaaaaaggatgcaggctcttgaggtgggtgtagtttgggggctgaactgcctgctgtctttgccaggagactcaggtgggccagggatatgagtggggcctcagcagcacctgcctctgggcctgtgtcatggtgaagtagggtcttctccagtggggcttttcccaaccaggtcatccttggttgatagtcatcgtgggtgattcagtccatattcttttatataagccacagaaactgattctggctaaccaggcaaaatgtaaatgatggagggatgctgggggctctctggatgtaataaggcctggaggagagggctggtcaggattggggatgggagagaataagattttgtcccatgctggaataaactggcaggacagttagcatctcggagaacagcatgattaggatgccctgtgttccctccctctgtttgttctggggaaggaaatggggagcaaagtcactttggcttccttttagaggtcaccacctaaaattattttcccatttatactacacacaatagaagaaagataattccttgatagaaaatcaaatcgctgttagggaatgaatgctgggctgctaaaaatggacaaatgaccactgcagaaggagattgggctttctggtgaaatctgagtaaaattgggctgatttcctggttttgataatgtgttatggttatgtaagatgttaccactcagataagctggggcataggtacatgggacctttctgtactatttttgcaacttcttgtggctgtataatcatttcaattggagtatccaagcttcacctttacgccctacctcatcctccaaattactggtgctcaatctttagacctaaaggtactcctcaaaccttctaaacctggggagggttatgcacctatttatttggattcaactggttttcttgctctggttaatttattatattttttggagtttatatttgcagatttgatgttgacctgcagttaattgtggaggatagcaagcaggtctgaaagtggactgagagttatacaaaccctgctttcctccttctgactccaagcaggtttcccaaaaatgccattgacaacattgacaccctgtaagtgagccatggttcaatggagaccactcatcgctgatcagccccagaaactctaggaagggttgggtcatccagttcagaaagctttggctcagtcctttgatttctgcaatgtacttggtcagatatatctcttggtgagaatagagtgggctaaagccatctttgttgagacattttctccaaatagcagccatttctttatgtggctttccaaccagggcatattctgagaagactattaaattctcacatgggaccattgacttgaaggcagtcaacccctagagaacacaagctgttctcactcttccttcttgcagtgattgaatgtcattgctgccaaggcagagtctgggctcacgatcacaggtgttgtggtgtccgccagagtgccatcaatttggccatagccacagctcccaggtaatgggtattggaagccattgcttgtctaaacaagatctgtgagacttccatcctcagttagctgttcaatttctactaataattctctaataaacatttggccaatcagattcagtctgttacgatggagttaaaacagcttaatttaagcaataataataattgacagcaacaggaaacactgagccatattcttcccactgtctaagtcattccctgggagtaaatcaagtgtttaaggagggacattcacgtctgcagggcactggggccttgctcagtcagctagggctgtagacatcagatggtccccaggccatggcttgcaaatctgtgcatggcccagccctaggagaaagcccaggctcacattctacatgtcatccttcttcccaagaaggctgagtatttcatgagtttcatgagtatgatctcattcttccttctcagctgtctctggagggtgggaggggtctgctttggggacgctgctggcagacttctttttattctttttttttttttttttttttttttttgagacggagtctcgctctgtcgcccagtcgggactgcggactgcagtggcgcaatctcggctcactgcaagctccgcttcccgggttcacgccattctcctgcctcagcctcctgagtagctgggactacaggcgcccgccaccgcgcccggctaatttttttttgtatttttagtagagatggggtttcaccttgttagccaggatggtctcgatctcctgacctcatgatccacccgcctcagcctcccaaagtgctgggattacaggcgtgagccaccgcgcccggccgacttctttttattcttaagccccttcctgcagcccacttcttccaaaggctgcagcaagaagagccccttccactggctttttaaagacttgccaaggagccacacagtgtgcttggggaggagtgagagtgcatcccctgtttgtattatgggatttggaattagggagggtttaggtcaaatcctggcaccaccacacaggtgaccttgctgaggctgtttgccctccccaagcctcagtttcccataggattggggaaggcaataccacctcgtgctgttgagacagtcaataattgataacaacatgtacaagataagtagaaagctaatatgattaatattaactttatagcaacccccccgcttgaggcccacagagagtgttacaacccctgcttgaggcccacagagagtgttaaaggaatccttactgagtccaaagaaagaaccctgtcttctggtccatagtgctcatggcagattatgcccatgctgttgggtttgcactgctgattcagggatcagaccacatgttcttcataacaatgatcaggtgcatcattggagacaggtatgctatggcagaaataacatgactttgagatgaagacagagcctgtctatttaaatcctgactgccatttatgagctgtgtggtctggaatgggtttcctcatctgttaaggagagaaactgacacccatccataagcatgagaagaagagtaagtgagcaaggctgcctggcacatagcaggtctactgtaaatgttcctttcaaatcctccccttcctgctttctaatcatgctaccctaagattgaaactggtggttataggagaatatcatcccttcctttcttccttcccccctccctttttttcccactccctgcagacagaattggcattttccagaggaagaatagatgtttgattttgtgatccaaattgaagttcctctttgccagaaaacacttctccatatgtttgagattccttattaagggaaaaaaattcatgtttacgttgaggtaaaaatgacacttggttttaccttctgtggtaggcagaataaggttgtctccccaacaaaaaaaaaaaaacaaaaaaaacaaaaaaaaccccaaagccaaaaaaaaaaaaaccagaaacaaaaaatcaggtcctaatccctgaacctgtatatgtcatcttgtacagggaaagggtctttgtagatgtgattaagttaaggatcttgatttggggagattatcctggattatccaggtaggtcctgaaggcaagaatgtgcatttttgtaagggagaggcagagggtgatttgaacatgcacagagaaggcagtgagacagagatgcagggatttgaaggtgctggccttgaagattggagtgatgtagccacaagccaaggaatgccatcagctgctagaaagaagctgaaacagacaaggagcagactctacccagagcctccagagggagtgcagccctactgatgccttgatttcagaacagcaatactgattgccaaccttgtgcctgcagaactgtgagagaataagccactgagtttgtgggaatttgttacagcagccataagaaatggacacaccttcatactattgggacaaacctctggccagtctggcttgtggccacatttttctgagagagtcaacaccatgggtacctatagatgccagggggtgggaatgcaacctaccagagatttaaccaagctctggtcctgtgtatgggctctcacctgccaaaggtgcagcagttgcttgtatgtttcaggattaatgatcaaaggcagcaggtctgataatagggcctgacttttgtggccatgcagtcggagccttgatgatgatataagttaaggagcttcagtgactagagacgtggcccagccctccaagaatgacactgagcggctgagatagccatcatatttcatctgatgtgccagctctgattgctgggggagttgccaggttgttgagaagcttgaggctgagactaagctgcaggcaaagtagaaacaagctgctcaagaacctgtgctttggtgctgctgcacctatgtaaggcagaagtgggcttcagagccatggttctcatttgccttgttgtgatgtgtgatctactgtgagatgggttgcaagtaatttgttaccaatattaaaatgctgccttttgcagaagatttacttcttttaatagattggggcagattcatggtggttttgctaacttgcattctgatatgtgttcttgagtagggcagaaaggggtggagttttagatagcacacaggaattgctcataatcttggggacactaggctggcaggtgagtcatggagataaaaagtgtctgagagccatgaccaaggaacatttaccgcttccctcaggtcgacaaatatgggtcagatgtgtgtcatctcccacccttgtgtccatggcagacatcactaattgatgtgtgtgatctccctactcttgtgcccatgacagacatcactaattgatgtgagtgatctccctacccttgtgcccatggcagatatcactaattcatgtgtgtgatctccctacccttgtgcgtacagcagacatcactaattgatcatggcactgttaggcttgaaatcaggcacagaatacttctcaacacagtcatttggttgtccactgccatttgatcaatgggtaagaggagagcagaggaaacgataagtgaaggtaaaagtagtatgagttttgtatttttgaactgtcatttaatttttatgttattggatatgggaaacagtattaccactaccagttgatcagggttgacctttgacatgacatacatttgccattcctgctaattccttccccagctttaagagaatctgccctaattcccagcatttttgctggtctttcccaagtttcttttggcatccgttaacaaaaggtctaacctttttcccctttcatcagtaaagataagctgcaggtagtaaaacgggttcccaatttagcatggctcctctttcagagggcagacatctaaggagaggtcagccgctccactcccctagcccctgactttcctctggggcccagggttcacacaggagttacagggattagatttagaaatcagcaactctcctaagatgagtattggctgttcttttttttgaaggtgagagtcttggtcagatggcttgagcacgcatggccgtgcaccaggttcccagaggcgcaggcaagagggctgcatccaagttgtcctggaaaccgtgctttttttttcacatttagggctgaaggccagttgcttgctgcctgggtgggggaaataggaaggagcagccagggttcggcccctgggcagaaggatatggtgagattaagagtgggtcaggggttgtggggtaaggaggattgagggaggaggaggtgaagatgaaatgcaaagttgtgtcttagaagttactggcaggttggcattgtgaacttgttatctgtttgacatgacaccccagggagtggctggagagacagcagctgtcacggtcatttctggaggaggaatgactctggctgaatttgcattaaggatttcctaccagggttgccaagtgattatcccatagggagattctgagatctcactctttctcctttttgtatatatttataggagaatgcttatctacgttgcctagggcacgctgtcctttctcccttcctcccttccttcattccttttctccttccttcctttcttcagcatttttgagcgtgcactgggcaccaagtactggcttacataccgggatttggcaataaataaaacagtccctgcttttgtgaagcttacattctggtggggaccgaggtggggagcaggagagacaaacaataaacaaacaaatgaacctataacatggcaggtagtgataagtgctaagatggagaagactgaagataagagggcacaggctggtggagagggctgggaggtctttgggatgggaaatctacttgaatgagtgcaagccgagcagagaggggagggcttcacagacatctcggggaagagagttcctggcagagggagctgctagtgcaaaggccctgagatggaactgtgctggcatgttcaaagagcagcctggaggacagtgtggctggaccggtggtgcaggggtaatagcagattaagccagtgagtttatgcagggccaggccacatagggtcttctaggctatggcaaagaccctggcagccatttaagcaggtggggagactgtggagggtgtaacgcaggggagggcatgagcagacctgtattttagaaggggccactctggctgcttcatgggaaatgagccacagggggccagggtggaagcaggaaggactgctgggtccagtagcacaggttgtgccctgctcaagagtacagagtcaaggctggaaggagggtcaggaggctgtgtccatgcaaggggagcatctttctggaattcatccaaggtgccctaaggctaatgggactcagctagtttgtaaactacttttgctacttattaatatgtcatagacatttcccccatgtcttcaaatagtctttgacaacatgctttttaatagttgtgcagtattacatcacttggacgtactatactgtaattaatctgccatgttagacattttacttattcccagttattcactattttttaaatgtgctgatggatgtcattgtgcataaatctccacgtacatctctgattatttccctgggtaatatttctagaaatggaatggttgggttaaataagatgcatttttaagcctcttggttattaaattactttgcagataactgagccgaggcttaagaagggtgagtaactggcctccaggcacaaagccaggaagtggtagggcaggatttgaatgcaggcatgtcggttttgagatttggagatctatcttctcccccaccgcccccgtcataccacactaaggacagcttagatgtcactcaactcacactcagccaaaggccaggtagcctcagatttggtggccttgatgaagatgatgatgatggctgaggagttgaaactagtcagctttctttaatcagctctgtgtcaggaactatattcagtacagattgtgcatattcccactggaccctcagaggaacctaagagcagtaatatttttagttccattttatacctggggacactgaaggtcagagaggttaagcagcctacccagggtcacacagctggagaacggggaagccaggaatgagccctgtgtaataccttcattcttaaccattcccagctatagggccttccaagataggaactatgcccactagtcccttgaattataaatactagctcatataggctgctgattcacttcacagtccacatttggtctgacagcttctgcactcttgcagctttaaaaataattgttaccattattattaccatattacttctatgactatgtattatatgataatggtaatatatatgctggtatatgcatagtattatatacactaaccttatatatattacattactgttacaacatgttattacaattactactattattgctgtacatcattactatgaatactatattattaccattcccatgctccttgttgctcattctggtgtccaggtggaagggacaagaccacgttttcctcatagcagagtgcaggggcaaaaggatgagcaaaaacatctcatgcctctgaagttattgcctcatgacattattctaatactcatagcaacaacaactattatgattactatgttaaacataggagctgatagttccacgccagctccactcagtcttgctggcttttctctcaacaactccttggggtagatacttttattgcacccattttacaggtggggaaactgaggcccagaaggtttcatgacttattcaagatctcacagcttggcactgacatattttttaacagctttattgaggcttgatttacacacaatcagctggaagtattcatttacttatttatttaaggtgggaacttgctgtgtttcccaggctggagtggagtggcgtgatcttggctcactgcagcctctacctcctgggttcaagcaattcttccacgtcagcctccctagtagctgggattaatagggcatgccaccatgcctgacttattttttgcactttttagtagagatgaggtttcaccatgttggccaggctggtcttgaacttctgacctcaggtgatccacccacctcgacctcccaaagtgctgggattacaggcatgagccaccacacccagccagctggaagtatttaaagtatgatttgaggttgtgacgttgcatatgccagtgaaatcgccaccactgtcgagatggtgacatctctggggctctggtgctgatgcaggtatgaccctttgtgggaagccctcataagtccatgtatggtgcctccttcagctctctcacccatcccattgatcccaagaggaaggtctcagcatctgctgagctttctcacaggtaatgttcctgcctacactctcttcctcctgtccccacttgcaacagtgctttctgtggctaaggaccggaattcatgaggctgagtgacagtggaaatttattactgggatggttcctctagcaagaggggcacagtgggggcaaaatgcaagggagatgggacctagacagcagcccctcccgagagacctgccggacactcccccagggccgcttgcagaagacagggcagggagaaagacctagtggagattgtcctccatggagcccctccaccttccactctttagcttgtgaaccttatttactctgcagtactgttctcactttcacacacgcatgcgtttcatgactccctggggtacccactttgcttctggggagcttgctgtgtaccgttaattgttatattcgcctcacatcacgcttagttaatatttagataaactgtgtgagcaaaatgattttaggttgtgtgtgtgttccactgctggaaacctctctgtgacccaatgcagtgatgcacccgtttttgagctgggtccccttgggtatggagaggttaagtaactgatgtcaaatcacagagcctggaagggcagagcctagaaggaggccatgacttttattcaattaggcttggcccactgaaaagctccctccttcaggcatggagggtggagagctgcatacttccaggtgaagagaaaaactagggtcatccaccacacaactgccccaggctaggagaggatccctcttgctacaataatcgttcctgaacttgtctgcccattgaaaccacctgcgtactccaaactgcactgaagcatggggcccgtcgctagacattctgattttattggtctgggatgcagcctgggctttagaatttttaaaagatccccaggggattctaatgtgcaaccaaatttaggtctagagtctggcacagtgctgtctaatcagaatacgagagagccccatacatactttgatgttttctagtagccatgtttttaaaaaataaaataaacaggtgaaattaattctaattatgtattttagcccaatatatctaaaatactatcatttgaccatgttattttaaaaattaatgagatgttttaaatcttttttttgctcatggtaggtccttgaaatccagcatgtttttataattacagcacatctcagcttagaccagccacttttcaaatacacagtaattgcatgtagctagtggctactgagttggacattgcagatcgggcatatagtaagtgctcaatgaaaaatttttgaacacttgaacaaataatggaggcgtcatgtgcaatatctgcagtcgtgagactgggtaactgttccaaaggtaggaaggtgtggtttcttggcagagtcctctctagagaacggttctggttatgtcttaggatccaggcatcggacacctctcctacctatgaagtcttcatcagctttgtcctgctcctgcactctgctccatgcattggtgacatatgcctcttagactgtgatgcctcgatgccctaggctcattctgtcattgtcatcatctgtatcacatactatcattttctctttatgtgtctgcttctcatatatcctattagctcctcaaggccctagccatgtcctcattaatctctgtatccctattggccagcatttaatagatgtttgtggaatgaagtaataaacgaacaatcacatggcgaggagatttgactgtcatcaagcccagttttatagggcaagactggccagcgcaggtcttaggtggaaggcagggctggctcaatgcatatttgtagtctggttattagaaattgtaagcaatgtatcttagttagcgattactgcatactgctgggtaacaaaccaccccccactcagtcttttctgacaagcatttatttcttgtgcccaggcctgtgggttggctgggtttggctgattcctgatgtgcttggctgagtttggctccaggcagtcggtaaggtgctggtgtgccccatgtttctcattctggggtgccggctgaaggggcagagcatattcttctcatggcagatggtaggcatgcaagctgatgagcagaaacagtctgtacctcttaaaaccttggcttggaacagtcactgtcacctcccttgcatttcattgcccaaagcaagtcactgggccaagcccagagtcagtggggcagagacatggaggggcatgaatatgagttgaacaatcatcccatctattactctaaaatatggtttcctggctaagggtgatggtgttcctgcctctgaaaacccatcccttatctaagtggttattgacttcagcctgtttctcaacgtaggaagaaaggtgggtcagggattttattaaccatggttgcttggctgcacccaggctgtttctgttttatttgacattggctatcttgttttctactcttttgaccctgggaattggttaacctaagaattcatgctaaactctcttcttgctcttgagggaccagtcaaatcagtccctgatatataggttatcccagctgtgcagcacatgcagattgtgtgaacacccatgcgggcgcatgtacatactatggttctacatgccccttgtcaaagggaggatgtggctgtccagaggctgaccagagcttacagtggctctcagtgtgtcctgctcagctgtgcacccattgtagagttgcctgcatgagaagccttccctgaggtttaagaaaatggagcactcatttactgtccccttggtaaccttcagctctactgggctggagggcagggggacgtctttgtgcagtgcagctgcagaggagactcacaaggtgagagggttgggggaaaggagacgtgaggctggagcagtggtcattcttccagctctctggcttggaccttccaagttcactgccattccagagaccttgccagagtccacagttgagctcagaccagggacttcgggccatttccagaggaacctgcttgcagcattctgttttgagtgaagacgctgcttccaatgaagcagaatggaactcctggcttgcctcctctccctcctgcagcctgcaggcctaagtgggctctgaggagctcagtcttggctgtgaacaggagaacaattttaccctgaactagcctaaccctgcttctttctccagtcttctcctggtcagatttggctgcttttagcatctgtgtctcccattggggtgcaggggagtgagggggcagtgggacatccttttagttggttggggtctctggggaagcaggagctttgaacgcagtttgaacccctgagcgctcaagttccttttctcttggcacagtatgatttcctgtttcgaagaaaaaaaccccagagttttaagaccttaaaaaaaaaaaaaaaggcacttggacatgaaatggctcttacaaaacagcatgttgatgagttaagtataaatgaatcagagacatatggattaaattttccttgcaatccacaggggctttaaaattaggggaagagtgtttgttaaaacgtgtgtgtctctgccagggtctgggacagaattggaggctgtgggattgctggagaagccttacacccctcccctccccaactttccctaccgtgataatagggcttggagccaaggaagttactacaagtcttaggttccttcttgtttactcctcaagcctaaagcccttttaattgcttttaattgaattgttcctcatatatctcccctgtgccttcaaatgggggaacaggccaacatctaactcttgcagtgactttgagccagcggggtgaaggcaattgatgtgagccacaatgacatgtgagatattactgcccactccttcttgactatgaactgtcccatcttggcccatactgtcttaacccttccaggcaacacaaataatctggtgtggttcagacacgctattagaaaactcctggccgggcgcggtggctcatgcctataatcccagcactttgggagactgaggcaggtggatcacttgaggtcaggagtttgagaacaacctggccaaatggtaaaaccttgtccctactaaaaatagaaaaattagctgggcatggtggtgggtgcctataatcccagctactccagagaggctgaggcaggagaattgcttgaacctgggaggcagaggttgcagtgagccgagattgggccgttgcactccagcctgggtgacaagagggagactctgtctccctcccaaaaaagaaataccactcccctctctcctgtggccaggaacagaggaccgtgcaggggtggagaggagggttggtaacttctgttgcagatctctgtgatactattcttgaaatcaggagaaggtgggagctgcaaagtcttttagtctcctggtaggaataaggacaccaaagggatgattggtttttcccacccgcagtcatccagacattccaaagtatgttggccttgaagtttttatccttccctcttaatttttgaccaaggagcagagaaacactgtatatttggagaaaccctgagtaagcttctctgtgttgttgttttgcctgagagccttttgggcaagagaagtctttgtggaagcccctgtgtaaaagagataaagagctgaatcagataaatcaggggtaaacatctcccggccccagttagaccccgattccgtttccttcccggcttagtgggacctgtaggtctcttgggaacacactctgcaagcctattagtattctagagtaggaatcactacattctttggctcttagctccagcagcaaaattaataagtgtctcatggacattatgttgagtgaaagaagccagacataagagagaacatgcaatgtgattccatttatatgaagttcagaaataagcaaaactaatcaatgtggatggaagtcagatagcagttgtttctgataatgattgggtgagagcatgagagaactttcttgggacactggaaacgttctgcattttcatctgggtggtggtgatacaggtgtacacacatgcaaaaacttcctgagctgtacacttcagatcagcactcattgcatgtatgtgatctgttcattaaaaagtaaaaaattcattctctcttcttccccgctgctgaagtctgggggcaccatggtcaggtgaacctcttttttttttttttttttgagacagagtctcactttgtcacccaggctggagtgcagtggcacgatctcggctcactgcaagctccacctcccgggttcactccattctcctgcctcagcctcccaagtagctgggactacaggtgtgcgccaccacgcctggctaattttttttgtattttcagtagggacggggtttcaccgtgttagtcaggatggtctccatctcctggcctcgtgatctgcctgcctcagcctcccaaagtgctggaggtgaaccttttagagtctgagcttggagattgttgtaggaatgagggcagagcccagggggagcaaggcataagaagggttgcccttggaaagaaaaagcaaagcagggttttggtgacacagagggccacagcagagttgagtgcacctgaatgggctctgatcgaatggcctcagcctcatgagaaatgcacagtaaggtggttggggagggtttggcagggccctggaggttgggggctgttaccatatggaggaacaagcgggcatgggaaccagccctgtctcaggtacttcagccccatttatggagagaccacttttgcccctctctgcgccattttgacatgaagaggattctgggggctcagaaggaagggggcactgcccacacagcccttgcctcctaccctttccgattcagagggactgggcgtgttggaggcacacagaggatggagtgtccacgaccagcccactaggattccagaaagggcccatgcctgtcataggcagttggaagtttgcttgaagagatggaatgagacttgttgggctagcatgtctgggctctggttgggaaacatggtcggtcagtgggattgaggaatgtggcctggacaaaatgtgacggcagtttgcatagttctgaggcctggatgggagtggtggcaggggcgcacttggggtgtcctggttgtccagcaggtgtgggacacatcccacctgtcccactccaccccatccttctgtcaccttctgagcctaggtactggtcattggatccaggccctaaggctttctgtctcatttctagggtccatatatggaggcctcaatctcagcctggccaggcacactcacgcaggagggagatttcaacaagctttgggaaacagttttctttccaacccaagcagctgccctttgccaatctgtgctagaagtgaactatacacagctctgtttaagaattccccttccagctaattcatcccagcctctctccgcttagtgcaaggacaggggaactgagcatggtgactctcagagacttaagctgccatgtagtggcactttcattctcgaggcataagtcattttttttggccttgactggttggaccaacactgccagttgcacctgtgtgcccactttccttccttcccaatggagatggcaaactgcttccatatggaggtcattggcaccatgcttgcttcccctgcctgctgctctccacctctgatgaaaccaggccagggactaaccagcctcagttgtttggactctgggtctttgctcctgccttccaatctggggctctttggccatgagattggaagagccacgtcactgtggggtttagccaaacctactgggacttcctgtaagtgatgtttggtcctcaggcccagggtggcttttggagtaacttttccttgtaaattgccagttgcctttgggctctcaaaaatcagcatgaagaagataaacaaaaagcaggaacaggcaattcccagaattagaaagtaaaatggctaataaacatatggaaatttgttcagcttaagtagggatcaaagaaacattaattaaatcagttacaagattctgttctcccccattaaattggcaaaaataatacatgatggtttagatatagagaaaagggggctctcattcccctgctatagggaattaaattggtacaactttaccagagggcttgtttgacagtatttttcaaaaaccttaaaaaagatattctctttgactgagcaattccatgttttggcatgttacttaccttaaggaaataatcagagatggccacaaaagttcacatacaaggttgtgtattgaagtgctatttgtaatgatggaaaattggaaatgattgaaatgtccaacaatacaaaatctgttatgtaaatcatggttcattcaaataatgaaacaccatgaaaccattaaaatatgttgtagaacaatatgtaaagacatgaaaaatatttacggtatttgttacatagaaaaagtcagattgtatttaatataatcctaattttatattgacaacaaaaaatccatattggtgcatagaaaaaaaagagttggaaagatatatgccagccatttaattggggttatttctaggtttggagatgatgggtgatttttatttttattttcttcgtgcttttctttcgccatcttcaagttagggatttaatgcaaacttctttgaattttaaattgtttcccattttttattcataatgtattgatgactgtcctttacttaaattattgcatagacttttgtcagttcatgtaagtggaattttggagtcaaatggcatgtccactaaatccatgttgcttttgtaattaaaaacaaaattaaatccctttagggttttgttctagaattctcttgccactaatcaacccctatcagctggctgtatgctcaagtctgctctccctttaagctatgagctgagagcacgtgcctgccagtgccctggagacagaatttgtcagggaggtaggctctgccaccatttttcccaattcctctctgtacttgtctgcctcctaaacttctggaagcaggggcatcctggtatatccgtccgctttcttggcacctgtgactgatggcaggtgcgctggggaagggagaaaagctctaatgtgtgtgaggacctgctctgtgctagctgctggcctagctcttgtcaaaacgctgatcgtctttgatgactctcttacttcacatctaatcccagtctctttgttctgacttcaaactgtgtcacgagtctaaccatttcccagcacctccacaagtaccacctagttcctgccaccatcccttcttgctccacagctgtgaaggctgcccgcaaacgccacccctccgccaacaccacatccaccgactgggctccccatgttcacctgttcacctgtgctccctgcactcccatctctacccagcagccagaggggtcctttgagaacacactgtgaggctccctccagtccttcagacccactggggtgccccatcgcatgcagcggaaagccaaaggccccacacctcctgacctaagcccctgccactttcccccgtgctcgtccactctggccacatcagcctttttgctgttgcccagatatagaagaacatcttcccttaggacctttgccctgtgtctccctctgcctggagtgtcgcttccccaggactccttatggttcatcccctgctgagcttaggtcccagttctgaggtcacaaggtggcagaggccttcacttacctcacttttcttttgttgttgttgttgtttttaactttgagatggagtctcactctgttgcccaggctggagtgcaatggtgcgatcttggctcactgcaacctccacctcccgggttcaagtgattctcctgcgtcagcctcctgagtagctgagattacaggcgtgcaccaccatgtccagctaatttttgtatttttagtagagacagggtttcgccatgttggccaggctggtctttgaactcctgacttcaagtgatcctaggcctcccgaagtgccgggattacaggcgtgagccaccgcaccaggcctgaccccacttttctttaaccccactttactattatcgaagcacctgttgggacgtgccatgtgaggtatgtgcttcttcgccaataaggacaaagctccctgagagcagggactttctgtattgctgtacctctacccccagaacatacaatagggtgtacattgcaacagaccctgagcccatgctaagaggacagagctgaggaggtgccgagatgtcaagagacccatctgttcaaggacatgatgtatacaccttatagattcaagcttctgtccaactctgaatgtgtttgtcctctattcttagaggcatggcccctgggcagggggttgctgtctttgctgccattctcaaaccaatgggagctgctggctggatccctgtagcccaggaggcctgtggggcctgttaggacatgatccgagatttcctgtgagattctgtctttgcagcccacactgctctgtcctcagttggctgtgttgtgtggttattggtgccagtgtttctaagttgtgtgtctgggaaggagacccacctgttattttacaaacagggtaaagttccttgcctagaggctcaggcaggaaacggggccacatcccaactccgtgacagctccaagtacaggagggaggtttttagagtgtttcactcagtcttcccacttgctgcctcatccttgtcattatttatgatttgttgagtacccctactgtgttcagcaggctaggagatataacgtcgtcgttgttcccctgcctgaggccttggagtctaatgtagccagacaaatgactcaggcataaaccaccttcccaggaaggtgcttacttctccaaagtgccgggtttctcaaggttttgatttgcacgtggctttccatttttaaactcccatggggaggcgtggagacaactctggggtgagggcgagggtgggggaggcagggctgggaaggcagactggaaaatgttggctacgtaagggtttttgagaagaaatggcattccaggcagcatttctgagccatgcagttcgtgactcaagataaaacattggtctggggtcaagatgttgctgagaacagagaaagtgaaggcaaaaacccagtgaagggagcaggaatgggaggaaggggccagaagccaggggaaagtttagcaactgaaggtagagcagaaatatttatatccatccaactgtccattccttcatttatctgcttggagaaatgcagtttcatcctcaaaaatgttttatttatttatttatttgatggagtctagctctgtcaccctggctggagtgcagtggcatgatctcggctcgttgcaacctccgcctcctaggttcaagcgattctcatgcctcagcctcccgagtactgggactacaggcacatggcactgcacccggctaattttttgtatttttggtagaggtgggggtttcaccatgttcaccaggctggtctcaaactcctgacctcaggtgatccacccacctcggattcccaaagtgttgagattgcaggcatgagccactgcacccagcctcaaaagtgttttaaaacctgtggttccctgcttgctggataatgttaggccccctttgtgctttctctcatagtacactgtacttttccttcattgcattcgtcacagctttaagtgcttttttttttttttttttacatatgtatacttacttgataagtcatcagctccctcctaatgctctgtgaagacaagttccctgtctattttcttcttgtatcccctgtctgagagcagtttttggcatgtggtaggtgtttacattgaaatattatttgaataaatgaaaccatcaatgaaggcagtgaaagaagcctcatctggtgcactaggggattagaggatgatgtagtgaggggtcaggagaggacttgaaagaggaaatcccacttaatctgctctgatatggtttggctgtctccccacccaaatctcatcttgaattgtggctcctataattcccatatgttgtgggagggactcagtgggaggtaactgaatcatgggagtgggttttccagtgctggtcttatgatagtgaataagtctcatgagatctgatggttttataaagggcagttcccctgcacacatcctcttacctgccaccatgtaaaacatatcttgcttccaccttagccttctgccataattgtgaggcctccccagcaaagtggaactatgagtccattaaacctctttttctttataaattacgcagtctcaggtatgtctttattagcagcatgagaacagactaatacatgctctgtgatgcttcctaaatctacaacaatagcaccaccaccatcaaaaccagtgtctagcctaagctgaaagctgagtgtgtgccaggctctgagtttagtgcttcacatacatgatctcatagaaagtacgtatgactatccttatttcgcaggtgaggaaactgaagcccaaggaagctgaataatttgtccccaggcacatggtcagcaagtagtagaattgggactctcatgtgacaccccctgcccccaccaagtggtgctcagggtccctctactttgtggcctacaaaacagtatctactgttgttgcaaataaccatcatggaaccgaagcaagagaaattgcagctgggtggagggaattttgaggtacatggatgctcttcgagagagagacttttagaaatacagcaacaacaacaacaacaacaacaaacataaagaaaaaagggagacttctcctttggagacttataagaagggaatgtgaatggttagggtgaagtggctctgctggggtcctctttagggacacagtggggctcaggattctcctgaggttcctttcagggcgttgtctattaggaccgttaagctgctaatggagggtgacagtgcttgacatttgggtaattaaaacatctactgactgaataataactttttattgacagtcatactggtgaaggcaaaattaatttgatttttgacatcctcgctgagttcccggctagacaggggctgacgtcatgcagatagagttgttgaccctgtggatggtggctcaggccctcgggtgggcttggctcaggcccagcatgcaggagccagggtggtcaagttcatggcagggaggcccagctgatccaggcagctgagggatgcacactgcagggtcactgtacagtttacatgtaggttccaacactaattctagaaggagtttggggagatattgtttaaggtggaaatgtgaggtgccttatagtccattaatagttagaacaaccccctggagcttacaggtcagacaggaatcgtggagtggaattgggtgtaaggggaaaagggtgccgggagatgtagaaagtcccttacatcatacatcagctcacttgattccaataactatcataggtgattattttattcccattttacagatgggaaaatggaggttctgagagctctggcactgtgccttaaagatagcacgatttaaggaccggcgttgctttctgactaggtctgtcaattcgaatcccaaggaacctgtatatcaagatgaatttctctagtttgatggtagaaatgggatggtccaggaaaagagagattttctttggcagagccacaggaaaaccacatcatatacggctattgatgtcatcatttactagcaagaggatgctgggtgggagtgacccaagccaaagggtgtttgttgctctttccatgattagggcctgggtgagaatcctgtctccacttctctcggagcttgagtcatccaggggacaggatcagcctgatgtcagagacagggactcaccagtggtctagagctgcactctccaatacgatggctgctagccgtgtgtgggcaatttaaattaactaaaatgaaataaaacttaaaaaccagcttctcagaagaagtagccacatttcaagagctcagtaaccacatgtggccagtggccaccattttgggcagtgccatgcacttcatcattctaatggatggagctggaccagaggccacctggttctttccggcagcaagacaagagaggacactgcttttatttccaagctgtatgactttgagtataatacttagtcctctgagtctctgtctcctcttctgtgaagtgggaagtgggggctacagtgagaactaaacccaatggtgtacattaagcttgctccatggcgcttggcacatggtcggtgttcatcaggggctggtagcacctgcatattccggagagacagagacaagcccccttggtctggtatatttcttctacagatcagtttccatttggtgagttacctgaggccacacatcttcctgcctggttgcttctggaatacataataccagaaacaaagaaacaaacaaagaaataaaaacagaaaacaaaccattggagacacatgcttttttctcagtcttcccccatgaacacccctgtcttgccatcctaccaagcctctctatttcctcttccctgcggggtggggcgggggggtgttgcagcactctggaccctcccccagggcttgcatccttagattttctctcttgccttcttctctctttgtccttcaggcaaagataacaagttcaactatttaactcctggagcttgttaatgagttatagaatctccattattttgtacctgggcagcctaagggtggctgttaatggcccacaggaaagcactctgggttttctttgcttatactgccctcccttcctggaagaaggggcggcaggatgtaaactggcccatggttgtccagcttgagcatgcttatgagccacctgaaaggcttgtgacaacacccgcctctgggccccacccctgactcttggattcagtatatcagtaacaagctgggagcttgactttctcaccagtttccaggtgatgctgctgctgctgacctggggctcacactatgggaatcactgttttaggccatgcttcccagtcagctgaatgctcttgaacaatctacattagcattacacagagggcttgttaacaggcagatcgctgggcccctgccccagagtttctcttccaattgtgggagaaggatggaacccaagaatgtgcatttttaacaagatcccaggtgaggctgatgctgctggtctgagaaccaggctttgagaaccgcaggtgtctttacaccaatgttattaatagctctgggatctgtcaggcatgagagcaaagcctgtctcaccactccgtgaccctcaagctacctgagccccatttttcccatctgtcaaatgggaactatgggcttctaagattgttgtgaggattgaataaactaatggttgatgcttaataaatgcttggtttttctctcctctgaaggtgagctgtcttgactgggctgatgctgggctgccaggaaaaagaacacgcataactccggattggcccatgatggcttcctgctgtggcccagccagcactgcccgctttccctctcttgctcctcagcctggcagtccttattagcctctcccccaaaagccaggttgccaaacctctcagccttcaagtgcccatcatacctctgccctcttggtacaacttccctgaattcttcaaaccaagggtgtctcatcaaattgtgcattaactgtgttacaataagaataaactgtgtttatttctagatggcctggagcttttggctgtcttgcttaaatgtgactcaaagcagttaaaaaataaagaaggaaataaaatgaaaaacaacaacggaaagaagaaaagggcaacctcagcctgatgaaagacttggaagagtgagacctctccctctccggaataaattgctagttgcctttcagtgtcttgcactgtaattgattcaaagaaaaccaaaatcagccctgagctgagctggtctgcgtcactctgctctgggactcccgagagcccctgaggggagtatgaaaaggatgtttggggccaggcgcggtagcttatgcctgtaatcccagcactttgggaggctgaggcagtcggatcatgaggtcaggagttcgagaccagtctgaccaacatagtgaaaccccatctctactgaaaatacaaaaaattagccaggcatggtggcggtgcctgtaatcccagctactcaggaggctgaggcaggagaattccttgaacccgggaggcggaggttacagggagccgagatcacaccactgcactccagtcagggcaacagtgcaagactccatctcaaaaaaaaaaaaaaaaaaagatgtttgattttgcctggggtctgtgagaaccctggaaccctggaaatctttccaggattctccatggactgtgttactctgccagggcaggaactactaagagccaaggcaccaaaagaggactcaaaagctggacagaggcaaggagtatggggcctcagaagagcaaacacaaaaacaaaaattctctgcctgctaattcctacttctggcacagttgtggtcctttatagcataggtagtcaatccattttctctagtattctcccataaggagcatcagcgctttcaagctatgtaacttggagtatgttatttagtctccctcagcgatcctagctataaaatgggaataataacgtcttacctcttaggcccactgctcagattgaaattatgttcataaaatcaagcagtatgctgcctaaccataataggtgcacaataaatatctgttcctttttccttatctcagctgtatcagaagcactgatgtagctgttcagagataaaggtgctgctcttggatgcattagcttgtgccagcccatataacttccctggtattctggccttggccaagtgagactgacacactggaagagaaacccaaacagaagtgacaggttgaaatctcggcagcaggcactgtggctccctccacctgcagcttgtgctcaggaaggaagcaggcaaggtgaagagaggcctcccagccaggctgctccctgcagagtcagtcaggaggaaagtagcacccgcttctgccctcatcgctgggatgcagtgagtcctcgggcctcaggtgcaaggaggtatgtgcaatcctcagttcatcgggcctgggacttaatcggagctgcctcctgcatgactgccatccttcttccctgggcagtttagactcagtgaagatgagttaggacatgaagaatgcagtaggattgaaccctaatcagatcattactacagcaagagaaaaaaatcattccaggcccaggctgatgtctctttctgtatcttttatttatttcctaatagcctttatttatctgtttttctgctagagggctaggaatcttccttctcctcctcctttttatcttgccttccttttctctctccttgggttttggttatggcttttctttttgggtgctggttaaatgtggtcctgaggccccttgttgtcaagaacatcattcactgatttctagttcaagacaagaagaaacattttgctgtggtgctggctcaggcttttactaccaggcttccctgcagacctaggtggatgttgagtggacaggtggttgggcttgagtttcactgggctgggggagtgggtggaggggagtgaggagaggctactggagatcaggaaggaaggaggggagtggatctgggaatgggagtttggactagggctgatttttggccacttgaatttaaggagtcctcctgacatgaccttctctaattgaaggaagcaaagctgatttctgcctctgtatcccttgtcatgtttctctgctcctttcaccacatccagacctgtgatgactctgtatgtgaatggccagaatgcccacagagaccccagcgcccctctctgtgggtagcccgcccctgcttgccttccttctggctcaagttgggggacgatcaaggcaggagcttgaagggaaagaggagggctcttgctgtctctggtagacctggcagaggtaactctaaggaaactgcccaaggctgctagatctcagggcatttggtacttcctagatctccttctagtctttaccttttctcctcttctcattcgtttttagaatagcattgcccatagaggccagttttctgttaaattcatagaggacgtctcatatttctctattgataaccctgaatcacatggtagcactgaaggatgctggcaggaaggaagaagggagcaaaaagaaacagctgtgagatggatttggggcagctgaggttgcaacatgttctgcagtaacaagtgtatcccttcctgtggtgtcctggatctttctgagatcgccctagactctcaacagcgacctgtgagttctgactttccaagtgccagagaggaggcaccttgtatttctgggctgttcggggcctgagatccctggccttttcaccaagccagcttccctctgtgagttcagcaaatgtatttggacgtgtaccatgtaaacagtgaaacactaaaggagagaatgagaagaggcagatggaaagctggagctggcatctggcagtttggaagcaaaatcctacgtgttctgtgccaatttccttcatatcgtggccccatctgcctccagccctgttaacacaggcctgggcatctctggatcctgagtgatagtgttctgcttcttgctccttagcatcttccattggcattcctctccaagaagcatgcttcttcacgggaggttccggtgtagctctgcctacacccaggctccacacttccattgctccccctgacaccgctgcatcatccttggaatcccaggtgttagcatgccacctcagttttctgtgtagttctggtagtcttaattaatacctttaattctttccctactctggaaaaacttgttgaatgtgactcatcaagatggtagcaaaccaggacttgaaataataatcataggtctttggggtgctctaccatgagctcatacagcctcctttctgacaaccttttatatggtgatgccactttggattgagaaggcaagaggaacttgcccagaggtggttatgattgatctctttctgcaaggttgtcctaaagtttcatgcttctactgtaggacttgagagtgggactgaagtttcaagatctgaggctgcaatgttgataacttttggcagtcttcatctccccatgattaagccttccttgccggtgaccttcatgtacactccattacagccccataatagccagttcttggcttgctttgtggcttggaatttctcttcaatccagacgtacctacctctctttcttccttcttcctgctctactttcctttttgtaccctaccttgacctctaatctcttggtctcctctgatacctgggtcctcttggctccatttgcttccccatcgagacaaaccccattgttagccagtaaatggcatctccctggagccccaaaatctgctccctccttgcccttcttgctctgcctgctttgacgacccctaccctactgtcctgagttgctgagcaggatagccacgggcccatgctaagtgggttcagtgcagatctgccatgcaaaccccagcaagaccccttgctgctttttggcaggcctttgattcagcttttgttgacctcacagcagctgcttgccttgtctatcctttctgagccctatatcttggcttttaaagtctcagttaatatcttgcatgctttgttgaacatgaagctgcccagtgctggtagtcaaagtattcctttttctaaaccttaatagtgtttttttgttttgttttgttttgttttgtttttttgagatggagtttccctctctcgcccaggctggagtgcaatggcacaatcttggctcactgcagcctccacctcccgggttcaagcaattctcttcctcagcctcctgagtagctgggattacaggtgagcaccaccacacctggctaatatttatgtttttagtagagatgtggtttcaccatgttgtccaggctggtctcgaactcctggcctcaagtgatcccctctcctcagcctcccaaagtgctggggtaacagacgtgagccactgcacctggccataaaccttaatagtgttctgtatcctcaccttttctttcttgtatcacttaaagaaagagtctaggtagttatgtttagtcattaaacatttgcccagtatccactctattcctgaggtaggaatatacatgtaggtaattctctttcctaagatagtcacagcccgtaagatgtggatcctgtaaaaaactgctgtaaaaggtataacaacataatgaggataataacaacatgtgaagagcagtagtcttcattaatgagcacttgctctccatcaagtcctgtgtcaaggacttttcatgtatattacacttaatcttgacctcaatcttgtgacttagggacttacaggattctcattttatagaaaattgagactgagagctcaaataagaggtagagctgggatttgaacccagaatgtgcatttagattctaccaactttggcctcttttctccccaccttccttcaaatgggtggactcatccagggcaggtctagagagccttcagccccctcccacgtcctctctgacctcttggttttcccaagttcatatgtttctgctgaacaagcactgctgctctgacccaccacaaatttagctgctgagcacgtgtagaatcacatcgtgcttttaactgcaggcaaaacccatccccctgggaactgtcccagtttgagggttaaaaaaaataggcagtcatgttaaaatagagataaatactatagacagagagagacatgaaaatagatccaggagggatggtagatattctatctaaatagataccagagataaatacatggaaaccatagataattattgtagggagttatgctcaataggagactctgtggataaatatatagacttcacagatagtagaataatattgaggaagtgaaaaaaaatggcgtgtgggagtctgtacaactctgaggggctgtgctgaatgggactgagccctcagcaccacgtgttgcatggaactgatccaagggaaggtctgaaatacacaggcagcttgcatacttccagaagccatgctgtacactgggtagaaggagtgagtgggattaattgaggactgtgtcagtagggctggagtgggatgggggatgatgaaggcagacctgggagaatgtggcaaggttgagccttttaagttgatgcaggaatgtggaagggccagtggagcctgggagaaaggaactacttggaaagaggagtaaggatcaggcctttccagccaccctactaactgacctgtgtaggtgaatcattattttggcaggctgcctgtacaagagtggggaatgggggcatatgtcaggaggttgctgcccaatgtaagaaccacagagaagaaagtccatcccaggctggcactgttcctgtctttgacgatcatggctctactgtgattgaacatgggattggccaaggctctgcctgcaggtcctcagggcgggtgatggacagctgggataagcttgggagaggcactcactcatatgtgcttctcccctcccttgtctctgttcttctcttccctgtccatccaggaggctgctgggaggactttgcagttctgttggacaaatgttcctatactgtttggctgtggaatttttcattcaagggcctacgaaatgggcagaagagagctgtgggtgtgattcagaaaggcagggctgtgtgtccatttctctatgggctttcagctctttattgaaacaactgagtaggaaggggatctgcaatcattaagtgtgaccttcacatccagatggtgatcccatctcagtatcttactctcctttcccagatgaaagggagagatatctactgtcatggaggaggaacttgtctttaatggccaactacccatcattctccctacatgtctgacgtgcccattgaatatctagccttgttctggggtgagttagggactatggagaatagaaaaagcaaggtctttatcatcagagaattgacattaaaatagtttatgctaaaaagccaagctacagttatctctccataggggagaaaaaacccagatagttgctgcttttgtatcaggagttttgccttctacacatgatttagttactatggcgttctctaaaatgtcataaggcccagatgtgcttttcagggcttagccctgacagtaggccattttggcaaagtcaacttcctctgtaaatcaaggtctctctttctttgtttgacaaggcttatgatgatgtgattcatgaggcatgaagaggatcagacaaggggtatactggagaaactcaacaggtactaacactaccttattagagagtttcagatcagccagttcaacagagaactttaggtacacatctcctgtggagttaaaattccttacctgtttgtacataagagaggttcccataaataagacggaaacagttccaaagaacttttctaataggaacttggctaatcaagtttctagctggacttgtacccagaggatttatgagaacaaaaatcatggggacagtcatccagatggcatctggtaggggtataggttcttctccagcaatattctggggtatctgcccagtcctggctgtgtggaacacccctccctccactccaggcaggagggagggtgtcccagagaatgggtagccctaagcaaccatctggtcaccaagcagagcctcaaaccacctgatttggggacagggaccatatgggcttttcaaggttctaccttgcttacttttgactttagtcttaaagtgctctgaactggaaacaggactaagaagaacgttttctgctagagagctagaagctatgattatatggatttcttcccctggtgttggatgctcctggtggtgggtaggaccatgatcctgtggacagaggatagggccagaactttcagtgcttggttggcctcctatcagtgaggtgctaaggtgacctctaccctctttctatcatgggtagaggaaatacaatcctggagcttgaattggtgcctgtaaaattcagggaacactactgagccatactggggttagttatcgtcacatagttgtcatagatcttgattcagtacaaaaacttgttatcaagcatatgttatgtacctgcaaatgagccaggctttggagatacgaagaaaagcaagatgagatctctgtgcttagaaagccctcagtctgaaagtattattcttacttacaattccttcctccctctcaactgtcaggaaactatgtgttgaggttcatttagcccattgcatgtgggtaagggtgaaggaggcagggagccctaaagtgaagaacagacactgagtctagaatgggactgggacctcagcagcagagacccccataacctcttttgagctaagtttaggctcttcttgaaagctccttggttctgtcatgtccaccctctcgctctggactgcagtggagggggcactggaagttacaatgtggtagctatgggcatagaaaccagacagacctagaccagagtcctagccatgcatgatggagcaaattcaccaacctccatgagacttagtgtcatgatctgtgaaaagggataattgtagaacctacttgatgaggctgtgggagtgtaaaatgggacagtgcattagagaaaaaaaaagaaccaacagtagagaatgtggaggttgtcgatgtgaagtttgcagctggagtaaggaagggtgtggccttgaaggacgagctataaaatcagttggtccatctctaggtgatggtattagatttttaaggcagccataacaaattactgcaaacagcatggcttaaaacaatggaaatgtattctcttactgttttgaaggctaggagtttaaagtaagatatcagcagagccatgctcctgccaaaggctttttaagagaaatctgtctttgtctctttcagcttccagtggcccagacatttcttagcttatatctgtatcaccccactctctgcctctgtctcacctgaccttcttctctgtgtctctgtgtccttttctgtcttttataaggacatctgttgttggctttagggcctgatctaaccctgtacgatctcatcccaatccttattttaattatatctacaaagactctatttccagataaggtcacattctgaggtttgaggtggacatatgtcttttgggagcagaagacactgtacaagtcactacagtgaccaagacagaagcaaaagtagttctattttcatccaattcatctgtttcttctgagctccaggttatttggcctttcatgacaggagaaaagaagttgtggggagtggttcattcattcttccacctattcaacacgtatccattgaacaccaccacatgcgagatggaaacggtgccaggcattggagccataagataaaatagatatgtgcctgctagaggcctggttcagtgctcagttctagctacagatgtgatggacacactcactgtcccaggatagctcagtctccaggagaaggcaggcgggtcatgaggtgaggaccagctacagtgctaagagttctgacagccaccagccagggctctgcgatcacagcagagagacacccagtggggaacacgggttgtccacaaaggcctcctgagaaaagtggcttctgggctgagtgttcagggacatacagaatccattagtgagagaagctgtcttcagacagattggaaatttgtaaaaatgggagacttgagagaacaggacagtttagagagccaccaacagctctgtctggccttgatgcttgcatgagttggtgactggaaagcaagaaatgatgtcgggcagggcttatcttcatccttgtcatcgtcattgttgacatcactggcaggtatggagcactcactatgtgctcctatgaagcaccaagcactcttaacacttcacctgaattaatcttcacagcaaacaaataagggagttgcaccccaggtttatagatgagctgagttcagtaatctgtccaagggatggagcccagtgttgaaccacagcataaggaacttggctgttacccccatccccaaagcactgaaagtgtgtgtgtgggtgagggggatggggaagcccccctactcaccacacatctttacatgaaggaaacaagataatcagaagttcaaatgcctaggattctagaatggggggcctttggcctttggcacaggggaagctgatagagtgggcatatgaagagagaaacccagggctgaccctcagtagcccaaggaaagcaatgttctcacccttctaacaaaaatagtaatggaagcaatgacagaaatgataataaagatagaattcatttggctgtgagtagcagagaagctccaaataacaatggctttttgaaaatggacatttacttctgttttgtgaaaaagaggtttggaaataggcagtccaaggtttttattttggtttggtgatcatcggggtccttttatctaggggctctgccatctttaccttgtagcttcattggctaaattggcagctagggctccagccattgcatcagcatttcatgtgcaggagggaaggagggcagagataggcctacttcatcctatttagggagacttcctaggaattactagccaagacttctgtttatatcccattggctgcaaggggaggtgggaaatgtagtctttatgttgggaagacatgtgctcagctaataacaatgggaaaggggtaggaggcacctgctagtcaatgccagaaactgttatcatttatggagtacttcttgcgcaaaacactttcatccttgtaacacacctctgtgggatatactacagttgtccctcagtattcatgagggaatggttccagaacccacctccccgttctgcggatgatggatgctcaagtccctgatgtaaaatggtacagtatttgcatataacctacacacatcctcccggagactttaaatcatctctagattatgtataaaacttaatacaatgtaagcgctacgtaaatagttgttatcttgtatttttaaaaaatttgtatgattttttattttgttaatttttatttttttccaaatatttttgatctgcggttggctgaatctgcagatgtggaacccacagataccgaaggtcgattgtcctattattacccccgtttgatggataaggggcctgaggctcagaaaggaaactgaggccacagcatgaggaagaggcagagctgagtcccaagcccagctctgagtgcctccacagactggcattttctccatgaagctctcctgcctcacaggggactctaagaaagggttccagaacggagcctccgggccctggaaccagcccagcctctctgacgtctgctctggcctgagttcgccaccctgccaggcaccagatgaagaagcaggaagtgggaaggactggcttagtgagccctcgccctgcgggggcgtgagtgtccgtgggcccatcctctccagccaggcatgccacatgggttccggctgccactctgctcctgctcctgctctgtgccgcttctctgtattatcagcctattctaacctgttgtgggcctgcattcaagatgctcttagcagccacgggctgacccaccccacaccttgtggagggcagcacaagcattccgtgtcccttctgaccactgggggtcaagtagacaattcatttagtggcgggagtgaggccgtggcagggctccctcctcggagctccatttgatggataagcattcaaacttgaccgtactcttttcctgttgcaagtccagatttcatggtcaggtgaaagttaaatttattcatttattttacctttattaaaagcatctctaatgaattattgttttttttcttttagttggttgggggtaagctgactttcttggcaaacaagttattacctgatgccagatttgaaagccgctcaacaagggggtctctttttgaagtattaaatatttcaacataaaaatcaatgaagtacctgaaaaaatggaagtagatgaacaaattaaaaacaacttttttttcttagtgaagactattttaatagttgaaaaaaaaagggaaagaggaaagaggagagaaacatcagacaacccttgtctgatatcaaggtgcaaaaataacccactttgaaatttggggatatattgatagtaaatttaagatgataccaatggctaaaagtaaatattttttgagcaaaaataacttcttacacttggattatgcctccttcttttctttcctgggtgatgaaaatagcctgtgactggggcttcttgcttccacttctaccccaacccatggtctgttctgcacacagcagcctgagccatgtgatgtaagggacaattagctcctgctgttcccccgtgctcagttccaagggcttcccatcaaagtgcctgctcttctggatggtccccatggtcatgcacggcctggcttggggctgcctctctaccctgtctcccccttatcttgccactggtcacttcccctcagtcacgctagccccctcactgttccttgaccatgcagcctcctgtttccctggggactttgcacgtgtgcttcccaccatggagaacaggcttccctgagatggtctcagggccccctacttttttttttttttttttttgagatggagtctcattctgtcacccaggctggagtgcaatagtgcaatcttggatcactgcgacctccacctcctgggtttaagcgagtttcctgcctcagcctcccaagtagctgggattacaggcaactgccaccatgcctggctaatttttgtattttttttagtagagatggagtttcaccatgttggccaggctggtctcaaactcctgacctcaagtaatcttcctgccttggccacccaaattacaggcgtgagccacctcacccagccacagggtgccctccttcacggcaaccaggcctctgctaagatgtcacctccgtgaggaggcttccatgaccttccagactcggtggctttaacaacagaaatctattctggagttcaagctcaaggtagtggtagggttggtttcttcgaatgcctctcttctgggctcttctcattgtatcttcacatggccttccctttgtgtctgtctagtcctaaactcctgttcttctaagaaggacaccagtgacattgggttagggcttgccctaatgacctcattttaacctagttatccccttaaagaccttttctccaaatccagttacattttgaggccctgggtgttataacattaacatataaattttagggggggtcacaatttagcttgtaacacctagtgtcctctttatcccccgaccatagctctgggtagaagcaggtctcactgcacacacgatgggtgttatggaaaatggtgcaaacttcccggcagcatgttccttgtcctgtgttgattgaggtgcctgggggtgcttgccagagagtttggagctgtgcacagagtggaatatgagtggagcatgtgcagagtgaagcatgcatggagaatatttatatgggcctggaataatgtgcattttgtttcaggtgtgtgcctataactaggggtttataggtgatagaggagcaacaatgaaatgaacatgtaggatgtgtgtactgcttaccaagtgaactcctggcttggggtacaaaatcattgtatgttctggactcttgtctcccagcagagccatcgctgatctatctgaattacagattagctggcaccgaagggactgcagaatccatttaaatggatagctctctaatttattaaagggcttatttatgctgttgatatcgggtgctcatcaaattcttggagtggcacaagcccctttcctgccctctgcttgccattgctgctggaagattttctcttttccaggagagctctaaatggctgtagccagagggctgtgtgtgtgtgtgtgtgtgtgtgtgtgtgtttgtgtgtgagtgaaataaaggggccatgcaccttctgtgggctttccatgtttcttgcagctttgcaattagcttgctgctgatggtgaacatctaaatctctggaagaagctagagtaccacatttttctctgctggctcagaggagaatgaaggtggacacttggctgacaactaggtcctccctttactgcctccatcatcatgataattatcatcatcatcatcccatgtgcaatgacattgagatttctggaatctgacatgtagctcttaaattgctttcctgaacatgaccctgcttcagactcttccagccatgtggcttgtgggcaggttaggggaggatgcaacagatggggatggatatatctgtgcattcaagagtccttctgctgggttagccggatagttctgttctcaggaacgggcattggggcatggtggagggtagtggtgctaggtgtgctttgggccagaattttgggaaaagaagttaaaaaatgccaatactaggggtctttctggaaaggagagagacccacagacagaacttcccctgtttgacctaggacttgcactaacctttgacctttggaggaaagatgttcagtcccacttatgataacaacctaataaataccaaacacttttcacatattcatttaaccctcaaaacaatcctatgaggttggctatcatatcattaccatttgattggtgaaaaaactgagagacgttaagtaacctccccaaggcctctcatctagtcaatggagaaagtgggatttgaactcaagaactgtctgacgtcgtagtcctggtgcttacctgccactctggactctttcccctttggccaaagcgatccaagttcctacacacttgctcctgaccctgtcaaagtccaaggccccaagctgtgcttcctgccatctgctcttgccttccccttgccaggcagaatgattggcttgcagagccagtgagatctcacccagagagagcgagctttgtcaccccgtggcttctggggtctgagcatctgctcggctctccgtccctggcccgcccttttcctttgcaagtgattcactgtgtcagtggtgtgtcagccccatactggcagcaggcatctcccagcgtatcatcagagacagaggaagagaaagacagaagagagcaatgagggcaatccgcctccctcagaaagatattgggagtcattttgaatgggcttgacaaaggactaggaacagctcaaaaggtgttctgcaagaggctatgggtgcagccctgggtggctggaagtgggagtcagggttttcccggcagctcacagcccccaggggcagagcagggcactggaaggcactgatcatatttccctgatgctcccctgaggttgtagtcaatagcaatgtagaaggacctttgctctccttgaaggtcaccaggagcttcccgttgctccaccttctggaattggccaagacactcaaagaacagcccttgctcaggacacatttctttcttttttttttttctttttagagggagtctcgctctgtctcccaggctggagtgcagtggcacaatctcagctcactgcaacctccacctcccagattccagcgtttctcccacctcagcctcctgagtagctgggattacaggcacctgccaccacgcccggctaattttttgtatttttagtggaaacggggtttcgccatgttggccaggctggtctcaaactcctgacctcaagtgatccgcacacctcggcctcccaaagcaccaggattacaggtgtgagccactgcacccagccctcaggacacatttctttttttctttttttctttttttttttttttgagacggagtttcgctctgtcgcccaggctggagtgcagtggcgcgatctcgactcactgcaagctccgcctcccgggttcacgccattctcctgcctcagcctcccgtgtagctgggactacaggcgcgcgccaccatgcccggctaatttttgtatttttagtagagacggggtttcaccgtgttagcgaggatggtctcgatctcctgacctcgtgatccgcccgtctcggcctcccaaagtgctgggattacaggcgtgagccaccgcgcccggccgacacatttctttgtgttcttgataccatatgaatgagattattgcttaagtgaggctgatcatcagaagggactttgtcacaaccctaagccaaccaggaagaacatgttgtcgactctctgtggagtcaccccaatggggagatactgagaaagtgccaaagggttttccggacaggctatcttgcctcagagattctcagaccatgcggaaccatgctaaggctttgtggaaggagggaacgagtgagcagcacatttctgtgaaaatgcagtctttttgtcatatttgaaattcatgtgagattattttaattcttgaaacaggtttcttctcagctctaaattatgatctcagcatcaaattgaagcagtgtctttgttcccaagtgaaacgaaggccccgaggcagataataaactacataagtactgttaaccataggtagaatatttactgtacttaattttctacatttggaccatgaacaaaaaaatagagaaattttatcatctcccttcatctccaacctatgccctgaaaattttcttattattaatatttaaagcccatcactctgcatgaatcattggctataaaaagacataaattttgctctatttccattttatacacatatttctttaactcttccatatgatcaaggttctacattaaaaaatatatatatatatatatatatatatatagaaaacagtctgtgcttgtaatgcttcacccacgttgtcctaactgatttgttcagttgagagctccaggaggcttaaccagcagaacccaggggcctgccatgctcctttgtttctttctactgcctgctttctctccagtttgcccacaagtcatgccttaacctacatgcagtactatcctgctgccggggcacttttctttgccagtggcttcggttggctcatcttagtgacaatgggaacgataagatagaagtccctttcagtctgattctcctttatcaaggcaacaacctgaactctaagtctgttccagctgctaggggaggaaaacgttgactttggattttaaaaaccttgaggctgccccgtttaaatgcctcctttcccagtctaggtattttgcagcatggaaccagagagggctggtgcctcagtattgggtgaatacactggaaatcctgggttctcatgttgtttggttgattgagtgaacttgggcaattcactgggtcttagtttcatcaccgattgaaagggcggcttgtcacctaccttatctatgtcagagagtgattgggagagggaagcaatgagccagtgaatgtgaaagtgcttggttccatgaagcgctatgcaaatctaaggagatgctgtgatgatgaagattataatgatgatgatgttttcaagggtcattgaatgaatatatttcatatttccaggaaatatgttatttgattgttcatatgaaattgcattattagaatctgagtttgagtccagtccaaaaattgggaagtgctttttctcctagaactgccaatgattcaccagtggcactgtttggatgtggtcattaagatgccacatgtccccatctgtctactcctcccagtttaattttttaagtggcacagatcttctttaatctctttccaatagagaggtggggagggtgaagagagactgttggcaaagagcttcgagttcctctgcagaaggctgaggccatgggggtctaccacagggcctgggattggcattcattaccagaatctaagctcactggatgcaccacaccctcacacaaaacacctcccccttccctctgccagttcatggctttgtaaagcacagggaagtgtttgggctctgaggttagctacataggagttgaaatcccagctctgttaatttctacctgcttggtgtgggcaaagatctacatctctctcagcctcagttttctcatctgcaaaatggtgatattaagagtacctttctcatggaagtgcaaaaatcacttgcactttggaaaaaaaaatacatgcaaagagcacaatgcctgaaacatagtaagcacttgttgaatgtttgctgctattattattattgttatcatcatcatcatcatcatcaatattttcagaagctaggagcatttctatataacccactgacccagggggaaattgagatccaggagtattttggcctcatctctggggttgccctcataatgttagctaccaagtgctttgcagaaactccagaactgaaataggaggtgccatgctgtcatattttgctatttctgttctttaattaattctaactgtctaattgtatgggatgcctgttgagttgctcattttgcaagacatgaactctaggatgtctctactataaaggagcctgcatctcatctggtagggcacccaagagcttataaccagctgcaggtcaatgtggattgctcatgtgtggggctgaatgccaggaatgaggagttctggctgggaccggggtgggcagaagcagaggacacttagatcagaatttgtagaggaagtggctgtgaactgggtcagtagatatatagaacactatgtctaccttatattaactttccaacaaatggtagttactaatgttattatttaatggtttgctcgcaataggcattcaatatattttttggattgactgattgcctaaaactggcagtacaaacaaatgaggcaggttttattattcccatttctttttgcccagaacggcctctggtttatattgaactgggctcaatgctcatggtgatggaaccagtcataacaccacttgttgaattatcggctttattttccccttagatttgcagcccagcacattctatctaccttggcacagaagagagcaaacctttctatcagcttcctgtagtgtcatattaatcagtaccttttttcagagcctggtctcagggaagagaacttgaggcaaattgccaaaggacatgaaattctgatttttaccagttccattaagtatagcctttcattttgataaggtatttgtacccatgtctgaacttaacaactctattaattactaatatttatctagccctggctatgtgccaggcactgtgctaagtattttacacatatttcttcatttaaatctcataacaaccttagaatctttgtcaagtaggtgctattattttccctattattgatatgggaatactgaggcagagcgagggcaaataacttgcccagctgaggtcccaaagaacttgggaggtctcccaccatagcccatacccctgaccaacgtacctatggcctcactgtatgttgggcatcagatccatggtcagattgctcttgtcaaattcagagtgaagtacaggcatgttgggttgctggtttcaaggactgttcttgacaaataccctttgcatggtccggctgtcagtcccaggaaccctcttaagtccactgtagccaaacccttctatttagtaggtatgaggtctccggccttggctattaagtggagcctccacacactgactgtgggacaggccctttgaatctctgaactcctataacccttgtgacctatataaaattagcctcattactctctgcccccttaccctgctgcaccttcctttgtggctgccagtaccactagacaaatgacatatatttattggtttagttatccacattctgttgccctccccttagaatgttattgccatcaaacaagggctttgttttgtatccccagttcctagaacagtgtctggcacatagtaggttcctaataaatgttttgagaatctgataaatggacactgttgaggggaggctcattttcccagttttccagataggaaaccaaggctcaaagaagttaagccacttatttaaagttacacagctaataaggcttccatactgatcagctgatagataaccccttgggcccaaattctcttaatattttcagctccttgttcctaaaatacctggaatgtgacaacctgttcgatgggtgagtgcttccgttgctgcacctccttggcctgtcatatgtgctagcaaacttctgcacctatactcccctccctgacaccctccacctccattacccaaagatttttcactttccatctcatttctcattgatttattagcataagccatttttagctcactattataataaatctattaactcccagtgattacaatcagcattaattacatctaactttaaagtatcatacaatgcatggctgtagggaagactccactcttggatgtggcagcccctgacacctctgacagcagatgtctggatacctctttgaaagacgcccatgggctttagcatgttggagttagagtcatagcgtgcttactccaaactagagaattggcttttcggtctgactgaccagggttccaactaatttttcccctttctagccatgtgtgctcaggcaagtcacctcatctcttggagccatagcttcctattttcaccatgttactgggaaattaagaaatggcagccatgctgatgtctcacccagcctctctccaggacgtgatagggggtgatggatccctgtgttgagtgcaggctacctcctgtcctattcttggagctattttagatgtacacctggaaatatttatgacatcacttattctataatacatttcccctttatgtatggaaattagggaactatgttcatccagcatagttaacagggttgtcctttaacatttattgggtccttactaaatgcctggataggtgaagaatcaggctaaagtccatggtaaccaagaagagttagccagtctttcaattatggtgctcttctctacatctaataaagctcattccttatttgcattattaagtcctcttgctttgatgagaagtgggaagcattggctaactgtgatcccctagcatggaatggaagactttagggcatatagatgctgtcattagtggctatattaaaagaagaacctgtcacttaaatcagtaattatcatgggggttaaaagtattaacagcaaagttcttgagttagctaaccactgttttttttcttttttactttactagaattatttttagttaacatttactgagaacttataccatgccaagggctttacgtaagtattttatttaaccccaacaatagtctgatgagggagttactgttattaaccctatttatagataaggaaacaaatacttagtttaagaggcatgaccaagatggcattagttaacagagcagcagaaatgatgcttttgactgagacatgctcctcattgtgataaacactgttgccttttcttagtcaagaggaataaaagcatggagtcacaacaacttccttccctgttaagccttattcttgggttgcagagaatcactagcgagagacagagaggcaataggcaaaccttgatcttcagaagagctgcacgaatctacaggaagaaataactgtgagtgggtggagtggggagaaagaggagggagagttaggttcaagaaatgcttcaagggagtggtggggattgagctggttcctgggaggtgtagggttgggcaggtgggttgtcggcatcaaagcaaatgtcttgggctggagcacaggtgtggcagaggtggaaatgtagattgtgtatttggggaacagcagacgtgtacttttactcaattgctggtaggagatgtggttagtgaaataattagatgaccacggtctttgaatgtcaaacccaatttgtacatgtttatgaatgaagacacacctaaatggtattagagagtaaatttgatgaaaattctgcaacagacccatggaaaatattatatatgctctcttatcatattgtttcctaagttttcttaaaattatagtttgtggcagggagtatattgtaggatgagtacaggccttgggatggattacatggtcttggattggaattccaatttcaccatttattagctgagggacagttggcaggttaataaaatagttctgagcctcaatttctttgtctgtaaaatggaagtgatcattgcaagtttgcaaagattaaatgagctaattatttataaattgcttgggggcaattttggctatggtatatactcatcaaatagtagttctattaaattagaaagcacaggaaagcatagcctgatccctgagtggattttccacaaatactatctgatttatttgtgtgtgtgagtgtgtgtatactactcagctatgctttctatacaaacacacacacacatacacacacacacacacacacacacacacacggtatatattgattactcaatctacctagctaaactttaaaaagatacatgtctaatatctgaagtagaaaacattccatatataaatatgctgtgagcccaggccaagatgggaatggtacctaggcccattagaagtcatccatttttaaaatagatgtcatttattagcttaaggattgtaatgtggtgattttgagaagcatcttgttggaatcccacctgtaaaagtctagttttcccctatagcctgggacacacgtgcctttgaattcatgccaacaatagggaaggacagtgaagaaaaccctgatattatattgacactttctttacttctctttggaagttctcctgtttatattcttggtgcttaactgcattaaaaaaaattcaggggcaaattgttggtttaatgaatgcctgtgccttcaacaaagatactattatgtgaaaatagtcaatagcccattcagagtttcccaacagatatgtttctaaaattgttgagtgtgaagttttgcatctatgagcgtcaggagcacaatgccaagtgtgtgcctagcaaaacttcttcactgtctaatgctttcctatagctttctctggcagatgcagagatgcataatcattgattctgaaccatcttcgattagcagaaacttctaacacttcaagtttctctgctcccaacctctctttcaattggttaatgatcttaaaataccctcagctgcaccacagtgtctttaaagggcctgctatttaaaggcaccttgggaggaatcccctgattcacacatttgcatattaggccaatgttctgagtgtgtttgggaactcagcagtttcagataatattgacaacagcctcttggccagggttgacattattcagataaggcttgctacatactgaccttttacatatatcattttgcttagcttaaatgcttaggtcagtgtcaggatcagctaattaatattagctgttagtgaaccccataaacacacacaccattctgaagtggacactttaaaattacatgaattttaaattccattataaaacactgtggggtttttaatagatcaccaacaaacaatattgttaagcaattaaaaaataataaagcaaacctgcttaaatagctgtaacctcacagggtcaaaattatgcctgctgccctgggaacataaactcttgaaaactaggggaaataaactgttaaggacttaaaatagactaggcatactatgtaagtattcgaagcatcacttccatgcctcttgcatgcggtccatttgagcaggagacaagacttgcttttctgtctcttcagcaccaccttgcactgcattctcagctccagggttgcttctgtgcatcttctatcaggcacagaggaaaagcaatttctacacacctcaccagatcttaaaatatatccttctctgattcctcatttgcccttgacactgctggcatttcatttcgtcagtgttgtagggtagtgggaggttacggttgaccttacaggaggaacttgaagcctcacagagataaggtgacaccttcccgattgcacacagttgtatttacagcagtgctggggtaagagcttggattagaactcaggacccttgtggcatccatctgttgctcttgccttccaggataaatctcctttcctggtaagatggtttgacttttacaagatcttgattttcattttaataatcccaagtcttcccctgactctgcaaaggagttaaatttaaatacatagcctacattttatcttgacattttctttagaatgcaggaaaaggaggggccagatattcagtcttcccatcatgagagcaaaatcctactattgtgttggaaccctttgttaagagaggtgtggggccaaaggcttctttgcaagcctccaggctctccagttacccctgcagacaccaggaaaaacctgcatcccacattctacatctctgtggggaatgtacctgtgtcagcattaagtgatggggctcaaagatagtcttgtcagtctaattgctcttgagtcattgcctctcctgtcagagctgtctgtctccttacccataatcctcatcactttgatagcccgtcaggaatatgggactttgcccagccttgccttcatccaataacgttatgaaattgatactgacacttccattggcactaatttctctaagagattggagccagaggacaagtggtttagcttcatggcagttaagctttccaagtagatcaagatggcctaagattgattgacctataccctgaggaaggaggcagggagaagtgaacagagggagaagagggagtggaaaatcaatggctgcgtcgttgtcatcaaatgatatttattgactgcctaagaaggacaatgtcctatatggatattctgaggatacttgctaggcccctctatagactgcctcaaagggagtttaggagataggatggagacatgttggctagggtggttcactgctttacttgtgatattgcatcactagtgtctggagttcaaaacagcagttgattctacccatgactatcttttctccaccttccactcccacacacaggaggcctaagttactttttatcaggcttactacaccatttttcatccagaccaaagggggctctattaatgatgatgctggaacaacagataaacagactgtccagggcagatcaggatgtgtggtcgccctccttttaatagaaccagacatctctgaactgaatgaggagatactccctttttggcaggcttcaatttcttacctgaaccattgttaggttaatggatgcatgaagaaacagacttttgatgaggaggtaccgtgaaggtgaggagttttaatgaattggctagtttaataatataacctgatctagacatcagtacaagaataatactataaactgattgtgagaagtcacaaaatttcaaaataatatgcatttatacattttcagatgagatctctggactttttttttcccttggtaccagggctaactcactactatagaatctccccaccatctacctcaccgcacctttttggggtattctgtttgggtgttcaatattcctgggtatattacacataagtatattatatacatcactcatggaaatattttatctggtgagatggaagaaggtgtaaaattgtgaagaaatgcagaccagtaattctccttacacacctgttcaatgagcagccacgtgctactagttcatgtgtgttcatacacattcttgttcagggagtgcacatgggatttccggtatgtttatgagggtctgctggtgggcatgcgtggaacctcattgcttttccctgtgtgactgaaggggcttagagtacatggccctgtgggtgtcagctgtcagcctcgcccatggagcctctgcagggcggtcagggcaggcacgtagacaggagcaggtactacagtatataaagcgtgccgtacaagggaagagatcacagaactgatgcggtgttatttcaattgattttggtgttgcatttatacctgcacatgctgaaaatcaatcgaccctctgtaccctcgccattcctgctgcagcgctgttcgaatgaaatgcttatatcatttttatggcatgtctgtgaaagggatgagtgagccaagagattaatagaggctgctggggcccttgcccggctgctgtccaggtgtgtggggagaagagacagcagccaaggttcaaggtgccatgaaggtgaccccccctgagaaaacggagaggatctgtggaacaggaggctagacaagtcctctggggtgggacaaggatgaagtatgtgggcagatggagctacaggctaatgtgtttgctgggtgaggtgtccttccttgcactgccttcctctctgtcctcccctggttgactgtctcaggtgctgcctcatgtcctgagcgcacctgtaacatggtgctcttcctatgtgtcatctctgttggtttatttgtgtgtcccacctgtagacctggggacctgttcaggctgaggttgtgtcttttttctccccttttctagtccctagctcagagcccagcacaggagaaggtatttggtgagcacatgggcaggaaaggccagtctggaaggtgtggcatgaatcatgaactatagtctgtaggtcactttcaaggattctagagggtacatattgctacagttcctggggagctgctcttgggagattaaatgcccatagattgaactcccagttcacccagagcctgagattcctccacatctatcaccatccttataatgctggtttatcccttgtgcctgccactgatgctccagcctgggtgctgaagattaggcatatgggagacatggtgctgtgggttgaattgtgtcctgcaaaaagatatgttgaagtcttaatcactagtacctgttaatgtgaacttattcggaaatagcctctttgcagatggaattaagatttaagttaagatgaagtgatacaggaatagagtgcgcccttgatctaatttgactgagggccttataaaaagaggagaagagacacagaaatggacacacacaaagaggaagatgccatgcgatgagcggagaaggctacatgatgacagaggtcagagtgatgcattaacatgccaaggaatgacaaggattggcagccaccaacagaagcttggtggaggcaaggagggattctatccagagtctcagggaccatggcctggctggtaccttgatttccaactgctagcctccagaactgtagtgcataactctgttgttttaagtcacctagtttgtgttttgttgtggttgttatggcagctctaggaagttcacagctttggagaggcaatgcctaccagtgtctggggtagcacttggggcaacgtatattttgtaattgcctgttctcttaaagggactttaatagggacgcagtgaaattcagagatatccaggatagagtccttgccttgtagggatttatgatctagagaattttaggaccagctgagaagcttgaattgggataagtaaggaaatgggccagtgttgaccccaggacaatcaacagcaggatgggttcaaatgcagacaggttccttactgctttttatgggtgtatgtttctgatgaaaattataacactgggtaatggcacaacttccagaagtaaaatgccataggactgctctgtgacttgtccacaagatatccttgccacagacacagggtggtgggctcctgttataggtcctgagacttggatgtactattctagttggaggcaacactgtgactcaacagagagctgggcctgggagatgtgctacctaagatgggcaggtgccaacacctggtccagtgagcactaggcaagaggctacaggaggccagaagcacctgcaatagtccatcccctatgcaaaggtagggcctgtggtcccgcagggcatgcacagcccccagcagaagtaccttcagggcttgtggaactcagcatggtgctacagcaaatattttctaataaaagggaaagtacctctttgtctgatataagatgatagggtctgtgtcaagcccagggtgagctgagtgtgagcacacaggattcttagggcatgggattgagttcataatctcagaatggcctggaagaagacattggactttcatggtttctagctaactgtaaattcaggcctcatttcagcatctttgatttaggtgcattatagttcagaagtgtgttcattctagacctagtgcttttggccgtatgattatgtaggttgaggtggtggtggggtgggggggcgggtgtggtgggccaggcgtggtggctcactcctgtaatcccagcactttggaaggccaaggcgggcagatcacgaggtcaggagatcaagaccatcctggccaacacagtgaaaccctgtctctactaaaaatacaaaaaaattagccgggtatggtggcaggtgcctttagtcccagctactcgggaagctgaggcaggagaatggagtgaacccgggaggcagagcttgcagtgagccgagatcgtgtcactgcactccagcttgggcaacagagcaagactccatctcaaaaaaaaaaaaaaaaaaaaaaaagaacatagacttgggaatcccacagctccaggacactgctacctactagctgtgtgaccttaggcagactgcttaactgctctgactctaattataggacccacttcactgagccactgtgagcgttggacaggatcacacagagcccagtacagtgccaacaagtgaccagtgttggtcaacaagtgatagcagaccttagctattattatctgttttactacacaggtatttcagatcatcactctgacttttctgggggtgacaatatgccatggtatgactccatgtgtacttagaaatactgggaaaagggttttcttgagacataccctggataccctattgcagtgtatgagacccatacaactgtgggtgacatatctagttaggaagtcttatatcagccagtgcctataagaccccaagttcctccagaaaaggattttcttcttctctgcatcagttctctctctctttctcttctaactcattgtgcctcactttaatttgaaagaacttcatattgaagccatccaggatcacctagtggggttttagatattagatttccctcttgtgacctccgtaaagtcagaggcatttgggcttagccctcaggaatttgggttctcattctcttggctttggtgttgaaatcagatcatgcaagtgccaaaagggacatgatgtgagtgggtggaggcatgaggactgtagcagttcaacatggcagcccctggcactgcatgacctcaagtgatgtttcctcccagtcttcaaaagtccccaggaagttgggggaaagttacagataaatctttagggaaaataaatgtctctattttgaggtaacactagcaagccatagtggctagaactgaatttagacatgttgaaatttgaactatgatctcttcatggggcctcgggccaaaaacccagcattttgtattccagtcaccttatacgtgcaatcagaaggtaactactcacttcctgttgatgcctgggatggtctgaaatactgtctgtacaaagagtctttggagaagtctgatggcatctgccttccctccaggatgcttgttttgacattctcagaccccttgctgccggccattcctgtgctatgaatttctggttgcccctgacagctacatccttatgccacagttgtgggtttggagtttactggaaatgtcatgggcttctttcctaaacaaagccagttctcttacaaatgaatttcaagagagtaaaggttgggagtgggaaggagaatgtggctgacttgtcctgttgttagaaaaacaatactggagggtggggcagcaaggtgctgcagtgaaatgagcccagactttgaagtcagatagacgtggatctgtttaccatttattaactgtgtgatcttgggcaaattatgaagccttgagcttgaatttcctcaactacatcactggggataagaggatctacccccagggttgtggtgatgattaagggaggtaagggaagctgagtccaaatacccatcctgccttccccttccttaagtgcgtgttcttgggctggttgatgagcaacatcattttcaatcaccaagtgatacctccaagctatgaatgctgcgaggcatgaacaacgcctttggttcctgtaagaggctgggagggaattcgagccagagaataaagcttatcttttgggaaatgattcagggagaggagcggagaagtgcggagggcaggccttgctgtgctgcctgcaggaccccatgtgccccggagaccacagagggcagagtctgtctggaagccggaggaggcagagaggggagggcccagaggaacaagtctaggaacagaaggccatgactagtccccaggtctgttcttgagcacagcccgtgttcacttggcctctgtcccacatctgccaataaaaattaagaaattgattttcttttgtttgcctctgaggaccagcctctttttatgagacagtaaatggaatccctctctgagcatggctggatttttaattgtgtttgttgtgcttccacttattccgttttatgagttcctgctcccagatttgttgatgcgaagctctcgcccaccagggacatgtcagtgtttgatttctatcagtaggaaaaggttgaggttttaaaaaaatcattttcttaatccaaaggttggcttgtttgcttcattctgacacattaaaaaaagcatgagacccatgcaggcttatttgcttctgctacccaagtcagatctaagtggtcatgatctgactctgtggaacagaagattgaagatttgagctcaactttgggacagagagtggggaggaggcattttaaaaatggattatatcattgaggacgacaagccctttttttttttttttttttttttttatgagggacttctgcggagacttgctgaagatggtgtgatgcacgcgaagtgtctgaatgaagaaattaaagtaccattggtaaatgtggagatgtgatagacagcacccccaccaatcacaactgcttaaaacaatggtgctgcattttgcacgtcaccatggctgcgccaggtgttggcgggagcccttgcgtctaagttggcctcactgagggactggggctgagtggggttctgtttcatgcttccacaaatgccaacccaggaaaaagggaatgtgacaagtcacactggatcttcaagcttccacgtgggagtgatgcatcctcacttctgcttacttttcattccaaagaaagtgatgggggtactgtttaacttcaaggtggtccacaaaactgcagtcctagtgagtgcctagatatactcaataaatagcagtcatgcttaccacagctcccaagagggcttctgagttgggaagtgagattgctgccccccaaccctactttggaaggaagtacaagtgtaaaggaaggagtacaggaatcgattctggagttggaattgtacaatttaagtctatctgttggacttgtcagcccagagctattttatgtgggctggtccaaccctgaaaatatttggcagtccatccctagatgcactgatttagccccaatcacaggggagctggcatatcgccttctgtatataggctcatgtattcacaccaagcactctttgtttgtgaaaaatacttggtgtcagccatactgttgagaaaatgggtagtttggtgtgaagacgcagaactttggagtcaaacaaaatggcttgaaatacaggttccaccacttcctgactaggtgatttttgaaaatgacttaaacttatttgaggataggttttgttgttgattaaatgagaataatggtagttgttgaggatcaaatgagatgagaagaaagtgcccagcaacatatctggcatgtagttggtatttaattaatgtcagttttattttccctccatctttccttttcttgtaaaccacagggatcccagcatccttggggttctgtcactcctttggaatttggagaagaaccacttctacacgttggctgggcaaatgccctagggttgggccagtggctggattttcttggtgccacatttctgagaattgtcaatgatctgtaagtcatagagttgctggaagagaaaggagttttagagccaacagtagggcattagagaaaataattccaaggcagtctttcccctgatctgaaagagggagtgagtattgatgtatcagtgtattccctgggaggccgctcctttttcctccttcattttttgtgacccacctctttccccctctctttctgcattatgaaccctgagaagaactttccctggagtcaccaaaggcttctgcagaatggtggtgtacccacaggtcctcatggtgacttgttgtcccaggctcctctcttgggactggggctcagcccacctgggtggaagttcatgctactgcagtgaagttccctctccactgttgccatcagaaagttttgctttctctgtgtaaaaagtaaaatagagattcctcttcaaagactttcctccccatctaattaggaataaatagtaacttctcttagaagcaaaatttattcaaagacctgtgctaacattcttaaatatctgctagccataataaagaaatcaatgtactttatgttcttagctcccacaatttagcctaaatatttgccctggcatgcttatactggtccaagcaagcattaggtcatagcctgttcatcttccttatttgaaggtgttgttacctttctcagcatttcacaatttacttcctccttccttggttctcctctgcttttcctcttttaaaaagttctaagttgctagccaatcatgacaaatatagaatgtgaggtcccattccagccaatggaaaccggacacagcagtagggtggacgtgtcaggttataaatgaccctgtctcctttgttcaatgtattgtcgtggcaaaactgctggtgggtgtatcttttctgcagaaagtataaaaacggccttgctgaggaaattaaatttatgttcaagtgctatttctttacggcactggggaacaagcatttcaaacatctgggaacctgaatcccaacttggaataaaccatttatggaattggagccattccttgctctacaccctcatttttcccctgtggaagaacagggaggggaggaaaagcctctggacagagaatatggaccattctgtggggaaagacacctgtcagggccatcgagtttctccagttatccaatggttctgttatgatatggttggaagaataaaatccaccgtggatctgaagaaaaaaacaaggcaccaattttagaagagaataatatgatattgagagtctgtgcagacctctgttcccttgagggtctctctccaaagcttgcatttactagaaaggctatgagaatgtttctcttctttttgattattagtgttgcataacaaagtaattgtgtaatttggaatggattagtgacagcagagaggccgataacaggtaataggcgggctgtgtgtttctgtgcgtgtgtgtgtgtgtgtgtgtgtgtgtgtgtgtgtgtgtgtgtgtgttgagggctcaatagacatcaaagcttgactcctcttgacctgccatccacctcagcagcttcaagaaaatagaagaaagctgcccagacagttgagatatttttccccctattacttttccctccttcactatcttaacaaattcttcactgtggttattaaggtgagaacaatctcagtgagaacaaatgcttcctcccctagaggggctacaggtctttgagttttcccctgaggcaagtgatgtgagaactggccagagtttcatggagtaacatgttggtgtctctctcagtggttctcaacctggcacagctccgtcaccacaggggatgtttggaaatgtgtgtgtgtgttttgtggggagactggactttttttttacattttaaaatttttgtcttttagactttatttttagagtgattttaggttcacagcaaaatcaagtaaaaggtacagagatttcccatctaccccatgcccctacccatgcacagcctccctcatgatcagcatcctccgcagagtggtgcatttgttatggctgatgaagctgagactggcttttcatgcccaggtctagggctgctacatgcctagaacagccctgtccaaggaagacttgtcttgacccagtgccagccgtagccctataaggagccctgctggactcagacacaagcaggcaggggccagttgcagaggcttcctcttacatcctttgaagtgatgggcctatgtgctttttattgggttttcttttaaggaatgtagtttatggaagagcaaaggtgagtaagagggccttgggaatggggcaagagtctgatggtgcgatgctcttttccgctgtggatatagcttaataggaacattcagcagtgacatacatcagaagacatgatgaattatctgtaatctatctgggtgagtctaatgaggtgactcactcccatcccaattctcaagggtcaagaggaacatctttaaaaagggtcttggggagctgcaattgaaggcagctgcttatgaggaagataatgtaccagaattgatcaagtatccctttgcataaattctttcccccacagtctgcactttcagggaggcagtgctggtggagggttatgagcacaggctccggagccagactgtgagtttaaattccagcatcaccacttctttgctaggcatctgtccttgggcaggtcactgctctgtgctgtaatgcccccgtctttaaaatggggaaaataatggtaccaatgtcacagaggcattataagattaactcctttacagagcctgatgtgtaggaagtattcaataataaaaattattacaatcatcagcatttctccaactaactcctcaactcactataatttgacttttccttaacattccatggaaacttctctcattaaggtcgcctacacattttccaacacgttggctcattttcaagcttaatcctgtttgtcctcagtgtatttgtctcttgaacttctagacactctccttctttgaatgctttctttctttctttcttttgagagggagtcttgctctgttgccaggctagagtgcagtgggtgccatctcagctcactgcaatctccgactaccaggttcaagtgattctcctgcctcagcctctctagtagctgggatcacaggcatgcaccaacacacccagctaatttttgtatttttagtattgactgggtttcaccttgttggccaggctggtctcgaatgcctgacctcacatgatctgctcacctcggcctcccaaagtgctgggattacaagcataaaccactgcgcctggcctcctcctttgaattctaagacagtatccttttctggtttcctttcacatctctggcagttctctttttccttgctccccttctaatgcccacattttaagtattggggtccccagggctctgatgtctggctttattcttttatctctctcaggtcttcctgggtgatcttattccttcctgtggcttgggagtctgtggcagaacacttccatctatgcaccttaacacagctttttcaaatcctcaaataaggtagagaaggtggagactgttttagatcccaggctcttggaacatttcattgactacttgctatctatggactttatgtgagcagattcaaagaaacagcctttcacaaaaggtttaagtctcgatgtggtatcttctcaaacttctccctcttccgtgtccttcctccatgtcactttaaccatccacatcctataatgctgagaacagaaaggggcggggttggaggtgaacttctgttgcgtgtggtctttgtgtcttcctgcattccgtggtctacaattctaataaagcaagtagtctgtagttgcaggaaggcttgtgagctttggagtaaacaagacagcctgggcatggatcctgtcttcatcattgtattctgtaatctctcgctccagacacctccttcccgcagccctgcggcttgagactgcctctctatgatactaaatccccagcttcctcttttccttgcttgcccccttgttttgctgacatccctcttcctgatgcatgctaagacggggacaagcaaggcaaatttttacacatttgcaaatacttttattttgttcttagagtggattgattttttttttttttaggtgtagatttccaggttaaaaagttccccatccaaatgttgaaggaattgctctgtagaataacaatagtggtattgttatagagaatgattccattgtctttctgattgctgttcctttataaatgtatccctcttgcctggaagctcttagcatcttctctttatctctagggctctggcattttgtaattgtgtgccttgatatacgtgtgtgtgtgtatgtgcgtgtatgtgcacatacattcatagttgtgcacttgtgttaattgtgctggaaactgggtaagtaatttgggtgaaatttccaaaagtttttcagttttccattcatctcttctgttcatattcattttccctgtctctctctctctgggatttcttttaattagatggtggatctctttatcaaacctttgattttcttatctttccttttttatttaccacctctttcctctttgtttaattttctggaagatttcttggctttatcttccactctcctttaactttaaaattttgacgatcgtaatttccaaggactcttcactacccttgaattgttcacgttttaaatattgccttgcttgtatagatgcagtgttttcactgacatctctgaggatattagtagttttttttgtttagaaagtcttcttctgcttcctgcattgcctctgtttcctgcaggtcgctgattgtctacttgtcttgtgctctcccatgccggagctttgctgaagtgcctggtgatcttgactgcttcttcatatttaggaattgagccctagaaagctagtgcgattctgccttgtgtgcgtgggtagggcttgccaactggcaggtttcactgtggcatgatcacagaatgagcttgactttccactggtagatctccaaatgtccataccgagaggtattttttgagagaattcatccagagatgtattctctaatctcctgcagggtgctggtatgagatgagattggtgtgatggggaggcagggttgcaggaagaaggggctgagcttcatgcttcatcccagccctctcctgagccttctgagttcaatgtctctgggtaaaccactagagtcctgtgggaagggagcaaggtgatagtgggggcggggcaccttgttcccgcctggagcctcactccacctcagccttcctggctctcttgtcctttcacatagtgatcctttccagcagaactggctgcctgcaaatattccccctgcagtcctgttggtcatctcttcttcaactctttcctctttcctcctcttgcctctttcttcttttgactttttaaattccaaaatattattgaactatcttattttctcttatcaccacttttcctctttctctttgtgcacagatattttttgaatttccttttttgtattttagtagagggaatggttagtgtatgtttgaggagggaaagaggataaaaaccagtgcttagttttccctgtttaactggaatttgctataaagtttttcaaaaagtttacaaggtgttttcaggaactggcttcttttttgcaaggcaagtgattattgtgagtatttgggcaaccacttacagctacttttccatacggtctccaaacacagtcagatatttgtcatggattggaataagcctgtctgtgctgatggagtggaattcagggtcctccatttgcatttaccagtctcccatttagttctgcctcattggtgcttcacctcgctatttgatgggaaatattctctccataaacttcagtaagatgtaatggatttctgcagtggaaatattgttcaagctgcaaaaccaaatcacagcaggcactttgtctggggcctgtgtgtctagcaaagcagccattcaaaacgccagttgtatgaagccacaaacagtcacagctaattcactttacaggagttttatttgtatgtatgggagaaccacggcaccaaacagaagcattcttctaccaagactgcagcgttaattatctttgccatcttgggctttttgagtaactgtatgtccttactggatttcttctttgggttagaaagaagtgggagtggaactggggttgatgaagacacaaatgatgttctttgaagccattgggtcaatgtgatatttcaagagtggggcagctggcccagctgctggtatggagatcatgatgcagcttcgttactgtcatttgtaaaacttggctcagcttaggtccaggcccacagtggacttacctccctgtgaacaagggagggttgatggctgagtgcagtaaaagatagaggatactcccctgggagtctggtggccagctggagaggctctaggtctttgagccactcatcagagtttcttgatcctgattgtaaatgggactcacctggggagctctcacaatctgatgtccagcttgcacccccagaccaatggaatcagaacctctggggatgaaatccagcatcagacattgttaaagctccctagaagaggaggtacagggtgcacactactgctaggtcatttttaaaatcctattgttgctacataagaaaataaacgtatttaaaactcttattttgaactaatttggacttgggagaaagtgaaaatagtttatgccagggtcatttaaatttaccttgattttccagctgtttccatggtttgataggtgagtaattctcaagaaagagaatttagggtggttctctgaattcagaatacagagcattcgaggaatacgcttccagtggattttgctaataaagaaaatgtgggccgggcatgatgactcacacctgtaatcctagcactttgggaggctgaggtgggtggatcacttgaggtcaggagtttgagaccatcctggccaacatggtaaaatcctgtctccacgaaaaatacaaaaattagccaggcatggtggcaggcacctgtaatcccagctactcgagaggctgaggcatgagaatcgcttgagtccaggaggtagaggttgcagtgagccaagatggcgccactgccctccagcctgggtgatggagagagactctatttcatttaaaagaaaaaaaaaaggcaacctatagaatggaaaaaaaattgtaagccatgtatatctgataaggggttaatatctaaaatacaccagaaacccaaacaactgaatttatatatatatatatatatatatatatatatatatataacacaccccccaaaagtaaaaaaaagaaaatgtttgtgatgggaacagtagttgggggttgtctgtggacagggctggaaactggccggatgtgacgtcaccaggtcctgcgtctctcttggtgtgtgcaggtcccgtggctgtcatcagtggtgaggaggactcagccagcccactgcaccacatcaaccacggcatcaccacgccctcgtcactggatgccgggcccgacactgtggtcattggcatgactcgcatccctgtcattgagaacccccagtacttccgtcagggacacaactgccacaagccggacacgtgtaagtactgggatggaatgctctccctcctggggaggggagggtggttggtgatagaccatgtacctggggttctggaaccttctagggtgacctgctacctgccaacctcccactttctaagagaccctccctgtttgtttcaaaacttgaagaatagcctgagccaggagtccccgggaccagagtcctctgcgaagggggtcctgtgggtctgaatctgcttcccttttttcttcacctgggctcagcaggaccctgggtgctcccaataaggcaggagacacagagaggctgttcttctctctagacctggcctatgtaactaggaaacataacctgactctgtttagacagcagcccctgagctcaccagaacctccacccaagcctccatgagggggaagggaataaagggcagtgagtacctttgaatggaaacatctctctagctgcccctccagtgccccgaagtgtgcactttctgagaatcagatcacagccccagcgctaggaactctcacctccccactgcagatgtctcactcagaccagagggctcagggcacctgtttccctctcatctcccctctcctgttggttccaacccctctccttgtccttctgctgagccctgctaggccccctctgagctcctggagcctcaatgacttgtctgtccatccagcagggttcctcctgctgtgtgcccaggttcaatctgggcccagcaacacccaagcagacccccgctcctcctactcttcctgtccccaggaaatgatccactgcatcaagagagagcacagcagctcctggagaacagggacacccatgcctgcctgagagctggaaggacagaagtgatcggctaggttgaggcctcaccttacagacaggaataccgaggctctgggtggctgccccaggcttcctgacagtgggttcttttcatgtctcagtgggttgcagggtgggcctaggaagaggcgctttttggtcttgctcagcccctgggcagagctctctgtacttggagtacagtctttgtagctcacagaactcttgctgctcctgctggttcatcctacagcagagtgggcactgggctacccccatcagcctttgcttcatttccctggctctgagttttaggagagcattgccacagtgggagggagtgggcttgagtcagcataaggtcatcgtttgcctcctaaccttgggtgttctccagaatctgtctcagtgtgtatcagatgctccctgtcagtatcagaaaaaggacatctgggttctgaaccacggctgggcaaggaagagagatacctgtttttcagataaaccatgggaagcacagaacaaagattagttcacttctggctaaatttcctgtctcagatcaggctcaccccaggactggcctgggtaggactgggaggaaggaccttctatggtgatagctgggtccaagctcagtctagggttgatactgagtttcctagggtgctgttgatatttgagcagagacctagacattgctatgttcaatatacagttggttctcattatctgtatcagttgtgttctgtgaagtcgccgtgaacactgaattagtgaacactgaaccattgctcctagggaagacacgaggttaggttcctgtgagcctcgggtcacattttatcaaccagtcaatacataaccttgtcatatgtttctgtttaaagacaccttatttaatacatgttgttgattcattaacattgaactcatggccatggccactgtcactcttcctgagcaaagcttatctaacacatgtgttttttctgtgaggcacatcacagctgtcctaagctaaggaacactagccaatacttcagaacgatgcttgggggccctaccaaactgcatagtcactagcaacaagcacaaaagtgtaaaaaaatgtggtctggaatagaccacaaaaaaggtagttgtttatagtatgagagttgaaacaagaattttagaacaatgtacatgataaatatgacagatgacaggttttttttttccaattaaaataaatgatttttttttaaaaaggaagaaggcagatatctccttgttgagtctcagctggaaacgtgcctctaaggtcacattttgtcactctacacatggccctaaatgaccaggaaagtgccttgagtcttggttttggcactgcacataaattttagaaagtaagtgaattcccaaatacagaatctgtgaataatgaggatccctctgtcctctttagtggaagctctggattcctggtgcagaatatgatctcgtgatcatatctgctcacagaagctcctgataccaggttatccgcacagttgccagatgggatgactctctggtgtgttggaggcaagtttcctctgggccttcagaataagtgtccccatggaagcctgggagccatggagagagctatggggcctggtgaacatcctttggtgtcaaaacaaagcatagccaaggactcatcccactaggcaaaccatgtggaggaagtcttccttctagagccctctagatttgtgattcaaagtggctattctcaggatccagacggttcttcagtgtaaacaagaaaaggttggtgaaaatgggaaggcagcaggtttactgatgagacttgaaggagcaggggaaaacaaacaatgccttatcagaggaaaatcatgagatgactccagatcatcagaaccctctgatgctggggaaagtagcccttttaaagaagtgggactttctgttccatcagtagacagcaaatggctcctaattgttttcagaaaacatgagtggcatgacagacaatgagcaggagcattgtagctgcatttgtctaatcctccctctgctaatcctttggtgactcacacagacagggtgaaaggggacccaggccagtcctcagcagagatttactggctgagccagcagcaggtctctgattaaccaagccttcatcagtcgagggaacagactccaagacacatccctgtgtgcgatgagccactatcataaataattaaagccacatgcatcttggcatataaataagtggagagtatttatggtgtggcagataaggccagggtcactcctttagggggatggcaagaaccaggaaggttaagagaataaaaatgctcacattgtgaatcccccagggggtctcctcattctgattcccttctttgtcccatttaaaaatgtgtaatgtggggtggaattgcatgaacataatgctacctgacttcaccccttatttccccatccccccagtgatggattaagcacaaatgtgcttttctttctgtacttatgtatttattataaacagtgggatctttctgatggaaatgattaggatgctggtcctctccttgcttctcactttctatctgctttcaatctggtccatagcatttttcctagcatgtcaggctgcaaggatatttagagatcacctggtacaatcccttatcagatgcttgcatccccacacctatgttcccagcaagggctctgcatttgacattgtctttattctgcatttatttagcctttccagggattccgaaagagcggaataaagatgctcctagtttgcaatgtatacagaacccaaagcctaataaagcccccctcattatttttgtatagccctctggttcttgagagcatcaggaaatggatacagccctcctggtcacacagctgaggaccctagactttgggccaggtccgatagaatgagaagtcaagggaccagtccagatgggtcacttgggagaagctaaaagttatttgtagcaacattggaccctcagttacctttgtcacccatgtggcagctctggactgcagtaagttgttcatggatgagggctggactgcttgctgctttctcaggagtcacacattggccttttcccataagccagttgaaaggcttcttggttaatcttaaggatgaacagggttctctgttcatccttttctccccacacccatactcttggttgagaaaacagagaccatctggggagaggcaactgcctctgccccgtccttctgtccttgggtgtccttgtcagcctttgctcccatgttgtccctgtctcagaggaagcagcgtctccatcttcccagagtcatcccctcccagccttcccagtctgggtctgcaaagatggcctgtctccatcctggttggcccgccctttcctctcttctcccccttgaggtagtgtctgtctgctcctctgcccatcgccacacctcttgtaggtctctgtcctgaaggtccatctgtttcttttccccaggagcccctccactctccatccaagatcactttgcaaaacctgaccatgttcctttgagcttcctttcctccttagcatccgagtcactttccactgtgctgatttttccccttttgtctatttaatccatgtttattgagggtttgtgtcagcctttcttttaggcactggaaacactggggaacaagagacacatggtctccaccctcatgggctcacgtccaaccatagctgaacaccaagacatgggatggcgccccctgctgcaggaccactgagagcaccttgtgccctccctccctcccttcctgtcttgctctcttcttcagctttctgctgatgactcaccagcctttattccttctttccagatcatcattcccacacctccagccactaccttgaaatgcccattttccctcctcaccctcactccctctcctttccttccacaccctgttcgtcttttaacacctctttcatttctcgcttcttgtgaattcttcctagccccatgctatcgcaatgggacctttccttccttccttctaacccatagcttagtcagtgccatgccccagtcttgaatgactttgagccaaatcataggtcagcctgccgtttctcaaatatacatgtcctgtttcccaaacccgactttgagtttattcctagtgtcataattctttattttcaacagaaaccacagcatggaactagggtcaaagaaggtgctaactaagatgtgtcagatgactccacgcccaggctctctagaaactcagagaggggccaggcacggtggctcacgcctgtaatcccagcactttgggaggccgaggcggggggatcacgaggtccagagatcgagaccatcctggctaacacggtgaaaccccgtctctactaaaaatacaaaaaattagccgggcatggtggcaggtgcctgtagtcccagctactcgggaggctgaggcaggagaatgtcatgaacccgagaggcggagcttgcagtgagccgaggttgcgccactgcactgcagcctgggcgacagagcgagactctgtctcaaaagaaaaagaaaaagaaactcacagagaggaaaaggaaaatactattgatttgtatcaacagcctctttagagcaagcactgggctggtgttttatgttttttttcttatgcgatctttaactagctctctgagggggagctactactcccattttatagctaaagaaactgagactcagagagcttaagctacttgttccagatcatacaagagagagcctgagatttaaactcagacccgctacctccagcatccatccctcccctatcaaatctcgttgcctagacttctagtgattgacatatactcagcaaggctggaggtaagggaagcaacctattaaggacagttcttttgttttgtagaggctcattcttctgtttctaggataaggacagccctgtatagggtgttcagggttggctgaaggcctctgaagtcatgaggctgggccaacctgggtctggctgttggcacttattacccctctctgaattctccatagaatcaagttcttgaggggccatgactgccttcagataaggtgatacctggccctggggttaatttttatttattttaaagaacagttttagaataggtttagatttacacaacaatttcagaaagtacagagagcacccacatatttcctttaagtccccacctgtcactacagttttctctattattaacattttgcataattatggtatattagttgcaattggtgaaccactattgatacatttttattaattaaagccgcaatttaagaagggttcactgcttgtgttggacaagttctgtgggttttgacaaaagcatagtgtcatgtatccaccatgacaatgtcagacagaataatttcactgtccaaaatgtccgctgtcctccatctgtttatcccctcacacccttcaatccctggcgaccactgatctttctactgtctctatagtgttgtcttttccacatgtcatattgttggaatcatagtgtgtagccttttcagattggcttctttcacttagcaatatatgtttaaggtcctccatgtcttttcctggcttgatcgctcatttatttttttattttttattttatttacttatttatttattttgaaacggagtttcactctgtcgcccaggctggagtgcagtggcgcattcttggctcactgcaagctccacctcctgggttcacaccgttctcctgcctcagcctcctgagtagctgggactacaggcacccgccaccacgcctggctaattttttgtatttttagtagagaaggggtttcaccgtgttagcaaggatggtctcaatctctggacctagtgatctacccgtcccggccttccaaagtgctgggattacaggcgtgagccaccgtgcctggcctgatagctcagttattttattttatttctttttgagacaaagtctttcttgtccccatgctggagtgcgatggctcaatcccagctcactgcagcctccacctctcgggttcaagcgattctcatttatttttatcactgagcagtacttcattgtatggctgtattacagtttttatttcctcacttagtgaaaagcattgtgttagtttcttagggatgccggaatacagtaccataagttgggtggccccaaacaacagaaattttttatctcacagctctggaggcccaaagtctgaaatcaaggtgttgacagggccatcctccctctgaaacctataagggaatcaatccttcctttcctcttcctagtttctggtggtgttgctgggaatctttggcatcccttggcttgcagctgcatcactccaaccctctgtcttcataagactgcctttttgtaagaacaccagacatatagttttaggggcccatccttatcctcacttaagtaatcacatccacggtgactccatttctaaataaagtttacattgtaaggcactgggagttagggctttgacctagcttttttgagggggacataacctgtaacagacaacttcattgcttcctcttttgggcaattataaataaagctgcataaacattcatgtgcaggttttgtgtggaaataagtttttaactcatttgcataaatatctagacacgtgattgcctggtcatgtggtaagaatatgtttagcttcataagaaatagcaaaagtgaatggttataccaagtgaggttcattgcatttcacattagactggctttcaccaatcagctcctgcccgagggtctcctggcacttgtggatgcacactgtccttcttggtgtgcctggtgaagtgtatgtgttgtgtgtgtgtgtgtgtggccacacacgtgtgattgtaccaacctttctctcttctgctctaaagtataccggtaactgatgactgtgtaattcttattggatattcacattgactaatagtgagcatacttcacttctaagctgtcatcggtcaaagaccaattgccatgtttactaaaagactggcacctcttggtaccaaccaatgtgtccatgccttcacagcatttcaaaggcagcttgtcagggtgattctccatgatgtcagccctgaaccccacctttccaggcatcctaattcttttcactttcccagaagtcttgttgacactttctctttccctacatgtcactttcaagctggtttccatgctgaatccatttttccacatgagtttctagattttaaactatagatgtgcattcagctgctcctggctggtcaccccttcccatttctttcctagatctgtcctacatcctccctggctgacctggtagctctgtcttggcgtcgtcttggcccctcactctcatgacattgccaaaactccatctctgttggttctcttcaacttccttttctcttttactccttcagtcagtcaacaaacatccactgatcccttcttaagtaccaggcactctctgttaggccctggggatagagcagacaacctaccctttcttacccctctttagctacagagcagtagtgtggagttcctggcctcactctctttccctaggaaaactgcttgatgcattcccctctaacatatcagcccacaaggcaaagaacatctgcacagataaccaaagctggaactgctagatctgtgcactgtctctttagctgggacatcagagtgtgcaagcggcttatctcctccttttcttctgggtcaattaaccatgaagcttgctttttctggaagaggaattgcccaggccagtttccagctgtggtggggagcacagagcctgtgtgcataatgcagtattaacagtgcatcagcgtgatatagatttctgtcaccttctatgctaacaaacatcgcttagcgtagggtaatgatgggtgtttattcccagccacttaactcagcataatggacttgcagatgaaatacggaaaatgggctcctttgtctaggaggctggggcccttcctggaaccagtaacagaggcaacagcagcagctgctactcctgcagaaaaagtctttctagttctttctctagaagaagtccgggatggacttgcctgatgcaaagaaggagatctggttacagggctgggctgggagcatggggtgtgcggctgaagagggtaggttggcataccaggggctgctgttagcttcctgcggttgttttaggaggcaggctctgctagatgtgacatgggagagaaataggaccaaggtgggtgggggattctgatgggtcccctcttttattctcctggttggatcttgacagtccactctaggggaaccataagatgaatcttggtgactcttggttaataatggaaacatttagctttaacctttttcaccagttcagtatctccaggccctgcttggtaggcagtgtttcataaaacattttaaatggacataaattagtattgtctccctctgatttttcttcaatcttatcttcagattcagttagaataactaggagacccccaggaattctgtgatgctaggtttggtaagcccaaggtctctggagggagggatgagtctgaagacattactagtattctttctttgtagaaagagctggatgttgccagaatgagatatcttgggagccaagcaaataagtcctgggcccatgggcttgaactttagtatacatacaagcttgtccacagagtctcagcctcaagatattaatctctgctgggtgctgatgtctgagttccctaaatgttggtacaatccaagcatagcactttgacatttttcccccattcctggaagaaaaaaatcatatgaagccatttccctgaaattaattgaaaacactagactttcctagcatgcactttggagctaaaaccaactagttcaaagtgacagattagcattcatctccctgggccgagaccacctgccatccttgtggttatcatgacctcatctgctctgtgcctcactgccataatcacatactcaaagttagtagctgcatgcagtcatgctaattaagtaattaggtctaattatgctcactgtaaatacaaggtaattggctttaaaaaagtacttgagggataagcattcacttcatggtcgaggaggggaagaatgatgagacccccagccagcttggagtaatgtcatttcccggtgggatgggagcccaggggaagctgcacccaaaagctgaaggtgggcagaatatggagtgggtcctttctgttttgctcagtggcctagaaacagaaggactacttgtcttcctggcatgttttggcttcagtcttgtcttcaaggagtaagaggattaacttttctccagagatcctttctagctcaagatttcccagagataagtaatttatgttttttcttcgtcaactggattcaggcatccagtctgtattggagttttaaagggtcataattctgaaccaggtaaaacatatacataggggtcagataggaatcaaaagatgagcattattgttgcgcccaagaaggcagcttgggcgtaaagccaaaatgggttttttggtgcttctcctgtcttgaacttggatgtacagatagaacttgggtttgctgagcagatattattcattcagttgcatggaaggtcatggtttaccttaccttttggaagccagagagcttaagaacaccccaggaagctcatatgcacagggagagactccctttccttcatgaactttgcccagaagagaaatgtgatggtggatgatggactccgccctcatcacccatcaaataagtcacttgcttttcacagggagaagccaggaatgcagggtaagggaagggcttagggttacttcccatgtctccaaggagtcagacattcttattttaagggcagaagttaaaaatcagggaaagggaaaaagatctccttctcccacctacaagcaggaatctcggtagttgatggtggtctctattagtgttctctttccaaaagcccttttccaggagaaagcagtcatcatctccatcttgctgtgagtgaacacgtgagtcataccttatgacagatgtcccaaagaatttgtcggttctcattccccttgcactatattgttgatggtcaataactaaaaaccaaagctctacctacatcttagccaagaagccaagagtacaactgctcttccatcttctctccagctgcctttaattcattgttttgcaaattgttctctgaaggatacgaataggcattgcttaaaaaaaaaaagtttcatggtaaaataattttgggaaaacctggattaagtaactttcgtactgtaggattctgagagcctttaattctagagatccctgagacttaccaagaaggacctttggtctgcagcacttctcaaatttcttgagctactgaacctgattttgaggtatacctgttagcatctctgtagacacagatgtttcaatggatcccattcagggctgttctggggtttgggggctccattgttgcctccccagcaggtgtggtcactcactgtgacagtgcccagatgggcctgaacccatttggcacaggcactgtcacatttcctctcaagcccctcggagggacaggacgtagctgcattccgtgggaatagcccgaattggggtggtaacattcttcaggatttctggcagagcactaagtgccctccacttaaatggatcaggggatctttgcctgttgttctcttcctagaagctgttgcaggtgcttctaacacttcctaaaccccagatccggagatgctggtcatggccaaattttcactgcattcctcgtttccaggcagatctgctgcctcttaggaatggaatcttagggagctgctccaaggagaaatgcttaaatcaagatgcaggcagctttctcaaagtcactgtttccaaacaattgttgggaaggtcaaaacatcttatttaaagaagagaatataatggtcttggcatggagtaggcagggtctagcggctgagagaatgagctgaactagggggttacagaggatcctttttcattagaaacaaaagtgacatgagagtgggtggccttagacccaggtcccagcctaccactcagccactgcatgactgtgggcaagacacctgccttctctaaatttgagataagaaaaggtgaccaccttggcaggtatcttttgagatgaagcggtaggagaatttgaaaatactctgtaaacttgtataagtgacaatatgtgatcatccttgccttgacagcaatatttttacaactatcattacaatttctgatataaatatgctgttgggggaaaccagcttgatggtactgaaaaatatattttccaagcttggatttatttctgaaaaaagaatcccctccagcgacttctttcccccaactctaagaagcagcattttatcacccggctccacagctatgaagatgctcttaggagtcggaactgtaatatgttggttgtcaggaaatgatggatgtagatgagcagagggctcaggccaatttccttttgggttaatgagaccgaaactctgtgggctcaactagaaggtggcagagagattcatggcgagattcttttgtttgtgtttttgtttgattgattctttgtttcacccttccctttgtcatcaaacttaattttgttgaaacaaattccccttctcccctgtatgcctgcccatgtgctttacgctgagttctcatatgtttgtgcctgcacggtcccctccgaagttagggcttcaatgtctgtctgcttatttgacttcgtttttgcttgtccttagacatgagtgcacagcccttttgttttttcttagcaaacttacacataggatcttcagacacaaatgtacatatgtctgagtcttgttcatattctcatgttttagacactgattgtatcagttgagatccttttgactgaaagtacaagataatcctgactcacttggcttaagacgttgatcatcacataactcagctaaacagctagggaaggatcctgatgaagtgtattaggactctagctctactttttgtgattctcctgcctctgcctttctgtattttgctatatcaccaggttaacttctctcatggctacaaaatggttgcagcagatccaggcatcacaaccaaacacatggactaggggccccacagggttgtcttttcttgtgggtgggttgaaactgagaaagcttttcccaaagcccctaagtagtctttcctgtttcattggccagaattatgtcatatgtttattcccaagccagtcattcttaaggggaatggaattacccccaagcactttaagctcctccagattctcccctggggctgggaatggaactcattttccctgaggcatatggttgcctggagggcatatgtctccatagaatcacagggctctgttagcaagaaacaggaagtggctgttagaaatgacagtacctgccacccaggtctcctccaggagtaaagcaaatgctcacctaggctttcagccttgcaaatactgtcatcctgctcctctaggagtaagcaggtgcctcttggggtacagggggtagaatgaagatgagaacattgataccgtgtacattttactccttgtatctctcctcttagggagagcaacctagtaatttgttgttgtcatcatcactgttctggtctggtaaactgtcctgctaatgttcaaggctagacttgtatgcctgggtgatgaaacatttctgcttgtggttttagctggatccaactatcttggttgagcaagctgtgtgaattcctcagagctgctatgtgatcctttgggagcatagcttttggagagtaggtgggagcaggtaggtggtgaagagaggggaaaagggggagtagtaaaaaaataaagaaatgcattaacatttactgaatacttaccaagggccaggctctgaacttgaagtacattcaaataataataaaatcatacactgcgtagtgctttttatatcttaggcaccaaaatcagtttaaatataataataaattgtttaatcctcataaaaatcctatgaggtagcttctattactttccccattttgtaggtgaggaaactgaggcacagggaatggttaaaatgtttgctaaagtcttgcagctagaaaatgacaaaactgtgatatgacagagcccaccaccccctcttcttttcatgaagtcattctttctacattaaatcaagctttaatgtaagtgtagtgttccccactttacagattaggcatttcctagggaagcaaggaagttaagggacttgcccaaggtcatttactggtcaaaggtagagccaggattcaaactctagagtttaggagcatgccacttctactaacctgggataccccctcccaccgtcagctgacttccaattcacccacacccccaccttttgggagatcttggagactttcagacagataccagtttgggtgacccatggtgctcaccagtgaggcagcagaaggcaattcctctctagcactttagctcctatgtagtcatccccctccgtgtgtccaccccaggaggctctttggagcttcagatccccatgaggcaggcctcccagaagcagggtccagctagagatgggcattggtggtgatgcaagagctacccttgaaggagaagagcagaagtccttggatccaagttgacctatttttggccgagtctccttttatcctgtcgctggtggatctgtagcttgatttgtcacccagattgtggctgggcctctcagcaggcaatgtataagcttctgtccccagacctagaattgctggtgatatagcaactcttcgcattggattctgctgagtcgagcagccctcatgccactggtaatgaagaagtgttgggattaaactcctaatggctcattgattggttgaattatgctcagtgtaattctgaaaatagattttaaatatgtgcttggggatttgtggggatttgttacttaggagctttaactaaatcatggctggtttgacagagacatcaacacagggagcctgtgcctgggatgtgatgttcatctctgggtgacccctctccccctattccccaaagtcaggaaaatgtgctgggtggggtggctaggggtgggatggtcccccctcccttcacatatattcctttgttcaggtcttgagaaggtcagcttggttgaaccaaccactgcaaacccctcaatattgctaaggtgagatggagacatcacaggttctggattctcccttttatttcctctgaagttaagagcagaagttgtcttctttctaactccaagctttcacttttcctggagctgccactctggggaagaaccaaaggggaagccttcatggatgcttagctaatcagccttttggcatattctggtgccgtcttttccttctgcatccttgtatcctaggtctaaagggggagctgtatgaagggttcctggtcttgggctgagcttctaacatccatgcttcttttggtgaatgccaagttaacttggagacaatagaaaagctaatgaaggcccctctgtgagggagcaatcattagaaaataataatcagagacctcccagcacaccccaaatcactcaccttatatttctttccctctggtctatcagaaacctaaaatgcctcccatttttggtgcaaggtagatcagaaagaaacaagggatgttgtaagtgaggcttaatgaggcaaatttgaaagatgcagttagaccatatttccatggggaatttggtcaggggcttttttttttttttttttttttttaagcttcgtctcttccattttaacctctgtctgaaagggtatattccccttccctgggataatttatactcagccagtctttatgaaagaaaaaaaaatatccccagagaagggaggaagtaaaaacaaaacctggaagaaaagaaaaaaaaatgacactctcctctaataaagaaattactgacgttctacattatgaactgtattaatttttaatggctgagaaaggagttgatttataatgcatccttcccggctgcaaagcctgtccccagctaataaataaatgacaggtctcttgtattaaaagtatccatcatcttacagtgttggaatgtaaatggtgagaggcattgaatgagaggcccctgggagggggtgtgccctgctgtgcccagctggagaagagcctgccatagcattctgcttagttctgacacagcttagcccattccttcatcttgttttcagcaaagtgatccaaatagctgcaactcttacggtccaggagaaagttcataagaaaaggtgatgggccatttaggaacaattcatgatgtaaatttaaattcctggtgtttaagcaaaactgtccatggcttctccttacatatcctcagggcttcctcattggcttcccatgcatctctgggattatgtgttcagtagttcatcctttgatggtggtcacagctctggttagcctctctatgtctctttagaaaacagacagaacacctaacatttgtttctggtttcaaagtaatatacaatcactgaaaatattttgaggaaaatccagaaaagtgaaaagaagaaaataagaatcatccctaatgccaccccaagtgatgaatgcatgacattttgccttatatgcacaggctaataacatacgcagacatgtacacatcaacatggacatgtatagcacacacaaatgagatcatattctgcatacggtttcataatctgaatttgtcatctagtagcctatcatagacctttatttcacaatgccactatttttaatggctacataatacgtggccaggctatattcacattggagccgctgtagagctggcgatcagtcaatcaagatgcattccttcgttcttcattacagtgccaactccagaataaacatagtgcaggagaaaaactgagtacaaagatgatttttgcacagagctcctaatcttggagcaactactatgctgcagagtcaatgcagtgaggctgagagatgaacagagtggcatcatccccgcatgagggagtccacactccagctggggagacaggccaggaaacagttctggagatatgagcataatgagatgcctgccacagagaccctgcaactaaagggcccagtgtgcttagagagcagtggcttgtttaaattaggggagcagaggcttgggtaaaggctccacagaggggagagtgtttgagctaggacgctgcggggaaacttggactggcagagatggacaggaagggccttccaggccaccgtagcagtagcaggaggcagacagggggcagggtttggtgggggcagggctggaggtgagtgaccagagaaggactccctcccggggtggagggagcaggtcttgttgatgtattaaatagcatagcttattgacacaataattacgaatttattcgtagaatttgcacttacatagtccaggcctttgtttatcacgcttgtcactgtttctcagaagtaggtgatgactagaggagtgaagaaactatcaacactgtaataaaaaaggtaaaacaaagtagcaagttattctctctgaatttagggacagttccaggcagacatagagagacccctgttccagaaagaagagaaatgaaacactcactgaatatacctttcagcacagggaacgttatgtagaaaatgagagcgatctagcagttgctgccagcaggctccactccctctgatttatttatattgtcttcataggcttataaaaatggaagtttgcctagatttggagactaacatttctatcctttcacatatgaatttatttcttgatttgttgtgcatatttctaaacatagatcgaccaatgacttttgcttttggaaaaataaaaaagaaaatctcggagctggtgagaagaggaatcagagaccgtgttcctgcaaagaacctgctccggtgttgccggagaggtaggcggggaagcatccaagaagcatttattccttgagcacctgagagagcctgtttttttggcaggtggaaaagtggcagcccaagatcaagtcctagctggtcttggttttatcaccagttagttgcagttgcaatatgatcctcgcttatatttttgccttcaaatcttggacccaaaattattccagcaataggagttggctgaaagctaagtttttcctttcctgctctttaattctcattcacttaacttccttgtagaacatagaagtttttttaatctgaaaaatatctcagagatccagtgagacttatcttttcgtttagtagatgaggaaactgagggccaaacacatagttcaatgatattaaactgcataaggatttggaagaaggaacaggtctaggaccaatggctgttgtctcatgtttctcactcctgaaactgtaagtggaaatgcaatcttttcattttccccaaagttgatgttttttgtttgggccatttaataaggaatgtctgacaaaagtgaactgtctgactcaggtgcagtaattgccacagaaattggttttggtgtctttggggaattctgcagttgaacccagaaggcatccttatcaagtagcgtgttccaacacttttacaaattctaagaacctcagatatcactgttttcctttggagcgatattttgttattttagtaaactttcaaggggcactgccactttgctgcactggcttcctagtgagatacagtgttactatcttaagtctttttttaaaaaaattgagacagggtctcactgtatcgcctaagttggatggagtgcagtggtgtgatattggctcactgcagcctcaatctcctgggctcaatctgtcctcccacctcagcctcccaactagctgagactacaggcgcaccaccacgcctgctacctgggctcagtcaatccacctacctcagtcccccaaagtgctagatttataggcatgagccacagtgcctggccaagtcaggccctgctacaggattttttgtacatgatctgaaatgttgtctgcacttgaaggatctcttagaagggtgtctgagttcctactggcattgaaaaggaaggaaacttgaagctaggcatctgtttgattcccaggctgctttcatgttacttaatgctgtcagatcataaagggaattcatttctattcctcaacttctaaataacttcacacgatttacagttgacaaacagcacactgggactcttcttgcatttcattgtttctgtggaaaattggttgatagagcatcaccaagtgtatggcttcttatcctcaggcatttcttccaccaacactggcgatggtccactgtgcacagagctctgggttagagaaggaaccctgttccttttttccacagttctgttatctggttacgctctgacctagaggaagatgcgggtatgattttaaacagtctttaccagtgcacggtttcacctgctggtagtgggtctttaccagtgcacggtttcagctgctggtagtgggtctttaccagtgcacggtttcagctgctggtagtgggtctttaccagtgcacggtttcagctgctggtagtggggctttaccagtgcacggtttcagctgctggtagtgggtctttaccagtgcacggtttcagctgctggtagtgggtctttaccagtgcacggtttcagctgctggtagtggaatttcagaagaccgttgttcttcgaagtcaggggttatccaagtgtggtgtgcagaccagcagcatcagcattaactggaaacttgttagaaatgcaaattctcaggattcacttcagacccactgaatccgaaactctgggcatgggattcagcagtctgcatttcaataagccctctgggtgattccgatgcacatcaaagtatgagaagcacagtataagatattggtgtagtttcctttttcccccgatcaaaaatatctgaagaagctgagaagtgcttcaatatagttactaatagtgcattataaaacatttatttatttagtaaacatttattgagcatccattaagttctaggttctgtattgggtgttaggagcacaaataaaccagcaaatggctcattctgctgtggttgttttggtatgaacatatagaaatacttttttgtgacagtgatataaacaagaggttctcagcctcattctcaccctgcctgtgatttccgtgctatttctgggcctctccaaatgggcaagtttgccaaagctcggggtcagagtgtcctgagtgagaaggaggatgtaagcaaggcgcaagaatgagccatggctgggggaatgttgccagctctgcattttatttgtgaataataaggaaggaagtgagaaggtttgtgttttaggttgtgttaatacgtttcccttatgtcaaaaccaccaactcctagcaccctgtcaaaatggctgcactgaaatatcacagttcgtcgaggatctcattgtcttataggttcgtggaggatgtagagatggcaggatggcagccaaagagctgaaggtgggattctgtgaagaacaatgcatgctctctccttcatgctgcacaaggccgtagggtacagggtgggtgagctctgttggcttgaacattggagcctagacttgctgctgtgctctctccccatgtttctgtgtgtctgtcataaggtgggactaatgggaggatctgcctcactgggtcttcgtgtgtgttaaatgaggtaatgtacgtaagggatttggaatagctgcctgtgtttaggaagaaatggctcacttctggctgtcagcactattaccatagtctgccttagttatactacagaagaaattcacttctgcactactgggtcaccccagtggcaggcgaagggaggggcagtatctggctgtgcagactttccctgacattactgataaatcaactttcccatagagtaatgtgcggtgggaagtgtctccccatgtagaagctggtgtcctattgtgctgacgtaattcagtggcctgctcatgcatacactgccaggatgtgtatatcttcagctgcggcttcttttcagggatagacccaactcaccatgacccaaccccaaacttcacctcattgccaaagtcaaggagaagattttgccagaaaatatcagattactgagattttaattatgatttccaaatgttctgaaattataggaaggtagcaaatgccccatagtgtgttgagttgagacatctaacctcttcctgtttaatatggaaatgtgcatattttgtaagtccttacagacttactagtagagtcacattctcattcattcccagataaactttcttaaatcctgtctattttgatttcttaaagcaagctggagactgagctttctgttggtgatgaataggaattctagacagcaagaagcgagaggctgacctggtggagggaacaacagatacaaaggtgtggaggtgttttctggggacactcaggagctctggatgagtggggtggaaggtgtgtgggtgggatccagtcatgatggcctgtgtggcatgcttgttcattccaagccatttgaagataatactggataagaaaatatccctcaacaacccatggaccaggaaggaacgaaaagaaaaacatgtccaaaaggatggatttttttttatcccttcatgggtagtgtggtgtgacggcaaaaccctgaactgaaaatttgcattttgggaagtcattcatgtagggagtgaattagaatgcaagccagatccaggtaactgctgtgaatgcatgatgtggtggcaggtgaatgagttaggcacacggagatgtgtctgtgagtggtacaattagcccggctgtttcccaggttgcttctagtgtgataatactttgattttgtgtgtgtgtgtgtgtgtgggtgtgtgtgtaaattccagcagtgctagaggtaaaaatacatttagcaagttctgttattggctcttaagtggacaaaaatataatgcatattttaaaaataaaattctccttattcaataggtttattacattgcttttaggaataaaatctgttagtaatatataaatatcttcaccatgttattcatcatttgccaaaaaaaaagcatagtttcattcttcccatccttttccttttcttccggaaaaattactaaaaagcttggaaaaagaactaccagtttattttacataaattgttctcctttccccaggatactcatatcttaaatcattatagaggcggtggttggagccttgagaatgaattcacccagaatgagaaattgtagagaagacccgaagttccaagccaggaccctggactggagccgtgttttagagaaagaaaagaaaagcagatggcagggctattagaacgggcaaaggtggaaagagttttcacaagagaggtgatgttggaggctgaaggagtagacagagactggaccctcaagttgggttaggagctgaggcctggaagcctggactacaggggtgagggagatccctagattgctgggatctagagggggctggtcatgccaaaacaggccagagaacagaataaatggacaacatggccactgagcttttgctttgtagatttgaaagagatttgggggcaagctcgacatctaatcatttggaagaagatttattctactttactttctccatgatgttttttggcttggataagtttggtggatctgaggacaaaggaatccactatattgtttggaaggaaaagcagtctgtagtgtgcttttttctcactggatctgaggagattctgagaacaggagcagaggtgcctcctgtaacactgcagtggagagaagggtagaggctacctgtcctagtagaaaagtctggatttgagtttcaactccagctccagtgcttacaagctgcaaatcctttcacaggtcatttaacatcatatctgcaaagcagcatcttgtagggctcctggaagatagacaggttgcaaaacagcagcaggagggtcatgtgcaccctataggggtgtgtcctgtggcctatgcagagcgtatcattctttttgaattggttgctagcaagtaaaacttgacaaggttcacacaaaaaaatctctgcatttccagtttctcttgaaagatagaaggatctgtcaaaattggcttgcatttctgcatggcaaccattaggtggaacgtagaagcagtggacctttttccagagcttgtgttcccctttttgccagagtctccttttctccttattgtcttacacccaactctttctgctcatctacactgctcacctggcttttgtggccattttagtttgtgattctctctctccattttaaaaaaataaggaataaaggaaataaatgcaaagtgttctgcatatagtaatagcttcatacattcaatgttagctaatatcatcatcatcaaaattatcttcatagttttaagcaatatgaaattaatgtccctgatatgtcactgaggtaggggtttctccattgcctctttagctataagcctcaaaaacatgcagacaatgacaagtctcttcccactcaactggggatctcttccttctcaactagaggtcccctggaggcagaaagaaaacaaaatcaggaatctgttcttctttaacctgagagtagaaatccttcttcagtcctaatttttttcttctctaggcccgaggggggctggtctgtgaagtctgggacatctgagctactgctaatggaaagggaatcttccagcagggagagtgaagggaggtgctaaacatggaggtggatcttatatattccatttccgttagtggtcaagataatatttcagtaattgatatgcctttatgaataatggagtgtggatcaaaagaattgtagcgtctgtttaatatgaagaatcgctgggggccgagccctggttgctcctcatcagaactgcactgccaccaagagccttgagtgtcaggagactgggactcagaactgggaacttagtagaatttaaaatgtgaagcacttaaaggtcatatagttccatggatagtaaatatgtgtcctcaggaatctgcattggaatcaaccgggagcttttagaaaccactgtgtcctagggcctagggttcttggaccactgtgtccaagaacctcggagatcctggttcttggtctttgtgtggggtctgccagcttctctcggggctcacatgtacaagtgaatttggcacttgcatctactcttgttgctttacagatgaggaaactgaagccctgagtggttaagatacttgccccaagagacctagtgagttggtggcattggtagaaatagaaccaggtgtgccccactttcctttttcaccttaaatttaccagctaacattgaacacatggaacttctccaagagccaaccctgttatgctctaaggttctgggagtgtatttgctctctgtgagttttaggattctgctctttttcttcttctggagagatccaacccaaattaattttagttactttgcttcaggggacacttctcttctgaataggaacctctctctagtgtatgggaatagttttgttcccttagatctctgtatctctagagatatgtggccaagtcatcccagtagataattccttggcaaatcttctgtgcccatgattctaggaagctacagtcataaaggagcattttcttggtaacaaaggtctagaaatgcagcatcatagggtataaggcacgttaggggtcctattcatccacccattttacagacgagattactgaggcatagagagatcaagtggattgcccaagaaacacagctggtttgtgtgcagaagacaggaagaattagaactcaggtcttcagattcctctgcccagtgattgccttgatttcaatgagcacatctctggtggtagaatttcacatgcctggaaacaggcttaagacaaaagataaaacaggcttcccaggcacaaaccttctcttgtttctcaacaagtccaagttagaaaatcttaggattgaaaaagatacaacagatccttgtgggtgtgagtctcctgtccatcccttataggtggccatccaatttcagatcgtttttctagtgaccaaaagtcactctttccagagtgtccagtctcctttcaggcagctctaattgtgaaaaaggttgtcctatcctggcccaagaatcatctttttggggacccattccctggtcctgattgttctgcctgaaaccacttagccaacagtatggtattgtgagcaggatttgatgctgggcacaactgggttttggttccaccctgccgactactggttatgtgtcttggactagtcacttcagttctttaagccttgcttccttgtctgtaaataaggataacagaatgcccatataggatagttattatgaatataactcaagctatcattgtatcatacctagagcacatcccagcacatcaaccccttggttcaggcttgtccacattttggaggccgggggtcatgtctctcctcacgctaggttttttcatttttgtactaaaccttgccatggcctccatttgtcctcatgtggtgtcagttgacacaggtgggcacaagtgctccctgtgcctctcccagctgagcagactctcctgagatgggtctcagttgctttttcacgcatgaggaaggcaacgttaaaattactcgtggggttatcttagtggctctctgatggtgctgtgttctgaaatccacagtttggaaactagccgtcatgggctgtgcatgtgtgagtctgtatgtcatgtgtgcatttggaagcccagctgtgtgcctctgcgtacttctctccctgtgtgcatgtgttgtgctcctgtgtgctttcccacaaacctcagtgttcaagctacggatgtactagcccgttttcttttacatcaaggagatgctcactgcttcttcaaatcccagaatcatgccatcccatggggcagggctttttggttcatctcttatttccacctgaagccacatgtgtcctgtgcctgtggagggctgctgcccccagatagagctgcctctctgctgaggctgccaccagccaccagcaatcccttttcatgtgacctgcagttgtgcatgatgatctctatcaatcctttttccccaggctcctggtagtgcatagcattgcaccaggtgcttcaggagaaaagctgcctccactgctaatctgaaaagcactttgcctggaaagacacctgagacgtgtaagatattaatagctgcagaagtttcatccctgtgtaatttaaatccctttcccgaggaacactcttacggtgggggtggaagagaaggagagaaaagcctagaataattatgagaggttgtgggaaaaatttttttggggatgactgaaatattctagtttaatcatccaccctggtgcttgctggatttggtaatgaacatttttactttctccttaaagtcagaggctattttgacagctacagatgctgtaaattacaagtgttctgatatggtcctgtgagaagctcttgaaaaagtgttccactaaataagtttgggaagggctgtaaataccatctgcctcctagtgagccccagtgcacatcggcatttgaggggatgagagatccttcctacagaaacctcttatgctctggttatccttggatttaccatattgatgtgaagatagatttcctcaaatgtattgccctatctctgataggttgctaataatgttcaagggtaaaaactttgttgaaggggaatggaatgttatggaaattgaagtgtagactgtgtagttgttggggtagatgggggagggtctcaggcttattttggtaagagagggagactgcctcctagcacctttttctgtgctctggcccttaggcagtgggatatacagatgtcaggtattccaggatttgttgaaatctctcctttggagagatttgaggtggtctgttccatgcatggagtctaaagttgagacaagtcaaggcagttatcacacagagtgcagtgggagagccatgcagagggtaagatcaggtggctttgtaaaggaatccatgcagaacagtgtgttttagggcggacagactttaggctttaagggcaggccctttgctggacccattgacaaagtcactgacagctgtttggaacaattgcctaggaaagcctgtccccacaagactcttgtcttaacacaggcatcctaggtggtgatattgttactccatggacttctctggggccatcagaagtcctgaatgaactgggggtcaagctcatgaagcatctggctcctactcaggaaagcatggcagcctgtacttaggcttctctggcagcaccagggtgtgtccagaaagcatcaatcagggaagaacagtgtgagtgcctaatgaggatggatcccagtgagcaaagagacccaaatcaatagagggaaaacaaatgcaggtgaaaacctttggagtaacacgaatatagggttaaaacccagctctactttcatacctttgcacaaattacttaagctctctaggcctcatttttctcatctgtaagatgagaataataaataccactttgctaggcattgggaggatgaaatgatttcacacatggaatactccagcactgtgataaattccatccattcattctgctgccacagatcaagaggagttgaatgatagtgagaccatcattcacttgagccaatccttcccctagtgctacgattctgatcctgttcacttttaccccactttttcaagggtgagtctcacagagcttttaagtttggcctctcacactctcccacacctgctaaatccttataaatgtttcttctcttccctcaaacttccctcactgtcttatttgtttcttgccctgtggaaggcagtagggtacacattcttcttagtgtaaatatgccttgaatttgcacaagggcaggacaatgtgttcttttttccaacagctgttttgatgatgcttggcaacatgttggtatttttggcccgagtagcacatattgagaccacatcctcaaggaatactttttgatctctcccaagtctcttttctagactgaatggtttggattttccattgatgaaaaacattccccttttcttgcccacatgagagtttatctgcccgtttttctgatcatctctctcctcttgtttacagcacatgcaaaagtctcttgggctcttcctatagtttataacttttgttttagttttatattacctggaatagcttaggatcatctcagagggactctggcatagtccctcttggagatcagggatgccaggaggggcattaaggatggagagatcaggtgaatagtgaaggagtgatactggacaaattgtaaagctctaaagctccaccaggtggaggagggcacaggtgctgaaagacaagagaggtaagggaaagcctagaatcaagtcagaggcacagcaaacagaagtaccccaagcaagccagttagaccaagagagaggctcattgtcctgtcttttctttcttatgggtgcgtggccctgaagcaggagattctgctcttgaatgggaaagggttttcaagagactctttgaccagttctccatccatgagaatacatctcaattaccatggagacttccatcttaaaaatagccattgagtggaatcttagtgcaaaaaaaaaaaaaaaaaatccaaatatatcataacagttggttccttacacccttgtgcctatttactcttttgaagattttcatgaggtttgacttttccttatggagaaagtgtttgttcctccatatgttatattggcttagcaatgagtgattccctggttgaaactttgttccacagtcctctttcttctcagcggagcagtgcattgtagtagttagctgtgtgattgttggaggcatcctacctgggctcaaatctcagctctgcatcctggtaaccatgtaacattggcaagttacttaacctctctctatgccatagttctttcaccagtaaaattagaccaatatgttacctacttcatgggattctaaggtttaaaggaaataaaacctgccaaggactcaaaacagtgcctggtgcaaagttagctctcagatcatgccagtcaagaattttctctagggagctctgacgcacactggcatacagtttacctgtgagaccttggctctgctggaaaggaccttaacattttggtcagcaggtctacaggttcatagtattgttcaaagctcatagttggctgcttctacgcctcccagtttatctcctatataattgtcagttagatctagaccattctgtgtgtgtgccacacttgtgtgcttcaaaagacaagtgagtggctagcatttgattgccttgtaaagaattagtcaaataacttaatgattttttttctaaatctttcttgcttcttctcaaccttaagcatgccctttgctctgtgattattgggtggaaccaaagattcatgtgctggcacgctgcctttgatagatttaaagtcttctctctgatcttggcggatttttgaaaagtggtacttgaggtctgggactcattgaatatctgatttgagcttgctggcaaaggtccccactccccaggcttccttcctctttctctggcttggggagtctgctttttgttttttttccttcaataggccgtagttgtgataggctgagattcacctggttagtcatgcttgttttaattttctgttggtttaaaggatggatattttgattcataagaatcttgttttctccgggcttctagcaaggttttttttttttttttgcatagcttctcatgttttctgttgagtcttagtttttaaaaaactgtctctttttatttcaaggtgagagttacagtgaaattgtatacctttgtttgttgctttgtttgccattccaggatcaaaaatctatcctaagaattaaagcagagatctcagattctctgaatgtcagcttctagtttggtgttagttagatatattaattggggaagggcttccctaccctctgtagttcctagcaatcttagtcatcagggatgagggctggggcacataaacactatcacagattcaccatttccttgagggcagggtcactttgctggtggaaattttttgaacaaggccttccattatccatccttggctgaacttatgtctttcttttgagattttatgatggtacagttctcctgtgtgagcctgaatgctttatagcttgaggagttgagaaaactcgaaatagtccaactcttagattttcagtttggaaaaaaaaaaaaaaaaaaaaaaaaaacaaccactatccttcagagagagaaaatccctttacaatacacctggccaacattatcatccttctctgggaataattccaatgatgaagagttcacaatctcccatggactttattatatcaatgcatagatatctatactcatttttactctatttttaaatcaaatatcattttcattcaacaactggcatgtatgtatgtatattgattggaagaattaatattattaatataccagtactccttaaattgacctgcagatttaaccacagtctgtcaaaattcaggcctcttttttgcagaaattgacatgctgatcctaaaacctataggaaaatccagaagattcaaaatagcctaacaaacctgaaaaagaagaacaaatttggaggttctaactcctcaatcccaaaacttattacaaagctacagtaatagagacgatatggtactgccatgaggatagacatagatcaatggagtagaattgagagtccagaaatagacttgtacttttgcggtcaactgatttttcaacaatgttgccaaaacaattcaaaaaggatataatagtcttttaaacaaatagtcctgggacaatgagctattcacgtgctcattgtgaacttggaacccctaccacataccatatacaaaaattaactcaaaatggatctaagacctaaatgtaagcattgaaacaataaaactcttagaagaaaacttaggtgcaagtttctgtagacttggattaggtaatgatttcttatatatgacaccaaaaacacaagtaacaaaagaaaaaatatatatatcagacttcatcaaaattgaaaacttttttgcttcagtggacaccaacaagaaaatgaagaggcaacccactgaatggtagaaaatatttgtaaatcatatctgataagggagtagtatccagaatatataaagaacacttacaactcaataaaaagacaacccaataaaaaatgggcaaatggtttgaatagacatttctcaaagaagatatacaaatagccaataagcacaggaaaagttgctcattataattagtcattagggaaatgcaaatccacattgtaatatcattttatacccactggaatggttacaataaaaaatgttggacagtaaaaagtattggtgaggatgtgaagaaagtagaacctttacaccttaatgttggtaatataaaatgatgcagctgctttgggaaatagtttgacatatattcaaaaagttaaacattgaattaccatatgacctaccaattccacttctaggtgcataatagagaattgaaaacgtgttcatgcaaaaacttgtacatgaatattcacagcaagattattcataatagctaaaaagcagaaacagtgtaaatgttcaccaacttaaaaatggactaagaatataatatatccatggaatattattgaaccataaaaaggaatagagtattggtacttgctacaacatggttaaagcttgcaaacagtatgtcaagtgaaagaagctagattcaaagtaactacatatttaatgattcaatttctatgatttgtccagaataagcaaatccataataccagcaagtagattagtggttgtttccaggggtcagaggcacacagggtgatgaataactgctaatggatatggtttattcatgtgtatgtgtgtatgtgtgtgtggtatagttttaaagggtgaattttatgttttgtgaattatatttccataaatgattctaagagaaaaaaaccctgcctggtatacactgccctattggaagagattcttgcacctgaccttgcatgagctccttgttcgattgtgagaattctcagaggagggggctggggccagcatgacagtgttgagggtctgagtactcaaggcaggggctatttactaactagtatggacatatgtcgacattttaacaaagagtgtgaatatacagctacctgtccactattagtccctacctgtgtctaaatcctcagacttccactcctggattaccccactgggggcaacagaaagtgtatatacacccctacacatttcttgaatatcaccatcatagcactaagaagtctgatacttgaatatcaccatcatagcattaagaagtctgataagtatcactatcatagcactaagaagtccaagccctgtactctcagatccctaagtctgtgggtcaggagctgattaaatcagcatttcaattaatattttggagtaggtccttatagaggatggtggaaatttgtctggttctatggaatcatattgcaatgtaatagaaatacctcctccctccctctttgataagaatcatttgtattctttagtaagcctctattgtctgtcccagtgccatcttcctcatctgaattcagaattccatgagcctatcctaagtctgaaagatgtagtcttaaagataaacttttccaatttagtcatgtcctcagctccttatcatgcccctatccacagcagctttttgtgatagggcctgccatattcctcccagggaaatatctacatggctcgatgcatgggaaataaaatttgcatgaaggaagaaaagacatctacatgttatttattcagtgacatcccatttcattgcaaaaaatgtttgaggtgctttgcaaaaatgcaaatgtaatgcaacaaagatgaataatgggagtgacagtatctggtaatagtgggggatacatgtaagaaaataaaattagtggcaagtttagactactaagtacctgctgctagagggaccttagagatctggctctgggcatcctagtggccaaggaacaaaggtaagcatcaaaggttacaggctgtcattcagaggaagaatatcttttccattgttcagaggaatagtgtggggatgcagtattatactttccagcttcctgacagtagatctaacagtgcacctcttaggggtgtttgttaaaatatcctgtgatgcaagtcagtggcttcatgtccaaacccacttcataaagtaggtgggttggcatgggggagagaagctttgagaagcacccacaggagcctttcataccctgggcagactaaggcactgcttggaaatggggatcctttgggaagccccatttttgaggattgattgaattgccttcctccattgcagtacatcacctctggggccttactggttggcttttgcagccagcaatcctcctccccccacactccctaccagcaaggcatttctttccagggttattggaacttcatcatgtgaggcagtaagtcattgcagtccagaacaaatctcacttgacatttttatcttgactcttctgggggcctttaattagcatgattgcagtgcaggcaattgtttcaatggagtctgtgttgctcttggttggcataatggctattgaagtttctctatttgctgtttctggccatccaggaaagattctgattaaataagtaattaaactccctaatgtggtataataaggggtggttggctgtgagtttacatggattaaaaatgcatcagaatatggattcatatagttataaaagcatcactgcttaaagtccaatgtgacttgtttgcacgagagctcccaggacttccagagctctacaacagccactgtatagacatctgaagctggcatcgccactgccccataacacatacagccaccatgtccttggccatgtggccatgatgcacacaactacagcaggcagctatgacattctcagctcttgttaatggtctatgggcttttaggagcagcatcagtatatgttatggttaaacatggaactcagctagcattagtggtcctgattctcccagttcctgaatcataagctgcagtgaaaatttcctacttgtagcagtggttctcaaccagggtgattctgtccctaggggatttttgacaatgtctagagacactttcgatgatcacaatggggtggaggatgctattcacatccagtgaggagagaccagggatactgctaaatatcccacaatgctcaggacagccccccaaaaccaagaattatctggtccaaaatgtcattgcactaacattcaaagataattcctacattaccttctttagagctcatgatgtttttgtgacggagaaggtacaaaagttttatctcccttttacagattggaaaactgaaacttggaaagacagtgactctcccctgtcccacagggctagaccatcatctggttctcattctacagctatttgcacacgttgtgtgggatggtgtgagctttggggtctctacaagtgtccaaaaggggcacaagtgttatctaagtgcctatggcacatctctggagaaactatgaccccaggtttcttacgtaagaaacgtacctcaatttcatattttttccctaggaatcaaagaacacatatccatcaaaagtattgtataatgataacacttgatcacatttgacacttgatacttgagatttttagaataagagtatatgatctgccaaagagaactcatataaaaaaaatatttactgctcaaaatctgtgtgtctgtttgtgatatatttgcaggtaagatttccctccaggccctgccaatttagtggaataacaagcgggagaagggtcatgcagggtggtaagaatgcagttgtattcacatcctcgttgcctgagaattttgaaggatatatagaaggaggagactctaccacagagaatgcatagcaaatgtctcattgatgcttcatcgccttctctctcttcttaggacactcacggctgtcttgttgaatattgtttacagctcgcatttggaattggaatgtaattcatgccaattgttgccagacaattgtatgaagcactgtatgcttcacccaaatatctataatcccttgggtctccaagggaagtatagttatccccattatgcaggtgggaagactgagctcaggaggttactggtgcctgatccacatctgcctaatggcagaactggaagtgaaacttagaatttgcttacattccccttgactacactgccatgttagtcacagcaattacatcttactctttgctcctcatttaggaagaggaaacagggctgctaggcattgaatgtgttgttgtatctcctgcctcttaaggcagtgagtgcatttgggggataataggcacagtgaggtcccaaaagaattcatctacacactaaaagtttataaaataaattgacctaacattaacctcagttcttccactgatcttagcaagtctaaagtggctctaaactgagtagagtataccgcagttcttggaactcagagctcctctgtgtgctgccatgcctggctggaagagccttatttaatagcaagtggcttgcctcaggtctgatgaaataaagtcaagggcatgaggtttctaattcatagttcaagcattgccacacttctttaagcattgcaggcatgctgtcctgagtttgtgctgaacacatcaccaacttcttttccgttgctctcctgtgttgctaatggtcttgtcataatcacactggagaaccctggagcagcccagacactgcctcctctcccaccccctatgtttaatctgatgccaagtttctgatttgcataagctctacctttgcatccctctggcatccatcctcttggttctccttcagcgatcccagccctaatgtatcacgtgtccaggatggtactgtcaccgtttaacccagggggccacaaactatagcctgcaagcccaatccagcctgtttctgtacaactcttaagctaagaatggttttattttattttattttattttatttttagagacggagtctctctctgtcgcccaggctggagtgcagtggtgcgatctcacctcactgcaacctccgcctcccgggttcaagtgattcttctgcctcagcctcccaagtagctgggattacaggtgcgtgccaccatgcccggctaatttttgtatttttagtagagatggggtttcgtcatgctggccaggctggtcttgaactcctgacctcaggtgatccacctgcctcagccttccaaagtgctgggattacaagcatgaaccatcacacccagccggtttttatgtttttaaatggttggaaaaattcaaagaagaatcatcttttgtaacacgtgaaaattatatgaaattcaaatttcaatgtctctaaataaatttattgggactcagccatgttcattcattgcacattgtctatggctgccttcgtgctgcaacggcagagttgagtagctgcaacagagaccgtatggcctgaaaagcctataatatttactgtctgtctcttgacagagaaagcttgctggcccctgccctagctagaccagccactgctgacctttctctgtctcatctttcattccttttaatcttttctctggtcatcccctctttgaaatccttcaagactcacccattgcccaaaactctcaagttccttcatgatctgcccccaagctaatcatttccatttattaataggaactccttgcacttccccaagtgtgtcttgtacttccccactatggctgtcagtgtggtgctttattccaggaataacttctcttcctatcttcttaggagaaaatcttatgtctcctttaggcctcatggcaacagctgtctcctccaagaaagctaagtctcctactattgctacctcttaggaatgccctagcactctccctgtactgcttttattccttgaggttctttctgtcacagtctgactgtttcagcctaggttgtgcagtttctactaggggtgagatctgtgagggctaaggcacagatttggtgagtgcaggctgggtgtgtctacctgagcaggtgctctctgggctccatgggacactctgctttcccaggtgtgtaattcctatgaatttccaggacttttgttctcctaaacctatgtgacattgttttgaaagtgggaaacagaattcaacatttggaaattgatttttaacattaatgtgaaaagccattatcattagttgaaggtacatcacttaatctaaatctcttatctaagtatctatccatgtctatatctattgacccaacatctgtcatcttcatttatccatctatccatctgtcagtcttcatctctatctattgatccataccagtgcccacatctaaattccacagctgcagttctagcactgtcacttgattggtgatgtcccatttttatggagttactcacagatagtcctgcaacatcgtgttcctaatctcccttactgagctgcttcccatttttcccatattcctgccttatgttcctgccaaattatgtactttccttctcagggaagaaacaattcctgttttagtttgctagggctgctgtaacaaagtgccacaaactggatggcctagaacaacagaaatttattttctcggttctggaggcccgaaatccaagatcaaggtgtctggagggctgtgagccccctgaaggcactagggaaggatctgttccaggcccctcttctagctttggtagtttgctggcaattttggacatttgttggcttgtagacacattatgcagatctctgccttcatgttcacatggtgttctgtgcgtgtgtatctatctgtgttcacatttttcctttgtataaggacgtagtaatattggattagggcccatcctagtgacttcatcttaacttgaacatctgcaaagatcccgttttcaaataaggtgacaatatgaggtactgtggtgatggtgtttgaggggcacaattcaatccctaacagttccctatttgctatgctttgtctgttgctcccgccacatggaatgtctcccgctccccagcccatgcatttctgcctggtgaccatttttctcactgcctctttcccacccgcatgtgatcttatgaccactccctcactacaatccctcagctgtgggtgtatgcctctctcttgccactcaccagtgaaataccataatataatctgttttaggaccccatgactaaacttcccatgctctcttttcctttttactttctcagctcctggaagattgatatttaggtatttgcaaaattatttttaggtaagcttacagaggtatagactcccattcttggcactgggtttttagctcctctttgcagtcattgttttttactcttcttactcatcttgatattgcctctccctttatccagctctgaacatagtggccatgagcataggaggccctcaatgtgtgttggttatttggagatttggaggacagtgcaagcagggatttgatatacatttgctggtatctgctatagtgcctggcactgcaaaatgctgatgcttgggagctgtgtagtatatatcttccactctttttctaggcctttgggggaggtgatgacacctgcactgcctaaactgagtattttgtgtgtgtgtctctgtgtatgagtatgcttccatcaaattaaaaaggacccaaagaaaggtgaagaactattcttctctactgatgtacaatgggacacctttcctccgtcttcttttccccttcatcaccttcagtaacttcttcatcatcacaaatcttggaattcagagccaaaaaatcccaactcagaggtttatattatttgattttttagggccataaatttagaatgagccagctatctgatcctattagccacatcttgatcttagataatctgcttaaaattgataccaccctggaatgtggactttactgattgcatttcctgccagattctgacttttgtcttttgctcatcatatcctaaatggtacggccatgactccaagggaagttgagcaccctggggtagcagttgggacttgaagatgttggttccaggagccatatggccaagtcagggtaggaggcattgatgttaagatattttttttctttccttacctcagagttattttgaaagtaacataatcatttttaaagtccttagaaggagaaatgctttgcaagtgccaagatactgtagtgcagcctgaagataatgtggcatattgttgtacagatcacacacacacaagtcagattacatggttctgaaaaaacaagacttcaattgtctgaaatccgtatctatcacatgggaaatagagagagctgttggatttgtttcctgcccttggcatctacatatagagggggttaagaacatgggagctgagatggcaaaacctggattcaagtcctggctctgcctcccattaacagggcaacttggcatgaattactgagcatctctgccccttcatttctgcatccacaaaccagggtccataccagttctcccctcatagggatgctgagaaggtcagattagaaaatccatgcacagcactttgctcattgcctgggcaagtgaaagtgcttatagatattggttgttggtttttttttccaaatagtcttattaagaaatgaaaaataaatccatgaaccatttcattgtagtgtatgcgtctgaaacagttccaggtaagaggagaagaattatcaaacagaaatgaacaattaactgccaagtggcttatacagagagtggagtctgagctgggggtgaaaggattgaacggcaattggatgagaaaaataaattagaagataagcattcaggacagtggaatactgtggaagtgaggacagaagctgaaaggcatacagtgtggtcagagtttatgtgaacaagagagtgtgagtagggaaggagtagatgatgagaccaaatggttggctggagatagagtatgtcaatatcaggatggcagcctaagctgtttgggcatcacacagtggcactttcaagtcactggtggcttctgagtgattggtgaatggaatttttattgatatgattggacaataatacataaaatggattaacttaaggactggaagctgggaaacatgttaagaagcccccaaacagtggccctaaaatagggttgagtgatgaggaagcataagccaagatttgttcatcatctagtgtgtgccatgtgccagatactgacctgggtgcctttaaaattaaaaaaaaaaatcacaacagcatctgggagatagacaaagatatcctcagatatcctcagaaggggaaactgaggcttagggaagttaagtaatttacttaaagttactatctctcaacttttctgccatgctttgctaaagtggggatctaaattaaagaatgtgttcatgagatattccaaaacaaatcattgaaatcaggtgtttgatatggggaattagaaaggcactggcaagaaatgaagatgactccaagagtttgaacttaggtaattataagcatgatatgactttagagaattggcctgtcagaaagggaaattgtttgggatggggattgtagaaatgttgagtttgttgttatgatgcacaataatgggaatgccaagaagccagctgccattgtgagaataaaattcagaagaaagtttgtgctggagataaagggctagaagtcaccgcacaggagatggacattaatgatggagggtacagggagatggagagaggagcagacggctagagcagcatttcccacattttactctgcatagaaatcatctgaggattctgttaaaatgcagatcccaatccggtaggttttggatggagcctgagatgctgcatttctgacaaactcctggtgatcctgttgctgtcagtctgagatccaaaccttatgtagccaggggtgaaaagactgatgcttgagaaactagcatagggaccagtgaaggaagagaagccaacagaaagaaagggagcagaaaggtaggaaaatgatgaggatggtacagtactctaggtgtcatggggggtgtgggatggtcaaggtgccacattctgtggaatgaacaaggtaaaatgatcaaagagtggagaaaatctagtcatggggtaaccattggtgaccttcaagaggtcagttttgtaaaaggattagaacttggattatgggaatgtaatcatgaatgatctgcaaaacagtggaggttagggttggaattaagttatgcaaattgttggtatccaaaggaactaagaaaatgggatgaaaacaaatggtatggtaaagtgggggacattgctccatcatttactaggtaagagactgagagtgtgggcatacatttgtttggtatgtgtgcacatacccaaagatagagataaacatatatagatttctgtacaaaagggaatataacagcaaaggcagaagatgttgaagagacaggaaataattgaagaaggaagttggagataatattgaaggtatcagttaaagggttagttttggaaacaaaataaatttttctccaatatagaaaggcaaataattgggctctggtcaggatggtaccataagtttgtgctttagtttcctcctctgctccaaatatgtaacaatgacaaaaattataaaaagacatggctgggccccaaaacaagataaataatctgtgaacaagaaatggtacagaaataaaaagtgatgtgcagagttacattcattgttacgctgggttccaagtctagaatcaaaaagtcagggcaggaatttagctctggagggtatctgcagaacggtatgtgctccacattgtcagaggatcagagctagactcactgcttcaagtcttggggtggggatagtgaagaaaagagtctgaaaagataatgtggctgacccctatctgggttcctaataggaacctgtgagcctgaggaagtgggagagagacgataaagttgtagctttgagaccatgaactgacttaagccgctcaactagctgaagactgttgtactctaccctcagtattacccttgtaggaggactccaagtcattattataggatttggtttataattgaagtcccaggaagctagatggaggtaacaacaacagcagcaacaaattagacaatatgagtgagaagaaaaggaaaagggaaaaaacaaagaaaaccagaaaaaattcttttcactcaaaatgaattaaagtgaaaaatcttgaaacaagcccaggcatgatggctcacacctgtaatcccagcgctttgggaggctgaggtgggcgcatcccttgaggtcaggagttatagaccagtctggccaacatggtgaaaccacatctctactaaaaatacaaaaattagccaagtgtggtagtgtgcacctgtaatcccagctacttaagtggctgaggcatgagaatctctttttttttttcgtgtcagcactagatctatatgatttattttcttggactttttttttatactttaagttctagggtacatgtgcacaacgtgcaggtttgttacatatgtatacatgtgccatgttggtgtgctgcacccattaactcgtcatttacattaggtatatctcctaatgctattcctccccctcccccaactccacaacaggccccagtgtgtgatgttcccttcctgtgtccaagtgttctcattgttcgattcccacctatgagtgagaacatgtggtgtttggttttttgtccttgcgatagtttgctgagaatgatggtttccagcttcatccatgtccctgcaaaggaaatgaacacatcattttttatggctgcttagtattccatggtgtatatgtgctgcattttcttaatccagtctatcattgatggacatttgggttggttccaagtcttcactattgtgaatagtaacacaataaacatacgtgtgcatgtgtctttatagcagcatgatttataatcctttgggtatatacccagtaatgggatggctggatcaaatggtatctctagttctagatccttgaggaattgccacactgtcttccacaatggttgaactagtttatagtcccaccaacagtgtaaaagtattcctatttctccactgttggacccaggaggtgaaagttgcagtgagccaagattgcaccactgcactccagcctgggtgacagagccagaccctctctaaaaaaaataaaaataaaaaaaagtatgaaacacatgaaaaaaatataatgataagcatgtttgttattatgtatgacttttattcagtaatattcttgtaatgctagccacttcaataagataaaagaaataaaagaattggaaagacagattatccttattgtgaagattctgatcaccctacatagaacatcaaagggtatttataaaataatcattagaactaattagggagtccagcaaatttgctaatataggatcaataaacaaaaatcaacgtcttccctaaacaccattaaattataaattctgaatgaaaatttaaagtataactttctattttaaatcagctttttattttaaaatagctttagacatatagaagttataacagtggtaccgagcattcccttatatctctcatccagtttctcctattgtaatcattctatatcaccatgatacatttgtcacaagtaagaaatgagtgtaggtacattattcttaattaagttcaatactatactctgatttcatcagtttcccccaaatgtcctttctccattcctggaccacatccagaacaccactttacatttagttatcatgtcttcttagccttctatgatctctgacagtttcttagactttccttgtccttgattaccttgatggtcaggtttcatgtagaatatctctcaattttggctgtcagttgggatattgggaaggaagaccacagaggtgaaaggccattctcatcacttcacttaaagagtgcatgcttatcacatgacttaacactgatgatgctaaccctcattacctggctgagatggtgtttgtcagttttctccactgcaaaactacattctccctctttccgtatactttggaagtaagccaataacagtgtacactcaaggggtggggggaagtgaaactctacgtccttgagtgaggagtctctgcgtaaagtattcgtaattcttctgtaagggagatttattaaacgtagtacttttatcttatatttattattattattattattattttgagacagattctcactgtgtcacccaggctggagtgcagtgtcacgatctcggccacgtccggccctaaacgtagtacttttaaaggaaaaggtaatatcctgacattgaggaggaaaatatctcttaacatacagatttaagtaacataaagggaaaggtgaatacatttgaatacattaatttaaaaaaaaatctatgagtactgtatacaaagttaaaagacaaacagtatcttgagatgacatcatttcaatgcatatatatataacaaagaatttgcatagagaataaataacaaactcccacaaatcaagaaaagagtaactacacacacacacacacacacacatctatctatctatatatatctatgtctagatatatagatagagagagaaagacacacacaagaaaatgaggaaaggatacaaataggcagttcacagttccttaattggggaaacccttattgagatgatgtacaacctcagtagtaattagggaaatgaatcttaaaactacaaggagataacatcttccacccatcagtttgttagaaaaaatatctgatatgggaagatggggtaggaagttcatccatttagtgattatagaaatatgagttggtaatactttgggtaaacatttagcaatagaattatgttaaggattcaattacactaaatttagggatctcttccaaagatgtgcttctcaaatgtttttgtgcgtagaaatcacctgaggagcttattaaaccacagatgttgattcagcggggtctgagcatcttcatttttacccaactaccagctgatgctgatgctgcttgtccacttgcctgcactttgagtaaaaaagctctagagtagaggtcagcaaactatcactcattggccaagggccaaatctggctcttgcctatttttacaaatgaaattttactggaacactctcatttgtttatgtgttgtctgtggctgccttcagactatactggcagagtttagtggtagcagcagagactgcatggtttgcaaagcctaaaatattttctatctggtcctttataggataagtttgccaactactgctctggagaaattctcccacatgtgcatacagatatgtgtgtaataatattgatcgcaactttttttggaataatcaaaagatagaaacaagtgtcagttggcagaataggcagataatttgtagcatattcacatcatggacttcgttagctaaaattaatgaacgggagctacatgtatcaacatggataaatctagaaaatacccactttttaaaagcttaaacttacacagaacaaaactataatttggttatggatatatgcatatgcagcaaaattatttcaagattcctgaaaaggataatcagctatttcagagcagtggttacttctggtgatggggtagaggagaaacagggttatatgtgaactcacatgggttctcagccattgcagtaatggattatttgtttagaaatttgagaagaagatatcaaaatattataaattgttaatgctggaggtaggcacagagtttctacacttttctgatattttagatatttcaaacatttgaaaagagtcaaaagactcaggaaaaaatatactgaatacaaagacagatattttgaagtacaaggaaggcaatgaagatagattattaatacccgagattctctctactctcagttaagcaagaaaagaagatgctcagctattacaaattgttccttatttagtgaattctgagaatggtaaagaaattttttttccatatgactagtattgctccatggcttatgaagtattatgattctaagaggtcacttcacccatgttatggagtggaaggattttcactttctctggggactaacatttcactcctttaagccaagatcagcttatcattggaatagtcttagtgattccaagtggtgggtggccccccagcacacctcccccctttttttgagttagagccttgaaatactcatcagggacaagctgtgagagccttcaagatcccttcaggagcgagtcttttgcttttgtctgagaatctcagtggtccatgcccctttatctcagccaggcatggatgtcctccccctgtgacttcctgtgggcatgacgccatgagctaaattgtagtcggggtacattcagcctcagccccctccctctgagcatctgcacacagctggaaccagacttggcaaccgtggcatgcgggccaggacaatctcgtcactcattttcccagcagcattgaggtgactttataggaagaggcggcccatactgaagttgggggtctcagttcagtactcttagctacacagtatacaacagggacattttggttctaagtacctttcaatattgtatagaaccctttgaaatgtgtttgttattatagggatgtaggaacactttgggtccagttattcccccatgaaatgtacagctatattaaaaagtcctgcttgttggcattcaacaaccttttgtcgtgtgccttatacatgtcaggcaatgcggaagacacagccagtggatgacatgagtgccaccttctctcccagcagtagctttttccagcattatgcttcagcatggtgtcctgttgggaacctgatttctgaccatgcttgcttcccttactcacatagttcagtttctgagctgtctcccccttctgagataggtttgtccctctgctgtaggtttccagccacttctttatcattgttagccatgaccagagggagcataagtttggtattttaggggcattcaacaaggcttgcagagatgggatttcctggtcttaatgcacagcctataacctagtacaataaacataatgtttattgtacagtttgaatctcaaatgcaaagacaagccatgtaggtactgtaaataagtgcaggggtgaaggataataggaattggtggagaatatggcaagctggagaacacacactcacacacctcgtataaactgagtggctaccgcagtgggttatcactgtgcagtaattctggcccagggttgccagaactctcggactttcaagggaagctagaaatggggatattttaaatgtgagatctcccaagttttaaatgctggcaactaagcaacaaatttttaaaaagaccatttgtgttaaaaaataaaataaaaggcacatcataaggccatatacggcctgtgggttaggtttgcaatctcagagtaataaaagaaataacctgaaagtttaaagcagcatagactgtggccagcaagcctaggcgtttggggctcactcacctcggccagtgccgccatccttttattgaatccgatggcatgagaagaaagaacttagactcaaaaaagcgataactacacccaaggaaaagatacagaacaaatcaatcataaccatagcccaggcaccattagaatgctttgatgatcaccttcccacaaccttagaagggccaccatacaggcaagaaaagaagcaagagacatgtgtctatgaggaatcctttcttcaccaagattcactcgtttctgtccatgcttgtttacacagtggcctggggtgggtgctcaggaaagagttccactgggtaccatgcttggcttaccaagggtattctcagatattccacaacccttggttagggtatgactatattttaattatccatctctccatactcattactacctcacgttcatgtggtcatttttcatcctctctaggctgaactccctgaaacatcatcaaaatgaaggggtccgtgaccagacagagtttgggtttccttatctggaaggtcccagtgcatgcgaagtgtcattgtgagggtgggggtgaagccaccagggatagaattaaaccagggttggccaggggagggaatgacagggtatggtgctgcttaccttcctaactaaggaagctgttaataaggtaagaaagccctgccctctgtttagaacttgttgaagtggccagagtgagagccctgttcccccaagagaacgtccttaccatcactatcttgacctccatttcacccccttcctggatattggttttccacaaatgagatccgtattgcaaagtggttagttgcaaggactttggaggtatgaagagctggattcaaatttagactttgccacaaagtgaacttggggctgtttttccatattataaaggcacagttttctcccttgtaaagtggagttaatactatccaccttttggggatgttgaggtataaagaactaactgtaggtgatacctgtcactggcactcccttatatagatctatggattccagggctatcagcaacatgtctgatggtacgattggcatagttgggtattgctcggggctccctgctccattccatgcctacctgcaatggggttgaaaaacatctcacctcttcttacctcttgggggaaaggtgggaaagttgtggaaagtgtggcaccctgactggggtgggatgcccttcccactgcattgccttctggctccctgttagtctaccacccagggccccagcgccagcactcctgtgtatttcagcccatgctagggtacaaaatgcttttttccacagccagtgctatgtcagtgctaagggttactgtgatgtagcaacttgaagatgatgaatgaatacatttgaagaggggatgtttgaaaataattctatagaactgcatttggtattgggactgttgtctaaaccataacctaaactactttatgcagttaggtaatagtctcatctcagataacaaaaggaagaagcagagacagaaggagaaggagaggtctgtgagaatccacagtcaggtggaaagagtgtaggcagaagatgcagggaataccttctccctggaaggtgctgggctggtagctccagaatcccaaggccagagcacaggggtgaaaccccagcaagggagagagaattagaatctgcaagaatctcagaaaaacagatttgaatgtctttttatgtggcaaaaccatgggaactgacctttccttgctgcagtcaatataaaggacttgcctttagagattcaaccagctcttgactcaataggattggctccaaaacctctcatccaatcgtatgggtgctcaatgccccttctcccctaagctccatttacagtgtccctccctttcccaaaaagatcccagagcctctggcttgcttctcagggaaagtattcttagaagatccctgaagacccagctctgttctgaattacagagagcctacaggtacctttgtgctgaatgttttggggaaagctgttgacagacagaggaaaaggtcagatgtagcggggtctgtgggcccctggtgggtaaggccttctttggaaatgcctttgatttgcccctcttcagccttttcttcaccatttacccctttaccagtgtccactgtggttctgggctcccctgctcttcccccagtaaatgccttttgctttctgctcaggggttgttctgagacagagggagaggaatggaggattttggagcagtgcctcttatgctatcaggcttcagcttttagaatcttggaaagactccacctgggaaagagttccagagaaaacaaacttcagatcccggctcatatgggaaagggctcatgttcacgaaggcagcttcggggacattggcagagacttaggcgggcttggccctggtctttaatggatccgacacggatctttccagggcccacaaatgctgcatggtctccaaaggagatttcatcctcagaagctacaatgatatctctttatagaagttgtagtcttcaggtcttcagtgagctaacagcttttgtttttccaatggtttatgccctaacaatggcaaggaagattttaaggaaccaaacaccaccacctcctctcatctcctcatcatccccgccttgtcacattgctttcctcttgaaaattagctgaatttttttgatgggatattagaagccagaaagagggtcttgggtccaggattatctcccaagtcagaagaaacatccatccaggcccaggaatgacactctgaatggcaatgatgggcaccattttgagacattctggtccaagaaggaaaatggggggcaaatatgttaggaaaagtgcaggacagagttcatggtgatggtgaatctttcttctctgactctaacttgtgccatttctataatgccagggtgagattcttaggatctagattttatgcgtaaaataaaccagctgccactacaggcacagcagagtgggtacaggagctgagaaacctggatttctgtttctggcattgtgcacttaagaaaaatactttcccatgttttttgcacttggggtttaatactgaccattaattcccccatgtctgcctcttctgccaggggtcttttcaaacatagacaatcatgggatattaaacttgaaggacaatagagatcatctagtcccatcaactcactatatatatgaggaacctgaggtccagagtggggaagtgtcttacccaaggtcacatggtgagttacctcctttgacgtctttgtatgcagtaaagatccctcccctaaccaattttggttcttaagaccttaagactcatcaagcctccatatatttcgtggactgaggtacgactaggtgcccagcacgggatttggtactaaaaaaatcccttaaattaaaggagtgtcttccaggggaggaagcttcatagggcctaggtaagggctatgggagaagcaggagaggaccatggcctggaaagagacagtggtgtcacaaactttctcagcaggctacccagaccaatggccttccttcccttttccttcataccccagataacctttatctggggtcagggcagggatgctgtctcagaaatgtctcaccttgaaacagcctccctccaaacatgatgtcataggcaaggaaggtttcctctatcttcacaaatctgaccccacctccttcagaggaaggggtcccagcaccccaaatgactcaatactgttttgtccatagcatgtcctgggcaggaggacaggaaagtctcaatgcaatcaaattttgtttcaagtttttcccatcatattcccaatgtccagaggccccttatgacctctacattcctgagcatagcttccataaaaagataggcttactctgtgcacatattcacacacacatacacattcaaacacacacatatgtgtacacacacatatattcgcacatacatgcaaacacacatggaaacacatacacacatccacatgaaaacacacaggtgtacacatgcaaacacaaacatacagatgcacacaaacacacaaatacacatgcaaacacacatgcaaacagatacacacatggaaacacatgtacacatgcaaacacacacacatgcaaatgcacacacacactctttacacacacttttaaaatctgtagttgattgaacaacatctttctggaaattttattaggaactcccacttttcaggatatcctaactcagtccatggctgtatggccagaaaggaaatgagctgtcatggaagtcctccttgctcgaggcagcacgtggcctcggggccaccagtgttactcctccagggtattttcctcccctgtaagatttggaaagatggcaaggctcagagatcagccgttactctctaaaccttccacagacctgtggtgtgaggcgaaaaggtcaatgagaaagagcttgtaggcttgggagtatagcacccccacctcctggtgtggtcagaagtggtctgtgtaattttagctcctagaattagaaatgcccctctggtatccttaaagagtgtcagttctgggaaagcatagccttctcctcccatcccttagcccctaagtgaccctacagtgcataccccttctccgacacacccctcagctcatcgtcagggtctcctcctttcagaaagatgcttatagactgagacccacttagatgagacctctcctcctcttccatgacaatccaaggccaagcccccaaaggttttgctcccttcccttcctcagttcagtggaggctgcagcaaaatggagtgtttccagtttctctgaccatgcagggttttaagttaatcccctcctcctatccttcccttttgctgacagttcttcccctttcaagctccctctctatttcccctcctagttttgatcttctttgggggttttggtttttactttattttgcttttttctgtttttttttctttttgttttttataggtttcagagaaattatgttgaatccaataagccttcccggacattccaagcctcttaaccatggcatctatgttgaggatgtcaatgtttatttcagcaaaggacgtcatggcttttaaaaactccttttaagcctccttgttttgatgtcaccttggtaggctgggccctctgagaggttggaagctctaggcattgttctctttggatccagggatgctaagtagaaactgcatgagccaccagtgccccggcaccctttaacaccaccagatgggtgttttcccccatccaccactggcagggttgccccttccctccaatcatcactgtgctccttttttcccggcctacgaggcagctcctgccactatctttagagccaataaagagaattaaaaacctgtgcaccaggagcatcttttaaatacactagccattctcttgctttacaaaaacaacctaaccatcacaagaaagcctgatgaagtccagccgtgctccagcctcactttccctgcttggaagcgtggggtctccctggctctcccaggataccatgctgtcctcttagtgacctcgtcgccctgcaacctccagtggggaagagtcacagagagcacctaagcagaggtggagacggcgcggtaagaggagggggagccaggctcaagtattggcaccaagttaggtctcagaggaaagaatggaaaccaatcactttacatttttatttttattttcggtggaaaaatcatccttttttgggacatacttgccccctacttcctcttctctctggaacggctcacaatgagtgtgacattagaaaactccttgcagaggagagtttctccaggctcttcctgggcccttagatctgcagttccgacaagctttggctgcaggaggttttacccatgaactggccatcctactaggaccacaagggaccaagggaatcagggacaaaggcccttcctgccagcccatgatcccgggattggctctcttcccctacttccacttattcttgactctgagaacttttggaacccaatggaatcagcatttcaaggtcaagatgaactgaaggggaagagaagtaaaacttggcctcctccagcccctctcatggcaccaatggaagtgtcctcctgttctctggtcaatatgtgtgtttactttgcttgctttgactcatgccttactccatggccaccctctcccaaagagggggctcgcttcccccattttcaacttgatccactgaggagagggaagggggtgactttcccttcttcagtaggaaaggcacatttgtagggcctgaaactctcccgtatttgctgactcattggtggagtagacttctggctcccagctccactggcccatggggcctccattgtatgaagtcagcataggctgcccacctaatggtggagagcatgaaactgggagcatcctgtggggggcttgtgggggaaaaaggtggttgttttaacccaccgttgttttggggtggtgttgcacactagtagagaatagagtctatgcctttggcaaatttaactgggagtttggattcccacttaagggttttacttcttgggtcctgtggatggtggttcttcgtgtcaggatcccagcccgattctgcaaatgcctccatggggtttaaaaacatgaggctttccaagttcttgcccagtatctggggcagcctccagagtatcacctgggagttcaggttctctccagggctccaggtgtgtgtttatctcgccccctccagctctcctcatcctgctccccattgctccatgtcaggctgttccccattgtgccctgctgatgctttgggtccagggcctcctcccaagtgtggctttaaggagtaagcttgaggatgatgttttttaattattgtaaatcattacctcatttccagcctcccaggctccatccatcccagcatcttttattctgccattttcctcaccttgtgctatgacaatggggcgttgtgtttccacagagacttataggagtgttcagtgtatagtttcttaataaacactttattttctaatgaaatgactgaatcagacctcttatttggaaattttgcaaaaacattcaaaatacagaaattccaggttacctgcattttttcctgttttcctgttactcttttaaagaagtttcttagttaagttctttgtttacaaaggtgttcacaatctgttccattggttgctttcattgagagtcttccagatagcttaggctcatacagtaaagtgctttttcatcgtattgagaaagaattagaggctcagagaggttgaatggttcatccagggtcacacagtgtgagaggtgaaagcaagattcaaatctgacttctacagacactactcaggccactgagaccctcactcctttggtagctggggaatgttctgttgtctgagcagccaaggctcacagaaatcttctcttgagagctgatatatgggggtctgagagtggggttggggatcctttatctttggtgcaccagcaaagccagtggggctgtccctaggatggagtggttttgtatgttccctgtggatgttgggaaagtgaccttgcccaaggaaagacggggctttgggcgtacaggtcaacacacttgtcattcagagacacactccctttcatgcacacactcaggtgagccacactctcatggcaagtttcatgtgggctgccaggagggagaggccaaagagtaaaatgcttagatgaactggcacatctgtgcacccttggaccctggcagtgacacagctagaagagttgaaatgctccctgtaacttgccctcttcctttcaggaggagaggacaccgtgaggccctgtatgcaggagagatggagcaagagtggagaatgcgggccgggaaaaggctcctgggtggatctgaatgcttcactgggccccagtaatccctgatggagctcagtcattgaggcagtagagatgagacaagtaaagtaatgtggaagagctcacgttccagtctgacaggaagttgatcaggctaggttggtgcttttctatataccctcagttgctttatcttctatttaagtctagtttggtttgagacccccttatgccaaatggaagctcctgctctctagagtggcctgggtgaggggtagaccaagctcggcatttatctcttcttgagggttccaaggagaaagagttggaacagggatgcctgaagggttgaggctgtcctggggaccatgaggacatgcactggttcgagggagaactttcatttttaatataggagagatttgagctttctttttttctgatgcttggagcctatcagtgtatgggagaagagataatagataaagatggcccctgagaatatgggaaggaaaagtatccacagctcaggaggaagggatagcattggcctcatggagggagtgctcttcccatagagcaggaggcaaaaagaggaaaggatgtggaatgtcttttcaaggtgatagggcaaggaagtgagggagttcttgtctggtggcttccatttttcctataaagaatgaggcaaggccttgtgctgctagtgagaagacccaaggagagttggaacatctgaattgacggggaagagactatggacgactatggggatctatggaaaggttgctgggcagaatgaggaaccagctgcgattggagtctaggcctccgttttccatgttttactgctaggtgttgaagtctcatggcatttaccccagggttggtgcctctagggaagtcagagctggtatagggcagatgcggagagctgaactcagcccagaaagatgccagtttggactggcctcagcttagggtggctcagggaaccagccagtcctgcagctccctgacctcctgcattcgaatgtcaccaacaggatttcacagtagctttgtcagaccttaagcttacattttgatcctgcgggattttgctgcacagattgacagctgactcagttcacgaacccagggtgcttgccaggcgctccctggatcttcattctagagacttggttgacaggtgctggttctgaagctcagagaatgagaaactcaactgtaccaataagatcttgtagaaacaaggtgaaattcgatctaacacattccagggacatgccctggagaggctggacttttttactagcattacatgatgaggtcctggaactggttgccaacctcccaagaatgggtttactgtggggcattaatagtaataattctatgtaacttatgaagcacttactcagaaccagtcagattttacccacaaggaagctgaagctcagaaagattgaataactagctcaggtttccacagcttgaaactggcagaaccaggactgacagggggactgcctgacacctcaaaatgcttttggccactctgcagccccctaaagtagcacatcttctgctcctggaaggctatgattgtgaaacaccacctaggtgctcccccctccaaccccactccactcctaagacagagaagtctttcaggggtcttcagggatgagcaccatccctgacttccttctggaacttttgggacagggtgattttaaagactggaaaagaacatctgcaacgttctttcctctcattgtagcatttagtgacttgggggtgtatgaaagcatggttgggcttagatctgagattaatcacatgtcttacagttggtgagattcccaagcaatgatggcctttttgatattggggaggactcatcatacagttggatgagaccaacctgatccttaggatagcagttaggctgcccaggtctgggcaagggtgagaagcttcagataggaaggtggtagaagaaaggatgagaccaacctgatccttaggatatcaggttaggctgcccaggtctgggcaagggtgagcagcttcagacaggaaggtagtagaagaaagggccttgtctgactacccactgtcacttaacctttcttcaacgcacctcaaagacctcctgatatgtccaagctcagccatgcaatgctcaccctaaaaagaccaaacacaaatcaggctcaatttggaagtcaagaatctgacctctagccacctctgtctcttcttttgtgcgggaatccctttctgcagccaagctcccagcagccacatcctcacctccacctccccagccacaggtgtgaccgcagcacagcactgggctgtgacacatcccctggctcgtcccagttccctcaggtcaagaccaggcatgagcaaaggatcaagcatctcagatacaatggtgaggcagcaagggagggttggatgccgcgggaaagctcaggagcgggcagatcaatgcaggacgacttcattgttgtgtagctttctgcacggagccagacatggattaggcaaagagccggagcctttgttccttcagggtttactgactcctgtgctctggctagactcgcacattgctgccagcatgactctgaaagcaagagcaaaatgaaggtggcagggagggagagacagggagggggagaggggcgatgctggctgcttggagtcttctctgtgaagggcccagggaaaactcttaagcatgacagcagagacgggaggaaggtggagaacaatggggagtctggcttccatctagactgtccagcacgggcctggagctctcctcctcctctctcccagctctcccccacccaccacattgccaatctttaatgctggctgatgtgggcgaaactgcttgcagcctccagattccttggatagctctggttctgcattttgcctttagaaatcctactgttaccaccccctatacttcccacctcccaagaaaacctcagcctagatctgacagtatatttccagagctaaataagactccttcttcaaccctacttgaacccaaaagtgagttgaaggagatatgctggcaagagataagtcccttgtctgcttttttgggtggttctgaaattccatcaggattctgaggccctcttgggtaggacttttgttccagtttctcctactcagtggataaaacttgcatagagtgaccccagtttcccttgaaattaaatcttgataagggaagagatttctgcacgggtgataaggtctaacacccctctgtgtttttgccccttttcattttggcacattttccttctatcacaaaatatctgggtgtttgtgcctgagagagctagatcttctctcctcattatgcttgacttctgggtgggtgtgaatgcattgctcaaaggttctgtatgctcctgggccaggatggcgaggaatgacaaaaacgagggggacaaggaagatatcagaggcaaacctttgactggggcatgctctgctttgagagaagggaacaagaaagacaggagcacttctgaggagcacagatcccacagggacgtagaaggtactgatggctcagatttggtatcaaaggcctccagcccaggtctgtgtgggttgtatctgggaaggaacttggaactctgaggtagaggaaaacggcagggttgcaaattacccagagaactgagctgtagagaaatcttagctgagggctctggtgggactttcaaaccaagatacatgagccttccatatgggaccagatgggcacctggctttctcaggatcatggtattttctcatgaccctctaccaaaaggatcctctcaaagcttctcttaaatagatgatttaaggctttgatttacctatgggtggggactggggcctttggcgtaagtcaagaagaatggagcttggcttttctgagagccaaaaccctcgagcagttctcacttcacaccctaagagtaatgtcaagtaatgtctgagtttggaggggtggtcaaaatcccctgctcagctatggagagggtttgcagagcaaggagtgaggctgcccaaaggcatcgttccagtatggcagtccctgacttttgtcttcttccaagtttgagggacagaacatcatgtcacctcagaaaacactaccaaacctggctttggtaagtaatgctggaagcctttgtggattgcagtgatgaccagcttgtcttcatggctgtctttgcctcagtttctgccacctgtgtgctgttatcatggcagctcaatgaagcctagctctgcctttggagacctcactggagcaagtggcctatttccctgaaaaagacacattctcccctcccttgccctcaagttcattctgcagtgagaaggacaaggacttagccttggcaaaggggaaagtgacttcactgctgtctaatatggcctggtgatacctctgttacagagttctgatagaccacttactttctcactccaaagctcacactaccttcagtctgtttgggacctcgtaatgtcgtttaaaaatcacattgtggtattctttgctctgcaaggcttgcaatagcctttggtcaaaagtcatgaaatcctgaccttcaaaaacgcacttctcataaaaagagagggtgtggagctgtggggagcacatgtgctcttctagggatggggcaggtctacagagcctgtgacatggtccttggcagctgcacaggcctagggaaatatttacctctcacagctaggttcttgagcgtgtcgggagctcatgacatggagggtcctctagttttaagctgaaagggtttagcctctgtgacgcaggggacccctgcacctacaaaggctaatttccagtctttctcagcactgggtcagacaagcagtctccaagctctgccctcttgctgccaaagtcaaggcaagggtgacagaaggaacattccagagtactggctagatactaactaaatctagcctattaattatattctgtcagaatctctggatgctcttgctattaattctgaaagaaaattcacatggcagagaacatgagagtaaatctcaaacaacttctgtcaagactgctagttcctgacagctcaccctggccaggagggcacagccaggatctgtgatgctctctggttgcccccaaccggcgaccatagctcctcactgaggccttttgcttcagagggagccagatatagagctggccagggagaacttgagtctgtttcctcccactgtcagtgggcagcaggggaggcaccaccaatatagaacatattctgagaatgtccttcttgggagaatttaaattctaagttcatgtttaaatgactcacagaatcgttcaatctttatggctgtcaatttggcatttcttgctaccataacaggagattgctacacagtacctctgataccaaatggccaacctagtcgttaagaagaccagaataaccccactgtgcattttcaggatggtgtctttggccatcttaataattttattgggtcaatcacttgaccaactgttatcctgcataaattggtctgttttctgggcagagcttcagggcctgcaatatggttctcccttaatttgaaatccccaacttgcagaaaaatctttttctcttcctccagttactagacaaatgatgttgtaaggatcaagtgctcccctttttattgattgcagcaatgtttctccttagtctcatgatatgccaaggatccatcagagaactttggagaatgttgcacaatatggccagctcttagagtttcacagtttgcattaggatatcaaaggctccaagaagtcctgctgtaaacaaaccttattctacctctttccaattctaattaaacacaaaacattcttcatttaatatctattaatagactcagcacacacatgttagaaaacactgggttatagtgtgatcagaagcttttaaagaagaatcaagcaggatgtgttcgtcaaccacccacttcttatatcaagaaaccaccacacccagcacgctacccagctctaggctcagccctcacttctgccttctacgtagagtcagaaaaaattctggttgctgatggatagacactcttgtgaagatcaggaaaccttcgctgtgatatctcagaagaaaatggtaagtcatttcacataagagcttgagacctcagcattaaacctggccatccgcccaggctggtggaggtgacatcatctagtggtagcatacagcaatgaagacccggatcccagtctcaactctaccactagcaaaatgacatggggtaagttacctttccttgttccatatttgtctctgagtagctagtagagtttgctgatcctcatgtaaaagaccctgcctggacagatgccccaaataccatgtccccatgagtcactgttgtctcttagtggaggacatctcttggttcctggtccttctctctctctgaatatgttgtgtataaggcaaactgagtgagagagatggctgcccctttgggtgaggatcagtggatttctctggatgagggtggaagcagatgcttgggggttaatagaccctctctgtcacagctggacaaggccaagcgggagttctcggcaagattttctgaaattgatctcaagaaggcagctctgcctaacaaatagtctgaaatgtcaaagtataaatgttaaagcttgaggggtcattctccagggagttgcctgggctggctagggagggagaggaggagggagagagggacacagcagaatccttcacataaagattctgacttggttttgtgatatttaagaaaaaagaaaactctgaattatttatagcacagaagatgtaagcaggctgtagagaagtagcctggcttcacatgatagtttatggccattatttagctgccccagccttgaactggtaaaacttttctcattagtcacatgctgttgagctctacttgagctatctatctatctattcttcttattattgctattatcattattttaatcaagaaaattcatgtccttcaatatatgagttgggggacgcaatttctggaaatgatatttgcacaaagcaggagttacctctttcccttaaagggactctggcacacgcgtcagtaactctttccacccctgtgggtgtttccagcctgtgcctcttcaagcagggattcggaaggcccctgctctgatatgagtgggaagcatctccgtttgggcctgggcaccaattggccatgtcaatctgggaaggtgaatttcatctctcattcgttccctctgaaagatgaaggcaattgtcctatgcctcttctgagtatgctgggcataggaaggataattccattgtgttcaaaataccttggtacctggcagggggtggggggatagcatctatgttatgtgaggagataaaagaagtaaagaaatgttaaaaggttaaataaaaactgattgaaggattggtggtaaagctggggggaatgagttctttcatctgtttattttggtcagtgataaaatgaatgcttcatgttgataatcatatcctgattctatagcatgggtaattgaaattcaccaataatccccaaattgcagttagaatcacaagcttcacatgctctctcttccatctctacacatggtacaaacacgctcttagtcactctcctaattgtttttgcatacccttgacaatactctgggagatgcaaacacatggagtcaacttttggtcagtttaggggtggtgaggtgaggttagtcaaactgcaaattagatcatcagtagagctccaaacaagcaatattgtatttaggaggtgttgcttttgttgaagatatcaatactttcgtttctttcctagacctgtttttttttctaccttgaagaacctggagaacattttgcagttaaaatgtcacagtgacactcctgttataaaactctgaacgtgtacatatttttaccctcactaacttactctacctcccagaagtctttgaagtgttttgcctccactccctacttgctgtgatgtagaagttaggctagcaccattgctctagggcagtggttctcaaagtttttggtcttgggacttcttttcacttaaaagtcatagaaaccccaaatgatgtttgtttctgtgggttatatccatcatattcactgcatttgaaattaaaactgagtataatttaaaagctcaagtatacacacacattccatgtagctgtcaggatgatgacatcatcacatgtctggaaaccactggacaacttcatgaataatacctgcgagacacgagagtaaaaaaggcatacactatcttactattgctgggaaaatagttttgacacatgaatctcctgaaagggtcttgagcccaccagggacctttggaccattttgagacctgctgttctaggaaaacaggcacaagcagattctgaaatcaaacctgagtccctttggagccagggaaatctaccagtcatgcactttgatccaagtgtagaagtccatcagaattccatttctttactcagacatcactgactgccccatgggtgttgacttaaagcaaactggctacaaccatgcatgttcagttgctaggaatgtggaaaatatacaagaaagacttcacctattataagaaaacagagtgggggctgtttgcttgctctggagaagaacatgggcttgatgtcacagtaaacattattggttgattgaagagactcagcacgaacaggatttacaaaatcccattggtgagagcaggaggcatgaatggcatgggatgagagaatttataagcagcaccttgctggttgggcatcccttcattgcactgtagctctcattgtgcatcacatttggacttgtttaaggaacatgtgaggctcgcagtgctctagccaggacctatgggagtgcctatttaagtttagacactctggcacctccttcctctttctcctaagctgggcagcttcggtataggaagattggactatgaaatgctttaatgtctagggagcttccttaggttaactctgtatagcacccagcacaccacccagcagagggacctgtctcatcatgaggtcctaagtgggtgacagtgttcatgcctcttcctgttcatcatttataccccggggagcaagaactgcccttctgtgggattatttcacaaacccaccggaatagggtctttcaaggaatacctctgagatcatgagcaaatgttgcttaattgactcattcttcaaacatatttggggcatccactctgtgccacacactctgctactaagtgagtcagttgtatttcctgtcatcaagagctttattgtctcctgcactggttttcaattgggggtgatcttgtcccctaagggacatgtgtggagacatttttggttgtgacaactgagggtgggtgcttctgacagctccccacaagaaagaatgatccagccccaaatgctaacagtattaacgttgagaaaccccagtctagagacaatacagtccagtattcactagtcttgggtaagaggggacctccccactttttagggccctcctttagctgccaaaagtcctagggccatgagaagggaccatctggagcctgcaccccacctcccttctagacaatgtttcatttcctaaaccagaattccttacccaaacagctctcagcttgcctccaggacacatgcgggtctcttcattcatctgttctaagggtgggctacgctgcaggtacgtgtactgctaagcccaagagttggccaaaggattactgtgtgggggcagtgggaacatcgagagtgtcagggtgggacggttagaggaagatggagttgcaggctcagtgtgcacacatatgtacgcgagacccctttcactgtgggatggaagatgggggtggaagagaagggaacaggccaggggccaactccttagcaccatgtgtctccactcgcaaatctgaggaaccagagacaccggaagtcacctggtccttcaggtcatcctgaagatcaatttcgcagggcaggaggataagacatgccttatttattagtgtgttagcttgatttataacttccaaattttagacatgtgtgtgtgcttctaattattcccttgtcccaagtccttcaaatgtaaggaataggcctggtatagataagtgagtaattatgaagcaatatgatgaaattatgggagaggtaaacatagaggaaagacacctagttcccaagtggagttttttgtttgtttgtttgtttgtttgtttgtttgtttgagacagttttgctctatcatccaggctggaatgcagtggtgtgatctcggctcactgcaacttccacctcctgggcttaagtgattctcaagcctcagcctcccgagtagctgggattacaggtgcccgccaccacacctggcagatttttgtatttttagtagagatggggtttcaccacgttggccaggctggtctcaaactcctgatctcaagtgatccacctgcctcggcctcccaaagtgctgggattacacacatgagccaccttgctcagcctaatggagttcttaaaaatactgaatcatgatattgatctgcagatgtttaaataaaaatggcagttcaaagaatggcataatcaaaatgatcagttaagactttaaagtttccattgtttagagagagctgccttcaagccttggaaatcctgactccactgcctggtgaataaacaccacggtcctttggtgacctcgggctgcctgaggtacacaattgtggaggttcttcctgctggacagtctccacactggggcaatgctcttacaggcccacccagttgccatagagactgatctcgaggtctccacaattgactggtatttactggggatctgcagctttctggatgccgtgaccagcatcataaaggaaagagaggggctgccccttcccggctccccatctgtggactattgtgagaatatctctctgtcacagaaaggtaaagaccctggagaaattgaataggaaggatagtttttttcttttaataacattgtgcttttttctgattacaaaggtaatttatattcacagtagaaaattcagtgaaatacagaaaagcacacaaacacataaattatccaccatcccatcacccagagacaacactgttaacatttcagctttctgccttctaatcttttttatgtacttatttgtcagaatcaaatcattccacgtgcacatgcacatacacattactttgctacctttttttaaaaataagattgcatttgcaatttaactgatcttttgcaatgttaaaaatttttgtggaagtgatatattcaccacatggttaaaaaaatacacacatatacacacacacaaacttgcacagaaatgttcatagcagcatttttcataatggtcaagagcagaaaaacgcaatgtttattgactggtgaatggagaaagaaaatgtggtgtaaccatagaatggattactactcagcaataaaaaggaatgaagcacttacacatgctacaacatgaatgaatctcagagaaacatgctaagtagctggacacaaaacatcccattttctatgatgccatttgtgtgcaatgtcaagaagaggcaaatacggagagacagaaattatattagtggctgcctaaggctggggttggaagcagggattaactataaatggacccagggttcttgttggggtgatgaatgtttgaaaactggtttatgctggtgattataccattcagtagatttactaaaagttgttgaattttacattaaaataggtgaattttatggtatgtaaaataatgtctcaataaagtttgtatatatatacaaaataagttatataataaatatgtaaaataaagtttgcatgtatgaactcaatgatgcttgtatataatacatagtaaatatataatatataaactaaacatatataatatatgtaaactttattgaagtattatcattatttatccaaattactgctacagattgatctatctgtctataaaatgagagcactccccttttttacacctgttcctcattggcaagttgttcctagcaccgctaccattaccagataagtaacctctgttattgagtgtccttatgaattatatctaagccaattatatacaaacagatataaatgtatgttgtttattttttctctattttgtacaactgcagctgtgtcatacatactattgtgcactttttaggataatcccttccccaccccagtttcttggagctcttagagaactccctcattgttgttttagagatccatactatcctgttatattgatgtactcaaatttatttaatttcttcacaacagtttgctcttataaaacacggaaatggattgatcctaaatatattgaaactaaataaatgtggttgaacctaaatataatattaacataaagccgtatgacccctataagctatttggtatatctgttttgtatatattggccatatggggtgataccaatgtgtaccccaagagtaatacagatgctcctcaatttaccatgaggctatgtcctgataaacccatgataagttgaaaatatcacaggttgaaaatgcacttaataacacctaacttaccaaccatcatcgcttagactagcctaccttaaatgtgctcagaacactgacattagcctacagttgggcaaaatcatgtaacacaaagcttactttataataaagtactgaatatctcatgtaatttatggaataccatactgaaagtgaaaagcagaataatttcacaccatagtgaaattgaaaagtcccaagtcgaaccatcgttcagtgggggactgtccatatatgagaatgagattccccacagtcttaataaacagagggtcatggcttgacttttaatgactgtgtcatgctccactgtgtggacataccagatttatttgtctagtcccctgtgtttgaaaacttggattgttttatttttccattcttacgaaaaacagcacaagtatttaggtactcttggtggttaagctgaacaagggagatggctcagtggcagccctcatcagagatagtatgtctgtcactgcattgctacctctgatgaggactgcaggtatccagtggattcccccaagcaggtatccagtggattctcctgagggacagctatcttgtaacagagagctgactgtggaaagctatctccttctgaaacattattgcttcagacccaaagatgcaacacgttgaatgcagaggtcattatcttttttcaggtaacatcaagatgttgccaacattcacataatgttgttccccaaagggctcttctggccagagccttgccacattttagggctggggattctgagctgcacagtccagaaatgttaatggaattctgaatgaagcctctaatctctatgtcctgcagagggttaaccaagcgtgatgccatgactttctcaaggtcagagtgagggttgggaggtagtacccatgtatcctgacctcttgctctgacctttaagcaggcggcgtccttggaacacatcgggtggggcatggcagtagagattgaagctggctgtaaaaggccacagacaattcagagagaggcatttccagccaacccactgatctgggctccaggcaagggaggggcacaaactggagagaagtcaaccagctggaaggaattcaaggaaatagcaacaggaaatctgaaggggtggagagattgctagtgagattatctaaatctgcagcttttgaggccaagtgatagccatgttttctctctagcagccctcagcggtgacagcaaagcccatgctgtggcttcaacacctctcctcctctttttctaacaaacagggtctttagtgtctttctaggggtgagcatggatggggccaaagatggtcaggcaggagaaatatatcctcttcctctcctcttctgggttcctgagctcttgtctgctgaagataagtcctgggggaaggaaaggtctttagacagcagagcagatgatgcagaaagagcccaaacatatgcacgggcaagacaagcataaagtgatgatattagggatcaagatccaatggcaacagggaagggagaaaaaagctgggtgtgggaggagcattgtagttgaaaccaataagtgcaattaggtttgtgtcacttcctacagcccaagcaagctgtttgttggtcatctgttagaggtggctgccaagatgccatgtgcattccaagatccctgggtgctggcccttcctatctgccaggccgagagagggacaatggatgccagctctggaagtccactcagccatgtgtggcccacctctctggtatgctcctggaagcaggggtagttggaatcaaggaaatacagcatcagaaagaagtctgagcacctgctcattgctttccttgcaatggggttgagaagaagcagttataggtggattgaatcaggggttaatggctaggccaaagggaagcctggtgctctcaccaacacaccaatgtccatctgttgcttagcccatctgggcatgccctgggcaggacctgctgcagctcagaaagcaggagcttttaggggacagactgcaccctcaggaattggccttgccactgcagcccacttcagacctgacttacttcctgcctgattaactttcccatctcccaccccagctcctgctgtagctggtatgccaatcggcaaacctgctaatactacagtgcccagaaaagtgggtgctcaaaaaatatttgttcatttaagaaagttattagctaaggcatcaattaaatgcgactttaaaaaatctccctagaaggagtgtctccagattctttggaaatctacccacatagctagcttgagttttttagggatcggtggcatatgttcttcttttaatgacagtcaacagtttaatgatagtctctaaacttaatgccaagtgtaggctatgcatcaggtttacatggtggattcaaacctggtctgtgattcagagggagatggctgtgcacagggaagtcatataccacattgtgataagtacccatatgccctgggcttcctggaatttcagaatcctgatcatacctatgtctgtcgagataagtgagtaccccatctcatcagatgcaaggctgctaatgatcagagaggccaggtaggcattagtcagactgtgaaggatttaaacttcacctgtgttgaatgaggactaggaaaaagcagttgggcctgggcatcagagatcactgtgactttataacaggtaaagtcaggggggtgaagtggtagaagtgagagtgaaatgaggcttgagaaatgattgggaagcagaagaatgatatggcacgccgcttagactacccatcagagtctggtgatgaaggcagacaaaggagtaatttctaggggaggacgggtcaaggaaatactttgattaggatgggggaggccaggcatagtgtctcacacctgaaatcccagcacttttggaggccaaggcaggcagattctttgaggccgggagttcaagaccagcctggccaacatggcaaaacaccatctccactaaaaatataaaaattagccaggtgtagtggcacacacccatgatctcagctactagggaggctgaggcaggagaatcccttgaacctgggaggcagaggttgctgtgagccgagatggcaccactgcactccagcctgggtgagagagcgaaactctgcctcaaaaaaaaaaaggatggggggaagctttattctgtaggtgagaagtcagtgggcaagaggggtttatagtagtgaagagagacgggtgctagatgggtccacatccaaaaagtagatggaaaaaaaaggagataaaagcttgagtggaagctttacaaccttagaagaaagagaagagttattaattcatgtaagatgaaaaataaacatgaggtaagtagaattgaagacagagggaaataagggaatttcttcctatttccctagctcatctgagagttagtccatttatactgggagatttgtgctctggtccctttgacaggaggtcctggattagtcttgttcgaggagggacccaaacaaggtactgatgaacagatagtctttcatgaaggaggcagagcacttcctattttcaccattatgagttttggctgaactcaactgctctacacacttaattttggctgtcatagctaaatttggggtctgctccccacttcttttttagtaggatgcagctggggaaaggcagcaggcaacctccttcatctccagtttcccacatgtctgagaattcaacttggtggccatgccaagatatgctggctccatgcaaggatgccttgggacagtgtcccagagactgacggagcttccacatttggctccctcttagccgttcccatgaagagagtcacagagcctacaaaactgccacatatttgagggctttccagtagattccgtggcccttttgtgttggtgtcaatcctttaatgagttaatgctgtgatggagctctagcttgagcgtagggcctcagattgaggagcagctgggatgttccatgaagatcgagacccgagcttctgattttcaataactttaaacgtttaggtatttgctggtagaatctatgcttagatggctgtcgtcttaagctcgatatgaactcagagctgtgattgatgtcctgttgggcactgccctgatttaataactagcacgcctgccttggtttcagaattcggatctgctgaagctgcagccatctcagttggtgctggatctccagctctcgcttgatgtttccagagagtcacaggagcctgtggagtaatgacaataaaacccagaaaggcagccgctcatctatttaacgaatacttattgagcaccactgtctaccaggtggtggcggaggtgctgggtacagcactgatggagacgcaaggagccagagctctgcccactaggggaccagatgataaacaaacaaataagtcaggaagataattatccgacggcggcagttcgagccatgagaactgaaacagtgtgctaggctagaagtgactcctttccactgagtggttggagagcaagcgttcacagacaggtagtggctgctgtcatggctctaaggtggccctgagcttggaatgtttcagaagagaaggaagggcattgggtagagtggagagggaatgcggggggcggggagcgggggtgggggcagtgaagatgtgctcagagggctaggcagaatcaatttccgtaagcaatgatagagtgcattgggctgttactcttaacttgggtttgaagcaggggaggaacatcaaggttcctactttacagttttttaaagatgacttgggttagccgaccatgtcccagagttggggtgagggatggaagagaggggtgggagaagaatggaagctcagtttgggagacccctgcccaggtgagagagcctcgtggcttgagctaggatggtgccagcaggataaggggcagagggtctattgcagatgtggacagatttgagaattgcttgggtgttgagtggacacgatttattgatgggcttgggagcactgcaggaaagagtcatcaaggaaaactcctgggctaggggcttgagccgttgagtgaatgggaatgctgcttaccacatagggacgccctggggaaggtcagattcaaggagaagaagcaagagttcttttcggctgtgttacacgtgaaagaccactagacacacaagcagagatgccaagtaggggtttggacaacgatgctggatttcacaagtcagatgatatctgagcatccttcagatgaaatcactggagctccaccctgaatagacattccgtcctaaggatgctcagagttgaggtgggctgaagttatcttactcttctcctgaaatcatcagagttctcgcttttgttgaggtgggtcaatacagacagactaagcatcctatatatgccactgcccttctgaatcttcatcctgtatgtgaaacacgccttttatgcagtattttatgcccctgaaatcactaatttgtggaattgtgtgtggagcggcttttgctgtaattttagcattacgtgggaagtttatgatgaatcaacacgaactcccatataatacatggtagacatttctgctctaaaagacctccagccaccccaccaacaggccacccccaagcttataggctcccttttgttctctcctaagtcacctgagttcctctcctcggaggaattcagccactacactctaaggtccagagcaatttagttctttcctttcccaggttgagcctacttttgaatttacacagactaattaatgtgctctgctaaacaatgggccaccgacttcaggtgtaacttccagcagcacaaagaactggtagaagcttaaaatgattcagtcctctttcatagtctctgagaagcagaggcagcagtaaaaagacttatttctcacttctgtgaagtctgtcaccccaccttacagaagtgactacagttggattcacagtgcacatttgtttcctctgtgttaacgtaattatagtgtagccactctattttccaagagctcctttttttccctatgcactgtgccaaatgatttccatataggatcttatgcaatcctaccacaacactgtgctataggacatcttatgagtccattttgcagatgaggagattgaggctcaaagaggttatacagccaggggcagtggaacctgggtgggagtccagcccaatctcttaatgaagccacacaatgtcccacagggatgtagtgtgtagatgctcccgctgtgggactgtaggcgtcataataatgtacttcttggtgataattatatgaagacaattgccatggtgatgatagctgagacttgatgcttacctaataggtattttttctaagtgttttacacatgctaacacatttgtatgcaaaacaattgtatgaggcaggctctagtattattataccattttacagctaaggaaactgaggaccagaaatgttaggtaacttttctaagatctcagagtgaaatgattggtgtaggctggatttgatcccagacagtctggctccatgggtcacgttgagtggggttggctggagctaagaggattgggtgaggaggcaatacaacccactgctccgcccccagtgcagagatgtcttagtcacggccctgagaattgataaacgataaccagaacaaggtgggcttttctggacagtgtttccctaaatgactaccccacccctgccctaaaaaacagagcagcgtggctcacacctgtaatcccagcactttgggaggctgaggcgggtggatcacctgaggtcaggagttccagaccagcctggccaacatggcgaaaccccatctctactaaaaaatacaaaaattagccaggcatgttggtgggcgcctgtagtcccaactattctggaggctgaagcggggagaattgcttgaacccaggaggcgggggttgttgtgagccaagattgcaccactgcactccagcctgggcagcacagcaagactccatctcaaaaaaagaaaaaaggccgggcattgtggctcacgcctgtaatcctagcacttcgggaggcttaggcgggtggatcacctgaggtcaggagtttgagaccagcctggccaacatggcaaaaccccgtctctactaaaaatacaaacattagctgagcgtggtggcacgtgcctgtaatctcagctactcaggaggctgaggcaggagaaacgcttgaacctgggaggcaaaggttcagtgagccgagattgtgccattgcattccagcctgggtgacagagtgactctgtctcaaacaacaacaacaacaaaaaccagaacagcccactttgtacgtacctggagtaacttgcagtatgttatttgggcacttttaaatttttatggctattgttggaagatgaaaaatcagtttccatctgactgttgcttgcaagtcatttttccatatattctcccatttatacacaaagaaatggaggcccagggagagtaggtagtctatcctgacccctccagatctagatacacacaccttcccagtaccccagggtcctctccttgtcccaccacggggcttattacaatgtattcaaatttcctgggtgactcatctatcctcttctctataccgatgagctccaggaggacgagaagagtctcttattccctgctggagaccctagcccagttcctgacacacactataaagtttaatgcatatttgttgaatatgaaaaggattgaaccaacatgtgacccctcagcaaataagtgggagagccctggttggcaccttggtttccatcaccgtcaacaacgatctcctttgttgaactggcctcttttctgcccagtaccactaggcagggggctggaatggggccaatggtcgtgcctgttggcaagtttggagcaagggttactcagaggcgttggtgtaggtgaacatttccagctctcttcatcctcttctcagttaagacccaagcacagagctactaactcgctgcagtcccattcaacccctcgtagggttctctatgccaatgtgaacggcactcagcaaggtcactctgtgtgccttccacctgctgtgagtttatcatttgttgtcggctgccctccaggttccctgagccatgccgtgtccccaaatctcctgaccctctgtagcgtgcagcagataacaaacagcctctgtaagctgagcaaaggccccagttaaacacctatggcctagggcagtcagagttctctatagctcaaagtggcaggcagaacttctgcagacaaattcctgcttcaggtgggcaggtggagtaggtgtgttattaaaggagggaggacctttgaatttatactcgtctctgtgtccacgggcacaaggcagctcaaactgagcagcctcgggtaacagagcagaaatgaatcttatttttagcatgcactccatgcctgatactatgctaagggatttacagatgaatattaactcatttgcttacaaatgttagcagtagatcacacttcccaaatgcaatgtcatgtcagagaggttgagtaagatgtctggtgtcacatagctagttagtagcagagctgggaatgcccagtctcatagttcacactcctccttaccacactcctgggaaatctatggccaaagaattgtgctacttgtgcatgagaaatgaaaggacttactaaaaaagacagacgctgtggctgtcagggaatttatgggtgcacttatagatgattttatttattgatctgtttatttttagcatccactagatgaaaacagtgtagacagcacagcaggtgaaaagatgacatggtttttcacacatgttaaattagtaaccatgggcactgaacagcaaattccatttcccaaaccctggccagctagaaacttttctgggggaagtctcttcaatgaaacatttatcaagtggttttgctctgttgcagataatatttttttttcctatgactggtcttccatccaaatatttaattccttcctgattttataacttggatttcctaactcattctgcctaagtcatgacctggagtaatcggagattcatatatgtttgctccaaaatctcacagataaggggaaattatacaggagaatatccatgtgtaattgacacaaaacacatctgcaggaggcaggaggtatagctgtctggtcattcagcctccatactttttgtactgaaagtgggaaaatgagtaagtacttagagaggagacatagagggaaagggctagtttctagggtaaagagctggtgtgggaaacatctcatctcacatatatcccctagttggaatttgtaggactgtacaaagagagcccaagggctggcctctcggagagctggcaggagagggatggcaacccaggccgtgggccttgcctgaaccctgcacagtggaggctcaaggagtcattcacatctgcccacagagcctacaataaagatctatttcagagaaaaaaagcatacacacacacacacacacacacacacacacacacacacacacacacacactgaaaaggtctggcaggagcagagcagctgcagaaggcagcaaagaacaggctggcaatggaggtcgataacccgcacggaggaggggcagatgggcaagggggctagaaagaactcgttcccagggaaagcagagaaagtggagtggtctattcccaaggaggccacagcctgcagacaatgtgtagatgtcaccatatgaagcagcaatctcttctgaaaaagcagagaggaaatgtccgccaggctgataagaaaggggagttggggtccttctgcagagcatagaaggatggctccttttggggctcctgagtgtgtttgatgtgggttcctgaggctgatgccccagagacctcaccttggttcttctggggccacccaaagaggtccaggcctatcaataagaggtggccattcattagctgcacaggtctagtgatattcagtgaagatttctcccttctctattttccactgaccgtcagtcccagaaaccacttgacctccaatgtctgggatcttcccagagactagtaagaacaaataacattgacatcattgaaacctcacacttctctatgtgactcagtttctgtcagtaccaggaaaacgataaagaatcgtcttctggtccaaagcaccatccatgtaagtgtttgctgatgactttagctagtgcccgagaggcagcaaactcggagcttggtgaacacacatggacctgatccaagacccccaagccaggggagggattccaggggtcagataggggcgcttgtaattccaccagttctttttctttggttttcttttgttgttttctatagaattgtagggtgggagaggttcaggagacaggccagaaaaccaccggccagtgcgtttaacatctggtgtgggggaaactcttggaagtcagctcagaggatgtggtgggaaaacacctggcagagtgagtgggcttcgacagggggaagcatggatccaggatcgcggaggccttgcggaacgaatctgctggctgcgctgagctgtggctgcccacgcggagggccggcgtggctgggactcgcaggccctggcctccgaccttgttccccatcagatacagggtgagggccagagcgagaggcttagagggggcggcgggggtagggcaggaaaggcgggggtgcctggcagaagccctggctccgggagtgggagtggggaatgggaacatataccttgaaaggggcccagcgtgacctctcgggactcccggacagtctcctcagtctgcggagggtgggcttcagagacttccaaaagagtctgatggaaacggtgtccaaatgcagaggtcacgcggaaggagatggtgccgggaataatggagtgcgcacagggtgagccggcggccaagataactttgtgtcaccaagggctccagaggaagcctgtgggagctgggctgagttacggagggacggggagctgtctgtccccggggcagggagaggaggtgggggttcgcagagaggctgatcaccagcgctccactgcacacctgagggaagacaggaagccccaatggggcaaccagagcagcccaacagagcttccctgctgtgcaagggcaagagccctttcatggggggcacgtgtgtgtcctaggagctcacgactagactggattttaagcacgttaggaagaagaggaaagaggagtctttcttttctttctttctttccttccttcttttctttctctttctttctttttcttttcttttctttctcttttcttttcttctttctttctttcctttcttctttctttctccttcttttctttcttctttctttctccttcttttcttttcttttctttcttttgaaatggaatcttgctctgttgcccagcctggagtgcggtggcgccatctcggctgactgcaacctctgcctcccaagttcaagcgattctcccacctcagcttcccgagtagctaggattacaggtgcgtgccatcacgcctggctaatttttgtttttttagtggaaacttgctttcactatattggccaggctggtctcaaactcctgacctcaggtgatctatctgcctcagcctcccaaagtgctgggattacaggtgtgagccaccacacccggccaagtctttcttgaagaaagacccttagggttaaggaccccacatggggattctagtttctacatttccgtggacttcgggcctgccttccatttccttcagaagcagggcatcaccttctctctggtgtctgagccttctgctttaagcaagagtaaagttaggcttttccacagaaaggcctcccaagtctctgtggaaggactcactgggtgacctgttcatttcctagggtcctttgtgcattaactaaaatcctttccatcagtaagttcattgctgggggaaagaatgagggtaagcagacttcttcaggccagcaagcttttcttctggaacctggtgaatgtaggaagtctaagggctcggcccatgtccacaaatgaactggaattttatgccttagtataactaaatcctatcacataaaaattgaatgctggtctttgccaacaccacttactctctctagtcaggcagcaaggttgttttgaactggtttcctctgagctgcccaggaggtgagcttatgtagggggcaacaaaataagcagagatggtcctaggacacctatttttgcataaggaatagacattctgaggagagaaagagaagatcaggaaatgatcttacggataacacaggattatttcccgtgttggggattgggttgatttctactagtggaagtggggacgggtaccccagatggaggaaagctaggacacagatgcacagcacgagctcacatggttgctcagaggacagtggatggccagcctgtccatctgttggatctatttaatgcatttatgaggataaagcctggggatttgggccaggttatcagaattctcaaatatcagactaaaaactgtcctgaagacatggatactctatgttaaggcctattgagcacctactgtgtgcctcccaactgttttaaacacttaatctcttcatttaaagatatcaaaactccatgcagtaagcactttaataataaccgtaacaataataagggagaatccttgcaggtttgagcagagagcaggtgagaggaagaaattggcatattccttcccgaacttttatgggcattagctccttcgacacgctccaaatgtacgactgtacacatgatttcactgaatcctcatggcaagtcaatgaggtggatattttcttaatttcgctcatgaaaacaacatttgagactggtttagtaaattgccaaatgcggcctctgaggatgtgtccttgagtgtgaatttatacccagttctgtctcattccaaagccatgttctttctcagtccccttactctgatcctggtgtttgctcccaaggtccccttcctgtcctttcttcttttcttcgtgtctgttgtattttggggggtgctgctgcctctcttttatagaccaaatgatgctctttctccttattctgcctgaagcagctcagttttatcttggacccatggttgtaggtagctgtcaaggtcaatggtgtgtcctgcaaatgggtgactgggatcctctggtctccccttctacggttcaccctgtggtcctcacaggtgtttctcttcctgacctcaagactttcagcatggagctgcatctcatggctccagtgccctgcaacctatgtcttggcccagaattctggtgctggaagggacagcctttagcacattgtgctctgcgtgttctggtgagaacatgacatcacagggacggcttgggggacagagccagatgccaggaatgagaggccaaggcagcattcctgggtagtagctggaaaggaagggcctctggggagattgagaggtgggatgtgaccctcatatgggcactttgaagagggtttgtcactgtcaggccagaagaggcagaggaaggagggggcccagcaagttgtcagagggacacattctcagtcggagcctgagattcatctttcagcacctaacttcacaattccagatggctctccttggggagttctttttctctttattcttggctcaagcagtcactgcttaatgagagccagaggcactcttgccacgggaaaggccaacagaatatagagaccaggaagtgggtatgaaagggcaggcgtactgtggtagggaggctgatgttgggagcctgggtgttggttggtgtctgagctcatggcggtggagcatggtggggtagcactggggagcagggacacttctgaacttcagcctcagcttctgaacttcttgtgtcaggaaatgtgaactggaaattgccccagaacagacagtcctctgctgatcctctctcttcactgcttccagaaacagcagggtgtcttatttatatgttcatcttggtgggaacacagtgtctcggtgtcctagactgctacctctagcctaagggtgcacacgtgccccagagtgggacctgctgtttgctgagcttcttcagagctgaccacggaggcactttgtttagaagtctggggagccggagactgagggttaggatgtgggtctcagtactttcctggttcaatacgatcttggttcctcgggccattctcggagccaggacataaataagtctgttcttaggaacttcctggctcttttcccattctcactcatctttcctttctttttgccactcccccagattcccttcttcctccctctttgcagtgttttccctgctaaagtctctagcagtgcttcagggggagttttaatttatttgcccattcatcatatagttagtgggtacctacttggtctcaggccctgtgctaggcccagcctacgaacttgagcaacacatgccttttgacttttggccttttgacttgtgcaactgccagcacccttcaaagcctctttgtaaaaatgtcaaactctgaaaagaatgtgtgagggaagccctaatccagagaaggcctagggacgaggcatggactggccagcagaaagatccaggttcttattcttaggtaaaaaatcctgagccaacctggtcccagggcagcaacaggaacaatcagggctggtggtcattcaacctggaatccattcccaagtcattgttaccccatttgactaatcatttttattttttattttatttatttatttttgagacagagtcttgctctgtcgcccaggctggagtgcagtggcgcaatatcagctcaccacaatctccgcctcccaggttcaagcgattctcctgcttcagcctcccaagtagctgggattataagcacatggcactgagtgcggataatttttgtatttttagcagagatggggtttcgccatgttggccaggctggtcttgaactcctgacctcaagtgatccacccacctcggcctcccaaagtgctgggattacaggcgtgagccaccgcacctggccttgattactaatttttaaattctagacctctaaaaaaattctgcagagtttttgtcttagatctccagccttcaaaatgtcttctcttagaaaggtcctttacaggaaaccaggagatcctcttttttctcctagtctataaatcatccagggatggctctgcaggagtggtggtttgaatagtttagccatgctctactcttctgtccaggtggagaactgactgggttggctggagacccctacaaagggcctgtagctggccagggcacatgtttgtctggctatgctcttatgcaataccttatgcaattagctcctcttgcttgccattcatagaaggcgtgaggtgagacccagccaggaggccaggagaaagtgtgagggcagttctttgagggctggcagaaatttatatcttgagcccaggcagggccctgccctcttggtggtctccttccccctcaaaggttcaaagctggccctctttctccctcctgccacttcaaacacccagagttggagctcccagaatgttattcttttccatttaaagacattccatttcatgtgtaattaaatatgtggtattgaattaatgttttcttctgagcctttttggcagccagagaccctagggtctggttagtgcagagaaaacacacgcttctcacagatcctcccttcctctccctgttttctcttcccccttctctcctgccaagaatctccctcctccctcctccctcctgcgtgtagtcacgctcaggactcaccttgtaatgggtgagcctgaggtcctggaaactctgtttctgggtggggcagcaaggtcttgggtttctgcattctggtgctggctttatcttcaaatgtcatcctggtggctcacattgagcttaggtggtggcaatcaagggtaggaagaataggttccaggataaagtgacacactctctctttacagatgttattggtttctaccaagtactgatgccagtgcagaaagcagagcctctctctgaagtaggggttgcaggggttgaagggggctgtcatgattaaaggatgtcaaggtggcacagtctgctcagcccagcctttagagtcccacaggacacctctaacagctaggggatcttgggcaagttacgtaaccacctggagcttcagccccctcatctgtagcacggggacagcaacatattgtgtttaagagacttgtagggccgggcacggtggctgatgcctgtaatcctagcactttgggaggctgaggcaggtgaattacctgaggtcgggagtttgagaccagcctggccaacatggtgaaatgccatctctactaaaagtacaaaaattcaccaggtgtggtggcacgcacctgaaatcccagatactcgggagtctgaggcagaattgcttgaacttgtgtggcggaggttgcagtgagcccagattgcgccattgcactccagcctgggcgatagagcgagattccatctcaaaaaaaaaaaaaaaaaaaaaaaaagaacccacgaaagacagagctgtaaaggtatcatgtgctcagcctggtatctggctcaggataagtgctcaattgatggcagttatttttattattaataagggcacagagggataacaacgagctaaaggagcagtgcagagcgagatggaatccacaagggaaagatctgtgaggtctcagtgatgaggacaggaactagttaggaactgagtatcaacatgagccagggaagaggggagggcaggatggttaggagctgccaccaggggccagccctcagggctgctggtggtggcaggggactgcttctgagcctcttaagtcaacaccttcagagaaggactgtctcagtcctgtccacacacgtggtccccaagacaataattagccaaagcaccgaggtagcaaacaagtttcttttaaggcaatctgagtgtgactgagtgcacacactcacctttggggaccgaatttgctgcttggcatacagcaggataactgttatttataaccaccgaccctgggaaatcgggtttctctctactgatcaatgccaatcttgagttggtggctgtctctgccttttgatgtctttattccactgtctgaccaacctcctcccgcaaactgttttggcctctgaaggaggaggaggtcaggcatggtggtggcagccgtagacagagctggtgacctctgagccagggccagcttactcctgggcaagctcgtgccattttattttaggagaaaatcatcatccttctccacatttcttttcaagccacgattttatttgcaagataggtattgagctcctagttgaaatgaaaattggaaaggaaagaaaaacatctgttaaatgtctaatatattttagatattttatatcatctttattatctaaaaattttaaatcatcctctgaacagttctgccaagtcaacatccatgttcccattctacagataaggaactagaggtgtggagaggataggattcaattagtaagtaagagggtcaggatttcaatagagatctgttttttttttttttttttttttttttcccagtcttcactctttcagcagtgccatttggggcagattttttgttccctcttcctccctggtcgcagggctgagcagtttatgcctgccacctccctgccctcattctcccagaacagggaggtgaagctgacagtggtcacctctgtgtccagcgatgtcagtgtatccagcggctctgtgtatacctcccctcctgccccacagggcagccaaggggaacagaggtaggatgagggataacccctgcctgcccactgacctctcagggctctgagattttctgtccagaggtgaccagttacctcaatggattagagattctgctctaggtcacgcttgctgcaggctggaagacctcccagaagtgaatcccacacatatggaatagttatcttggtccccactacagagaaagaattcttggagcagccactaaaacacagaaatcttgtttctgttcttgtgtcagatgaaccggttgtcctgtgggaacaagaagatctacaggtggcttcctctggtggaacccagttggtggctgtctcacaaaaaggaattagggaaaagccaggccagaaggtcccaggaactcttttaattttccaaagaacccttcccattacatagcagcctcctgctttctccagcagccccttttttgttggagattgggaggtcttcccacggcctggggtattcatccccctccctgcctccccttccagtgtctccatgtctgagccttgtgacccagactctgctgggccagccagccaggcagtaaaaggagattgatgccctctcctcttaggaaaatccatcactttttggcctgtagttcagatagcttcaccagaggcagctctgaacagcactgtgtgagctaaaagcatgcagaagcagggacccaaatagacgcgtggacgtcagaagtgaaacggctcactccagtcattccccagggcctgagcagaggctcttcctcccgcactctgtccccagatacactcttctccccagggctttgtctgttctgtaaggcttccagcgggggctcctgccctcgcccttgggaagatgctgtcatagaattccaggatgagcagagtgagggaaagttgagtagtggaagatggagggttaagcctctgtgaactggatcattttagtggccgtaaagctgggaagacagagcgaaggcagcctaaggtaaaggaaagaacacgggtttcggagtcataaacaagagagtccttctttggcctcattttacctctgtgaatttggcaagttaccccctgcctctgttttctcacctgtgaaaggggtgtaataacacttatctctcagtctctcaggattatgatgagaatcaagtgttgaacacacagtaggtgttgaatacatagcgtgcaagttaattccctttgccctactgtttcctcggtaagttcagtgaaagaagctgctcatatggtattctggagtctccagtcttgttgatgcatggggttgtccacatggaagtgatttgccttatgtgtttggcccaaatccagccagtctctgccaaagctccctggttaccttgtggagcttcttatcctcatgatgaggaaccagtcctttcctggaggagaatttatggtcgaataaaatctgtgcttatttcccattcctccttcagctccttcccagcactcaccaccctacccagggctaaggacaggtattggtgtcagaattctttcaccctgaagacaacaagaatgagccaaggctattttcttctgagcacctgagtatttccacattctggaaaaagttccatttgcacatttggggaagacactttggcccacggaggcttctgcttgggctttttcatgtgctcacagagagcagatgagcttccagtaatatggtcacttgccctctgctaccttcaaggctcacagctgtcacagcttccccactcctgcaaccaggggtttgcagctgctgccaggctcttctgggatgttgagggagggctgagaaaccactccctggatgctgctcccacttggcttgtctgaatctctcaggggttgtgattcttgctgccgagggaaggagaggagaaggatggattccaagatgtgaccgaggcacagcagctgaaaaacagagtctggttctctttaaagttcctccattcccattttgcactaattgtagctgggagtgagtgttctgagtggagctggtgaggtctcccagcccagagttgtacttagggacccaggaaaatctatattgttttgccttttgtagagatgtttctagaacataagaaggcaagagaggcatgatctgcactgcatggatgggtagttgggcctctgagaagggacttgactcaatctaggccacacagctaaggagggaaggaggacctttgagctaagcccaggacgtctcaccttctcctgggcttctggaagtgaggcatggctaaactgtttgtgagcatggtacttgtttaggccaagttgtaaaggtaaacttcttcagctggctaatttcccaccccaccaaagaagccgtgttctggtgattctcaaagtgtggttcctgcaccagcagcacctgggaacttagaaatgcatattttcaggcctcaacctggacctactagattggaatccctggtggaggagcccagcaatctgttgtaacaagccgtctaggtgattttgacgcattctcaagttctcctattacaatgcagaggaaaggtgggattggggtggagtctggggccaaacggtgctcttccccaagtaacttggcaaccctgccatgtcctgatgctctgaatcccatgcccagctcagtcaccaggtgcggatgcctgatttggccctcatttctcctttttgtaaaataatatcaataataatgaaaatgccaaaacacagcctacattttggaggacttaaaggtttacaaacttccatgctcaggtaataggtaagttaaactcgtactattctccccatacccattttacaggtgagaaatctgagacccaagatttcatggttgttgtttttctgtgaggtgcataagctcttggaggatccaggtcttgaagcaagcacctgtggcttcccaggccttcccaatcccggcgtgttcagagatgtgggcttgacattgtacagctgccatcgtgagccctgtcttcactcccaggccgtgccaggacactcaccttgcagaacctatgtgtcatccctagtcacctgggaatgattaggtagcaggagcaggtggcctcccgagagagggcctgacttcctattttctcgcagtgggagactctttagccttgccctccaaggtcaacaaataccattcctcagaggctgagaaacagagacagaaagtgtgaagaagggaaccagttttaatcccctccctgtaaagactggggcatagccctgcagtgtgtagcagccgcattgcagcctgtggcttgggaggagcggtcgtcagcagctgttaacgtgcaggtctgtcctagggggaggagaaaataatagtctgtaaatgcttcctctcgcaaatccttactaggcagatcatctgcgacactgtggggataccaaggactctgaagggaggaaaaagattcctgtagtttattcttaaaggaatccccaaaccaaaaaaacactaccccaaggcttccagccatgcccctctgtccctattacgtctcctcatttatggggatggtctgccatggcccaggatctgcagctttcatttctcgacaaagtcgcttgggataatccactttttggctcagcaatgctcttcaaaatgtgaatacaggtatttaatgggcttctgcctgttgaacaattaatgtaaaggtcagtgagtaatctcctgtttgctcttttcatcgccagcccactgcttgtacaactccttcgtagcattctttccaaataggtgggagggctgaggtcacagctctgctttctccaggcacacagaccttaattaggttgctaaattagcagaggcaggggcaacccttctctctgcacacaccctcgttcttggatggacagtgaactttccttttgtgatctcattggtctttctctctttcagagaagggttggccaagtaggggtttcccccagataatcttagctacccgttagtagtctctgtcatgaaccaggcactgtgatggggtcactacagcctttatgttaccacaaaaaccaatgtgtctttgtgtgtgtgtgtgtgtgtgtgtgtatgtgtatgtgtgtgtgcatgcgtgtgtcttgtcttctacgtctttactttgtcctcatcactgggccaagctctttatatggattatctcatttaatcttcacaagaattcagcaaggaagttgttcttgttaatcccattttacagatgaggaagttgaggctctggagctaaataactttcccaagctcaaaaaactagtaatggcgtggacccaggattccaacctgattctcaatcgtaccctggaaaatttgcttttcaaagtatgaccaacagcagagggacatgacctgggagtttgttagaaatgtagattctcagacccactggattagaatcttcattttgacaagattcccaggggattcatgtgcacaaaactgtggagactgctttgtgctatctccaacaactctggctaatgaataccagaatcctgtgcattaactactaactccatttgccagcagaggatgttgtggtttagaggggttaggagttgttcagggacagcattgagatttgattctggcccatactctcaaaccacagagggatgtcagtttttatgctaaagctggtgtgctagagtttgcctttgcctgctgtaggctcagaaccaagttctccacgctagacctctgtactcttctgtctccctgtgtcaccaaacgaggactgatttgctgccctcctctttgtccccatcctacagatgtgcagcacattaagaggagagacatcgtgctgaagcgagaactgggtgagggagcctttggaaaggtcttcctggccgagtgctacaacctcagcccgaccaaggacaagatgcttgtggctgtgaaggtaaaccccagaggcatgccggcaccaggaggagggctggctgagggcccagggagggaaggaagaggctccctccatttgagaagatagtgctcaattggctttctcagatgcaatcaaaggactttgctccgaggtcaatgaagtttcctagggaccaaaacaacttcctttggcttccaaggtcaagggctgcagcacttaagggggctatgccaggggagcaagtttattcttgtaaatgaccctggtccttttttagtggccctgtggttacctctgtcccaggcctggccctccacactccacccttcaccatgtagtggctttacaggacgtgctgtctgtgcctggaaagtcacatggccatttctcagtagctgagctgttgtagagcaggctgattaaggaggactgggtaaccacttcccaagggcacagaagtcactgagaatagatgttgagggaggggggtgcagcagggaggtagggggttagcactgggagaatagtgagtgaggttggagaaattcttaggtacttcccatgggtttcaggttcagaccccaaggggcagcatgcctgggagaaacttcctcctggcagctgctgaagggctcccttaaccacagggcttctgtattgccaagacacgtggcagatttgcagcaggagctgaattgcttggggtaggagagaagggactttgctactactagttgtccttccagactcttccacccagcagtcaacagcttctctttgtaaaccaatattggacaaatttttgaacatggttaacataaaaagagtcaagtagcctcatggaggcacgcacagatctctggagcccttctctggagtctggagtggcttcattgggtgcagtgagcaggcttctgaggccagtgtagagcctgcaatgtcctgagatgtgggctgaccgatgccagagatatggctccccgtgaagacattcacccagacctcacaatggtcccatccttagcattgagggatcacaaatgcagttcctgtttcttcaacttttgggtctctgtattcatagtcttgtgtatctacagattgtttctgtccacagagggcaaatagcctcgaagaatgaaggcaatacagtgcaggcatagcatgggcatcaaagagcctgggtgcaaatcccagttctaccactgataagctttgggacatttcacaaaacactcaacttctttgggcctcaatttccttatctgtataatagcaataataatatcctctccttagaatgttggggattaaattacataatgtgtctaaaattcttaatgcacttcttagggctttttattgagtaaagactcaataaaaagtagttggcatttgtttctatcattatcattgtcattgatgttgatattactgaatgtgcttagatacatgacatatgatctgccaagcttgcaatgactatctagaataggagtcaccaaactttttctctaaaggtaaatattttagactttgagggccttataactctccattgcaactcttcctgtgttgttggaaagcagcataacaatacattcactaatgagggcgggtattttccaataactttttttattaccaaaataagcatagtttgctgacctctgctctagaaaataaacaagagtcctgcatcctaaaaggctaatgattattattgctgtacatcctgtaaataaacttgctcagtgtgcctgcatagacatgagatggtcagatggacaagggtgtctttaaacagcttggagcagggatgtagaaaggtttctaatgttgaccctaaacttaggatctgcactgccctggcatttttaatatataggatgacactaatccacggggtgttccggcatccatctggggactggagaatgaactgaacatttttgcactttcagcagagaatgaaatgatggctgaaaaccctaggaaatgtttccccgagtggtctggcattaaggggcagtacccagaccgagtaatgcagaaaatgtgtttctgtttccatccttttaaaaggatttccttctttccttggatctggaggagatgaaccgtctgggattttacacgtgtcactcagtggatctgcctagtggtcagcctggaaaagatgcctatctcctccagacaacgtcttggaagtggtgtttcctgcttcctcccctccttagattccacttctttttgcaagacccttccttttgagttagttctcatgttgatgcagagtaattttatacctctaaagaacacatacaagtataacccacaataaagttttcccaaatcaattggcaaaaatgttttgcccagcagttgctatggtacaaacaaagaagcagaaaccacagcctatttttaaggtgcttacagcctgctggggagagggagcaggattgcacaggacataatctgcacatatgtgtagtataagtgtgacattaaaataacctcatgtgtgcgactcttaaataagtggtgccactctgaaatcatcattagacaaatagaacatttacacagcattcaaacccagtcaacccccttcctttgcagaggagggaatgagatccttctccccatttttcctttttttttttcgtctctgtcatttcatactctgtcccgggtgaacctcagtggtcttctgattcatgaattcttcatgtggttttatctggtctaaagcttttcctgtctgtggaggtttttgctttcacttcaaagaccatatcttttatttccaagatatctaatcggttcttaattttgttaccttaattttatttctcccccttcttgtggcatgccttcttgttttctttagaaaatgtatttcttcactccttttgagcatttacttatttaaaaatctttttgagccattctaataaaattgatttatcttcaggaaatttatgtcctgatttttgataatattagtcatttggatttagcattatatttcttcctgcccagcacccctgggcagcttttgggttccttttggcttgaagggtgttttggtttttgttttgagtagtcacaatttctagtttcaattactttaaattgaagcaggagcttaaaacatttgtgaaacaatctgagtgcagaatctcggatttttactattttcccaatgtttttatgctttttccttccactcttaacagtatttttaaccactgacctttagcaggttttttaaaagcattcatcctagcttccataaaaactctccaatctacattcatatttcattggtttctagaacatttcattacattaagtaattacattagcaggtttagttgtcatgaatgagtttgggaacaatcactgatgactcttggtaagcccctctgtgggaaagtagtatctccctgggtatccaacttgcagggagtgttcaggatctcatgttctgtagaggtcataaggagtgccagctaatctgggctgtcatgtagacacagctcagtggagagttttctggcaaaaggaggagcaaaggccctggggcagagaaaatcttggagagtacggaaaggccatgagactgaagtgtaataaatgaggcaggaggagtgtgtgcgaggacaggacgcaaagagagatggggagaccagaccttatagagtccatgactatgttaaggagtttggattttatactacaaacactgggaagccaatggccagttttaagccaggaagacagataagagaggggcacccctgtatgtaataactacccatcttctttcctggtaaagttgtgtgagactctcacccagaggaagtggcagtggattttgagtcactaaaagaaagatgattttataatgaaaggaggttgataggtgtgcgtgtgtgcgtgcgtgtgtgtgttttaccacttaggactttgaacatttaggaatgtgtgtatatcatgtgtatatcataaaaatgaatttcaggatattaatgaaatctgaaactgaacattctttgaaatatctccccctaaaaaaaaaaaaaaagaaagtaagatggagggcagcagggtttggatgacatgaagatgctgaatgacccaggaagagttgggagctgtcgagaagttgtgttcttgccatctagcctattttccttccatccaaataaacagccttactgaaccctctccccaaggcagagtggacatgacagctgatgcacgtagaggggaagataagaaagggaaatgtccccaaactttggaagaaagagagggagagaagaagggcaaattctagctctcctttttgtactaaagatactatacaaacgcctgagccaggagcctccccagcttcagagacctcttggcaagatgcatgtctctacactgatagttggtaactatgataaatcggttctttcccatgccactgactggtgacccattttgaggtttcccagacatgaagatgttaaatgtggaccccacggagaggggccagagagtcaccggccctattttcctcctcattattctcctcctgtcacctctgttctaattgcatcagtccctggggacagggccactggcagctcccaaccctagttgccataccctacgtttggccaattaggtaagaacttcaggtttgactcaagagctggaaagcccactttgaaagcacagagaagggatgtagaagactgaaagtaatggtggttgctttgtgcccatctcccaaatgaagaacccatctctgcctcacagtgcagggtgccagcctgggggatgcttgctggtgctgctcaagagctgagaacagaaatatcccagggctgtcattgacgtccagactgtgggagagaatgatttaaagagatggagagaggccatttggctggccccaaatttgacctacttttccctctcataaatccagcattcacataaatctttgtattctcccatcccacccatgctgggttcagttttttccccttcttcttcttcttctgcatgaaaataaataaaccactctgcatcattcaatacccatgacccagcccatacagctcaaggctgctgctgggagctgggtccccagaagagactgtctttcaccatgactctctgacttctcaaatgtctttgttctggctataggtagacattacatcctattcgtttattgttaggtagcttcccagagcaagcagccagatttgaagtggagaacacatagaatgaggtctggtaaaaatcaacattgggctgatcacatgtccttgccctatcctcaagcctggcacctttgctgggctcagccactctgttggcagccaacatcccacccctttcctgaccctctcttctatacttccatgtccttttattcctctgcccaccattgtcttggggacctgcctagtgactaatttatcccataaattaattcaggcaggtgtgctgggcaggaaagtgtcctgggctccagactcaagctgttacttgttacgtgatctttggcaagttacttccccatcctgaaccccagttatctcatctgtaaaatgggaaagttacactagataactttcgacttttttgtcagccgtagattaatttaatcaagcagtatttttatgaagcctccaaattttaaaaagaatagaaggtggtgctggttgaagttgaagggggcttgatctctggctggaagaccacacctccacttgatgaccttagaggcattgctactgaactttggggcactgtgaggcccaccaggagagtactgaggtccagtcaaactctaagtgtctgtcatttaattagtgtgaatgtgagctgattcctggacaggctcagcctcagtttctccaactccagaaatgagcaggtaggagtagatgatgtctagggcccttttcatactaaaagtccatcatttctggtgtgtgctaagggctgagaggtttgatggacccccccagatacacctcttttggcatattcacactactgcagttctagaaccaaggaagccctacagatttcagataatggggctgcagggacaggagaaagatctctggtgagggagacattttggcacttgcatgatctataggagaggtcagtcatcctgaaaaagccagatgcctagcagagagaatgcaaaccaatctctagtctgtctagattgtcactcccctgaaaatggtgagccaatattacactcacttcctcattaccttgtgttgtgtctattgagattgctaaagtgtgtcagttgaaacaactcaatgttgggccccatttgccttctggcctcatagggagggtggagaggctggagaaatcggggcgcccacctgcataagctgctcctcatgcagaaagggcctctcctcttcacagaccattttccatctggccagcattgctgggcccatggcagtgccctaaccaaggtccttcagatgtgctcaaaggcttcatctttggccttgtagtccccttctggtgctgggaaatccacatgcacaacttacactctacctgggtatattcatcttcctgggccctacaggaagtggcctggtttgcacctctttctcacacttgagttttcaccctgacagaggctgaatggtggcattctggtggcccccagatgctcctttccatcctgcactaggactttgaaggactctgcctggccctgagtgtatctgagatttctgtccactaactgccattcccgtagctgccgccccactcttcccaccctattgcttcctccaaacccctattgggagaacacaggtgtcttccagaggtcaaagtgctcactctcctctgcaaatgtagataccttcacaatctaaaagcaaggactccaaaagacaaggatattttattgtgttgcctgcccagtttccaataggctatgagcatgtgactaattcacaaagctaaagtattggggcagtggttttcacactgtttattccagctgtgggacagtttcctcaaagaaaaccttaggagcaggggcttttgccaggctttcctcctcacagcccctccagctgccatgtacactcacctgcggaagcccagggctctgtgaagaacagagcttgaaatcactggagagtgcacgggatgtggatgtcagaaagtgggtttctatttctgcagggatgaaaatgctggagaaggaaggagtcaggccttatagttgagattgagcttcattgtctttaaattccatttagattcatatttattggtaacccagtggtgtgtggggccagtttctttccaggagtagaaaagacagccccctgccctgtagttgttaaacacctgtgtcctgcattgttcctaggccctgaaggatcccaccctggctgcccggaaggatttccagagggaggccgagctgctcaccaacctgcagcatgagcacattgtcaagttctatggagtgtgcggcgatggggaccccctcatcatggtctttgaatacatgaagcatggagacctgaataagttcctcaggtaagcaaggattgtcttcccctgcacctgaccccagtcccaccgaacccttggggttttccctggagccagaaattatactaccccctctaaacactttcctctcaggatgagaaattagatgaacacattcattcttatacatgatctccttagcagccagattcaggcctttgtccccggtttgtagggaaaacaagttgaggatactatgataagtatcctatactattcttcctcattccaaaatggacagggtctggaataggtccagaaggagtctggaagccccacagcctgtggcttacaactccaagattctagggccacccttctctgatgttgcaaatagctttctccctttgtgccttaagtttctcacttgcaaagtgaggctagtatcttacacccctcctggaaaccttcctgctagagactttttgatgatgagtaagaaggtccaaggttacaattcatcaggtggcagagatggttgaaacaaaaaggggaccgattttcttcaggctaattctagaactgtacagtacagtgtccacctatggccacttaaatttagatttacattaattaaagttcaataaggtttaaaaattcagtcgcactagttccttggttgcagtagccatatttcaactacttgttagtcacatgtggctagtttttaccatacagggaagcacagtataaatgtttccatcaatagaaagttctattggatagtactattctaaaaagaaaggatttgttgtaagaagggtttctccgagcctagaacaagaccatctggacttcgagggctcttaatgtaactggtaagagactggaacgccagccagaagttctggatgaagtttcaagggtggctttcccttcccaagagaagacagcatctattgcagagttaggactcctctgccttctgcagatgccacttccaaacagtgcccagatgtggaagggacagccatgtgaaggtctttggaacccaaggccccaggaagcaggttaaacacacaggccctgtatacttagggtgtggcctctgcgaccaccacaatttgaatctcattgaactctgtggctgaggataagatttccaaagttcaaatgtaaattatagaaggctctagcccactcaccaaaaactgctaagcatcctcttgaagtgggacattcaatagggtgtcgtggttttgaggggcaaagaaatgagttagtaccaggcaatggaatggaggactctctggagctctgcttatgagtcaggtttctataaagatggccctaaaggaaatgaaagcatctgtgggatgttctaagccttctaaacctggattcacaatgaaatggattcctttcctggagaactttgtctttagcataagacagatttgggttcatatcttggatttgtcacatcttagttgcaaattggagcaagttattaaatcttaattttctctcctagaaaacacgactattaataactgcttcacggggttgttgctatgagtattaaatgactatatgtataatgcttagacaagttttgcaagtagttcagtgatcagccaatggtagctgctattgaagttattactattactattttgtgagaattgtgaaccatggtagcttctaatctaggcaacactctttctcaatattcgggatagccctcactttgtccttttgttcccctggggcccaaagggcatgccctacttttcaccacatcctatccttacattcagcagtatctccagccccaagagccaccagcagggttaaagaaagctcctaggtgcctctgcactactgtcatacatgataaaagggaagagaaagaagatagtaggagggaaataaagagtgagagcctagagtaaagataaggagtggaagaagcagaaagtaagaagaaaagaaaaaggagtacagaagaaacagaaagaagtgtataaggtgaggggcagtgccagtgccttgccttctccatggcagacagcatggggaatgcatgcctgtgagtacagttctacaaggacttgctgacactctgaagacctctgtgtctctatgggatcccttcctgaagacagcatgggggagtctctctaaatcaaggctcgacagtcttcctggggcaattttgcagcaaaatctgaactttagcctccactactgaccagattcccagtaggttccattaatctgtcttcctaggctctatcagtcgagggtgaccttctaaagaattctctgagaccagaagctcttagcaacaggccgcaccaacccttcctgggaggcatcctgtcggctgttctcacaaacacagcctccataacccgcaggccaaccctgcctgctctcacatctccatattggtggtgttgagaggcaggctggagtgcactctccaggcagacagaagggagggcttctctgctgacccctcttccttgtgagctgatgcagccttcctccttctgaggagtgaggtaggcagagcccaccggagatagtaaaagggatgtgctcctacttaatggtgcttttcagaggaaatcagagaagcagtaaagcaggcagaggccttgctgtacaccagggctccttggtccacaacttcataaataagggccctgggtgtggttacggctcactgggctttctagagaaaagagtgaatgctaaaagtgactgatatgatcaggcaaggtgttagaataacaaatccgggcttgatttgggatggaatgggttctgggggtaccccagacccatgcttcaaggtcagaggctctctccactgtgcactgctatggccataagttacccagtgctaagcggtgtggtggagtggttaggagtgtcccagggccactgagcgtggactgccagcatcagccctgggagctagtgggagatgcaaatgagcaagctcacctagccaatcagaatcctagggggcagggccagggaatcttggaacaagcactcccaatgttccttttagaagctcactttttacagtcacatgtctggtttcagatcctacttcctgatttcccatatggccattctggacctctgggactttggctgagcaatctcatcattttgtgcctcaatttctttatttcaaaattggggtgggaaaattgagtgaattacaatatttaaaacaatcagagcatatagtaagggctatggcagagttatttgttgttttgctaattattctataatagacatctagcacctgtgaaaatcctaggaagcagtgaaatattaaaaagagtaggtttattccctcttccatttgagtatgtctgctctcatcttagccagaatctggttgtggagtttcacccttacccacacgtacataatctaatttggggcagataaaaataagccataggcaggatggaaagggaaattttatttatttctgtggggcattccagagggcagggacccaggaaggcctttctccttgatctcctgatttctctctgccccctctcttctccccatgctcttgcagggcccatgggccagatgcaatgatccttgtggatggacagccacgccaggccaagggtgagctggggctctcccaaatgctccacattgccagtcagatcgcctcgggtatggtgtacctggcctcccagcactttgtgcaccgagacctggccaccaggaactgcctggttggagcgaatctgctagtgaagattggggacttcggcatgtccagagatgtctacagcacggattattacagggtaaagtgactttcccagctgcaggactcagccacagagctagcgccttgcttacatgtctttttcattgtccattaaccctgtcactctggcacacacatatacacacccatgcccagacatgcactcaacagttatcttttggcctctcttgcatcttgacatacctgtttattatgttctcaattgcccactccttctttcttcttggacatttaactgaactgtaatctgtacattgcaataacatatgcattgtgttcttacgtgcttcaatactcattcttcatgtaaacatactcatacatgtatatgtatgtgcccaaacacacacacagacacacccaacttgatactacatttaatgtctccctacccagtcccagatctagcctcacccatgacacattttattctctgaaattatcttgtgattatgtaagaattatcttgtttccaaaagtagatcttgatgagaagaggaaacctaagtaaagtaacaaagatggctaatatattgctgagcattatccaaatgggctggaacagatgaggaaaggaagcatgttatctgttgccaactttggagagaggacaggttagatcttagaaaagctttctgattgtgagaagatccatcctgctcagttttaccttcatatagtcatctgctttacattaacaagagtcttattttgctcctagaatctttttttttccctaagtctttgggaatctttttttccatggattattgactgattctgatagtgttattatttccagggaaaggatgaatggccatgagtgtcacttatctcagcaaggggaagtatgagtgcaacctgagacacagagataacttctgcaaactgagtgagggcagattgctaaaaaatacagaagatccaaggctgggagtggtggctcatgcctgtaatcccagcactttgggaggctgaggtggatggatcacgaggtcaggagttcaagatcagcctagccaacatgctgaaaccctgtctgtactaaaaaatacaaaaattagctgggtgtggtggcatgtgcctgtagtcccagctactcgggaggttgaagcaggagaatttcttgaacctgggaggtggagattgcagtgagccaagatcacaccactgcactccagcctgggcgacagagcgagactctgtcaaaaaaaaccaaaaaaacaaaaaaacaaaaaatctatttttgggacatcaaaggaaagaggagtttggatagacattataaggagagtgtgggacaatgttttggaggtcaagggatgtcatattccttttcagctgttataacaaataccgcagatgggataggttacaaaaaactgaagtttatttctcatggttctggaggatgggaattccaagatcaaggtgcaaacaaattaattgtctggtaaaggtctgcttcctcatttatagatggccatctgcttgctgtgtcttctccatatggcagaagggttaacagatctctctggcatctcttccatatgaatgcattgccctcataacctagtaacttcccaaaggcctcacgtcctaacaccattaccttggggctgtttcaacatatgaatttggggggtacacaaacattcagtgtattgccaggatcatggcagccaattgtctcatctttggagaaatgagtgatcataccgtgagtcaaatagatatgattgtcctgttgacctgagcatagtggaccagaggctgggaatttgaggtgtgtgcaggtcagttctatcttgatgttcctgatggcctaaatgagatcactcagacgttaaaacagatcagtcaagatacttcattttagcaataggttggagaaaaatggaatgtttgagaaatgaccttggttgttagaaaatgacttgtttgttgtgcaaccaaagaatggcagatgatgtaccgttgtgagagaatataagacaaagcatacagtgtccacagcaagctgggtagcctcactagccacctgtcctatccagtattcccaggtatggaaaaggagacatgatgtggcagtagtcatagaccgatggccagggcagacctgccagaaaatatcaaagaggagtctttctttagtgtctagaccatattttttattcatttccaagagaggcattggtgtggttactaagagggggatgggtcatagatttcttagagtggggctggagctggcatcatttaattgcctttccactttgtttaatggggtttgctggtctgtctgactgtgctcagatctatgtaggtgttgatgaaaacaagggatggctcattgtttttctctgtgaaaggcagatgtttgattatgccaagctgataactactgacttcactggagtctcaggaaactatgtctgaccagaatgtgctaactggcccttcaaacttgcttctagatgtgctgttaatatttattgaaactagtttaaaagaggaaaaacaaaaaataaaaagatcacatccccaattgatatttctttgtccttgccttaataactgtgaactgttgctctttatgcctaaaagggctacaaggaatacatctatctaatttctgtaggtgccagggtagattagaatttaaggaagggagagtgaggtgggaaaatgtacacactacaggtaacctcaattccttcttcatgagttctaagggcgatgttagccaaggccagctagctcgaaatgtatgtttttggtcccaaggaagtttgaacaaaaaaggataactcttacagtaaatacacagcacaccattggaaatctgtgtattctactgatgagacatttaaagaccagcttgtggcatatcttcatgttcacttactcacagtgtcctaatgtatacaccactcctcattccctacttttctgtaaaatgaaaggcagaagtagatttgcctgaagtcacatcaaaatgaaccctgaagtcttattatccatattggaagacattggaatgacaatggaattcttggatttaggcctaatcttacctgtgttcacatcctaatgtgcaaccaccattagcaaccatgtaacctgaatgcattttcctctaacctctgttcaatttttctattgttaaagtgagaacaaaaatattcactcaacagagttgtgttgatgttaagcaagttaatttgtataaagagcttgtagtacaatacttactggataaactcctgtttatattatcttactagtccccctcacatccaagccaagacaactctgtggataattttatttccatatgcaattcctgggacagagagagggactccgtgaccactagaagataaactggatcatgcagctgctccaaaggagtagaatctttacattgaccacctcaggaaaatgtctttcttaaggtttcaacatgtatggaaatactgctcatgaatcctagagctaagtccacatttgggtgatttgtgtaaaacttttttgttcagtatacatcggctaaggccttggaggaatgctctgatttgtcagatcgcgagaatactgtgaaggattctctctatgagctgatacccccggacaggtttgtacctctctgctatcactgattactgaactcatttgggcctaagagtttgttggcttcttatgcctaacaccactaagtgcagataatccaggcctgtgtgtgtgtgtgtgtgtgtgtgtgtgcatacacgtgtgcttgcctgcccagtgcagattccagaatgtgcatataagggcatggggagagatggagataaactcctccttatagtctttctttttcatttttaatttgttaaaacgaagaggcaccatctggctcatacataagtggtatacagacgatttacaaaggtgaactgcctaatttcctgttacacatttagagagagaaaacaaatgttcccacaccagaacaccagagcgatttgttctctcttcttaagacattcacaatgacaaacaccttttccttctgtgaatcactgactcaatgcttccaagattacctttacactggctttgacaagggtaggctttgggtaccattatatctttctaagaacatcagagaacactaagagattgatagtcaaatctagtattaaagttttgaatgtcctgaaggggagaaggttgagatttcagaatacagatgttttcagatgttttgatttggggagaggagtcaatacactgagatcagggaggaatggaatgaggggggaatgggatcctactaatgtagagctccaggagtgttcctttctgttcatcctgctgtcctgtgtgcctgtgtgctgtcctgtgtgacagtacctggcacttgttaggcacctaataaaagtatgaatgagtgaagtcagaaagggaatttagaattaggaaataggtcattccagaccaagagaaacctagacagataaccagatgctcacttaggggaggtgagcctttggagatgatgtggaatgcagctgcaggcagcaggagcaagtcttatctaatcaagcagtgcattatcctgggagaatgttcagaagaggcaaacgagtgatagtctgagtcaaggatgacccacttcaggttctggtaggagacagaacagagtgtctaggacatgatggggtaagtatgctaaaatcctgtgtgtttatgacacacaggtgtgggtcataaacaggtctggcagcaggtagtaaggcactggattctaagctggagattctgggtcagggttcccagaaactcctagaaagacagtaacagtaatccttaggaagtgggaatcatttagaacaagccaaccttactggaagaatatttgattttatggatgtcttggtgtccccatagcagatgaaaagttgtaagctcttggacccacactgccttggtttgatctctgctcctataattcctgactgtatgaccttcggcaagttacttgccctttctgtgtcttcaactgtaaaatggagccaacatcccctatcacacgcattttctgtaaggactaagagttaagaaatataaagctcttaggatgataaataataaatattaattattgtcttagtctgttctgtgttgctacaacagaataccacagaatgggtaatttattaaagaaagagatttatttcttatggttctggaggctaggcagttcaagatcgaggggcctcatctggtgagggccttcttgctgtgtcataacatggcagaagacatcacatggcaaaagaccaagaatgggccaaacttgcttttatagtaaacccgctcttgtgataacaaacccactctcatgataacaacattaatccattcatgagagcagagctctcatgattaatcacctgttagaggtctcacctctcaacactgttgcattggggttaagttttcaacagaggatctttggaggacactttcaaaccctagcaattattggagctaaaatatgaatgctttctccaattccaaaatggacaaggcttacctagatatattagttaaggtaggccaactgctgtatcaaatagatactcagatatataatggttccaacacaaatagaagctcatttctaggtcatctaacagtatgagtaggtgaattcactggaggagtagtcctctgctacaccatcattcaggctcatggagctctacccttttccttgtgtggggtccttccttggtcatgctaggcatctatctatgtcccaaccagctaaaaggagaaactggcatgaaggaatgtgtgtgggatgttgttaatagacctggcctgaaagtggggactaatcactttctttcatggcaagaacccagttatatgaccttcctatttaaaaaggtggctgagaaatggaacatagctgtgtcccacatagaagagaaaaaacatgaattgtacttcatagctggcaatctctgccagagttaaggatgaagaaaaactacattgtttttccacattccatcccagcaggaaatcatcccatatccactgatttatcaggaaagataggccaagccattcttactttgtattgctactctgaatgtggagagagttattttgcaagatccccttttctattctccttgcaaactcttggtgtcccatgcttttgtaagcaatggaagagcttggtcccacctgccatcttggtgctttgattcatcctccaggaaagcagaagagtaaattcaagaaactacatcctatgaattgggtgggggaaagaaacaatgttccaaatcaaagggaatgtaagttaatagataagaaaacacatctagaagaaaaacagggaagaaatacaaattagagcaacttctattccaaatccatggtagtaaaggaggaatccagagtatgtcgaaattctaactgaagccgtccagtattttctaaagaagggttacatccttgactaaaagcctgtattgttttccatcagcaggtcaaaggatgggcttcagaaactctaagacttcctaaaattatatgagtaatattgagtggggtgttgtatttcattttttgttttttgaaggttcagggcttttaagaggatcctaaagatatttatggcccattgactttactgaaatgaatttcccagcatgtcagtcctgagagaacaagacagagatccagggactgtaacaatatgagagctctggagggcagccccctcattagtttaatgggaggacctgaggtgcagcaaagctgaggctttatcagatgctctctaaggtgccttccagttttatgatcaacaagaacattgactgattactcagtcaccagagctgagagcctgaggctcctctaagtctttttgaccagtgagttcttgccttcaagtcgggagaaactctcagatgaaagtcaagtggttggcagtgtactgaagagagccagtggtctgtgagataacttggttttaggtaattttaaaggtaaaaacaaaagctaatgatggtaatttgaggcaattgacttttaggatcacagggttccaccatgctttctgctcttcgttggaactttgggaatctcatttaataagtggtacctctcttctctgcccagatgatgtgtttgagcccactgaggctgagaagccaggcagatgaagattataaagtacacttgaataatgatagaattcttactgatggtgatttcagtgtgcagcaacaatagttttttttttttttaataccaagtcccctaatctttatagcaagattaggcattccagctcagtcatagcagcctggaaatattgcagactttgctctgcagaggcagaagttttgctgctcattgctcctctttgtagggagaagatactcatcagaaaagggaaggggttgtggccccatgcgcagtccccaaaatcagacaagctttttctcccaagaggtgagattaagactggagagctctctgcattagacctgttactccaataaggtgtccctgtagttggaagcctgaaacagtgcaaagaggaaggggtccatcacaagtctattcatgtccacataggcaagcagttgccagctacactcagaatcatatagttccttcctctgagaccaggagtagggaggcttgacccctagcttaactggtgataaaggattagcagctaggcatactggttcttgagggatgctgaccctgtttggagagggcttatccagatttgtccctttggttttagccattaggtactcctaagtagacccaggcaccaatgaagaagtgatgctggctgtcaggagatgaggttcttgtactggttgtccagtgaccagactctgtttattgtgtttgattcttcctttgctgtttttgaaatatcgtaatcattctttaaccatcgtcctatttatatagaggagaacaatggaggagcgttgtattccattcccgaggaagtggttttcccaaatttttataataaaattttatttgagagtaattttagatgtacagaaaagttgcaaaaatagtgtagagaattcccatatatccttcactcagtttttcctcctgttggcatcgtatggaaccagggtaccttggcaaaaaataagaaattaacagtgacacaaattattaactaaactacagactttgtttggattttaccagcttttccactaatgcacattttactgtctcaggattcactctgcgataccaaaccagtcttacttaagggcagtggaactaccgtggtcaaagcaggggtgaggggatggatcccccattgcccacagtctctcctttgataccctatgccctcgatgcacccttaggagcctccaggattccatggttcaattttctgcaacagagataggtgggctataagaccccctcctgcaaaaccagtcccagaggtgctgagaaaccctattttgtgagcaaattataactccagattcttacaagaatcttttagaactgtgcagtctggggcagccatcttcatatagcaagtggacagggctggagttactgttctctgctggagtttaggagtctagaggaaggtatgggatcttcttaaattcccagccctaaaccatgcgtttgttctcttcttcagctttgggagagggtgctttgtgctaatcaggagacgtggccacagactggagagacttccaagtggggctcagagctttagttacctgagcatctgctgtaggactgggtgtcgtgatatgcacatctcaggtgaattttgaaaaacaacttaaatgctaagacctattaagttgtacagagctgctgagggaatgaacacagaaggaggtgtgtgggatacatttatgctaattataagtattacaaccttatttccttgattaaagccagtggatctgcacactaattatctacaaaatatcagtcactttggaatacaaaagtctgttgagggacagggctgagatttaggacatcttggtctcagtgtcagttctgtgtccaggttccaaatcagagatttcactttcatctctaaaatctggagtttggattccagccatatgatctctttggggttttgccttctgttgaactaagttctgtgtgtaataataagtgagaagaagacttgatttttttaggataggagggggacatggccaaaggtagaataataacgtcaaagttgtcttaaccagtctgtactgttgctttgaccctagaccatagctcttccacatctcagccccgttttttccttcctgataaaataaaaaaacaaactccagttttgaagcagactcttctacattacctggatctagtttagtgactgaagtttaatttctgctccaccctcttcttcttctttgagatattgaggataattgtccaagattcaccctggtgggtagaagaattacctgaacagaatttctttgtatttttccaaggatgaggattatctaattattgctatcatctttgcactcctatacctccaccctttctagagcattttatactttatttcaatatggtggtaatgttggggacatctacctgcaactcaggtattctgaaaagtatagaactgaatacagaaaagaatctggtattttccaccctgggacactccggcaatctggagagaagatgacgtggagagggcatgatgaccaggaggttgaggtgcaaagaaccgggctctaacaatgaagtgatgaagttattttgtgaattctccctgcagtggcctgaggatattagtcctgggaagtgccctcccatttttgtttttgggctcttggcagccagtgacaaatgtgggaactagaatgcaggagtagaagccaagaagcctagattcagtctctctgccatgactcctgacatggaacagatccctttcttgcccaggacctgagtttctcatttgtaaagtggacatttctcatctttcttctacactgtgtgaggcttttcatcttttcacaagtactggccacaccaatagcattattgtctgccactgcatggaaactaggttgagagtttgtgggatgtactcaagtttcctttttagatacatccatggctttactgctttttttcctggactgggactgaaagaactgagtcccagttcagtcactcggtttctttgatgacattgtctttagatcagtgttcttaacctcaactctagttaacacttccctctcatgaggttaaattagatgcttagtttccaaacacatttgcacatttgctaaccctgtccatgttggtttatttcctaccctcataccacattccctagccattcgcaagatccatgtgtgagggatgggattcaattcaattccttgtccatgtgctaagatgaatagaacacaaggaaataaaaatctcatagggaatataagaacagataaaaatgtgttgctctatcataagccaaagggaggcaaattgtataaaaggcagttaagaatgtctaaagcttatctaagtagaggaatggcatgggtcttgaggggttggttggcagtctggattaaattttaggaagatatctccatcagagaggttagcatgagcaaagtcatggaggaagcttggaggtaaggaaaccagaagaatgatctagaacggtgtgtgattcaactggccgaaactaaggatctatggaagatgcatggaaagaaatgttggtaaaggaaagaccaccatggcagcttttgaaaggccaactattttggcttaggtagtcaatggacagtcacagaggatttgtcatctgttgaggtgtgaatcaggtcatgtgtaaggacaattcataaggcagtggcatgtgggatagattgctggaaactaagaccataaaggcaggccattgcactggcccaggaaagaggcagtgagatcctgtgccacagtggtagccatagagtatggaagagaagccattagaatccatgggctcaggactacgaactggagactggctggtcccacaggctcaaagccacttgcagtttgtaaggggcaactatgaaaacaaacaaacaaatacaaaacaaaaaaaaaacacaaaaaaacagtgaaatggagggtcaggatgtgtcttcatccattttgaggtgctataaaaaacacttgtggctatgtaatttataaagaaaagagatttgattggctcatatctctgaagactgtgcaagaagcatggtgccagcatctgcttctggtaaggacctcaggaagcttccaatcatggcaaaggaggagcaggagtgtcacatggtgagggagggagcaagagagagaggaaggagtggtgccagactctttaatgactagatctcatgggaactaagatgaataactcacttactacctggagaatggcaccaggccattccctcagggatccacccccatgattcaaacgcctctcaccaggccccacctccaacactggggatcagatttccacatgagatttggaggtgacaaatacctaaataaaccaggatggatttttaaattgcatcttttaggccaccaagtccattctgcatccttaaagtgttagaaacaacggagcagatgccaaatcattcaattttaaagaaatatatagctggaaggagccttaaatgtcatctatttcacccttgagggaccaggcagaatagcatcaaaatcatcccagacagatggtttgctcactctattccagtgcatcttctgggattccacaggtttccttccttattcctttcagctgtgggagagggaagctattttcagtgagagatttgtctttttctttctaattattaacattctttagaagtgggaagttctcagttgtgtctagcgagaatcctacctgctacaaggtaagtatgtttcatcctatgtccttagtggagataaatgtggtttatgttataaaacagacattataagactcagaaaaactaagaagaacctcaatgtgaccaaaatggccctgtggccaggtgcggtggtttgtatctgtaatcccagcactttgggtggcccaggcggggggatcacttgaggttaggagctcgagaccagcttggccaacatggcaaaaccttgtctctactgaaaatatgaaaaattagctgggcatggtggtgcatacctgtagtcccacatgcttggggaggctgaggcaggagaatcacttgaacccagaaggcagaggttgcagtgagccgagatcacaccaccgcactccaccctgagtgatagagtgagactctgtctaaaaaaaaaaaaagccttgtgcttttcataggtaattggttatattttatgcattgtttgtatcttgactggtgggaaaccagtggaataaaaatatttagccccctaatcctgccaaaaaataataacctatttctgagggtggtttctagttatctcctaaacttagtctcttctctctgcagtttagaaatccagttgttttcttctctcattgaaggttgtgcaggcatgaggactgatactggggaaaaaagacggggaagatgccccataagaaaattctgagacgttgaagcatgcttatattggattctgtcctcgggaaaggagaggaaaaggctgaaggagaccattgaatctggtgttgagtcattcacgtctctctactcctgtggagggcccttacggatgtgtcataacaggatctccttttccttcctcaagtgcaaaaggccttttttttttttttcctgagacaaactgaatatataacataaaaagatacataaatttccatacagatatcttctttactagctgtaattaagatatttgcaagtaaagagaatgttgtgttcccttgacttcctcctggtagggaattgtatttctctcataatcctcatagcccaagattttgtgatctgtcagtgtctaaacggaaggaggaggaggaggaggaatcagaagactgggtcaatacaaagcatctgaaattcagaacttcaaacacagtttttactctcggttgtttttttctaggctttgctaatcccaaagagcaaagttggaggtaggaaagttgatagcccaagagcagatgggccgagcacccactgacattgcagtcaggcagatattcaattgaatcactgagcttctgctgagagctatttggccttaggaaatttacttaaattcactaagacttagattcctcatctgaaaaaaaaacaatttcttcttttgtgcacattaaataagataagtattcaaattgccagtacccattaggcacccaatagatggctattattctatgtaaaagaataaggtagaaattatatatcagaaattttaaaccattttaagttacaagccaaggttttccctatgatggatctttattgctggatactaaatttagagaggagaagaacctactcaagagaatttagggaaatttaaaataaaaaaagccacccactcctccaggactggtttagacatttgagttgatctgttggaagcccaggaggaaagagaaaacacttttaggcatctgcaggaagagcttttctattgtggagttagtagctacaaccaggagctaatttttgtaactgtggaccatgaattctgcagtagacaaaggtcttcagaattaaaacctccttctccagatgtccttagtgtgtgctgtccctcatcatcccagagggagagcttagggtgatgcacctgtcctggagccttggggatagagaaaagactggcttaagtccagctctacctcctttctcctttcattggctatatgatggttactgcttattattatgcatagcatgaaatatgcaagtgtatatgcatatgcataatggatgtgcaagttctttgtaaactgttggtttgagtgctggtggttttgtcaccaccaccaccaccatcaccacccccatcaccagcatcatcaccaacaccatcaccaccaccaccatcaccatcatcaccatcaccaacgccaccatcaccaacatcattaccaacaccaccaacaccatcaccaacaccatagccaccgctgttatcaccattatagtctgtgcttagtaaataaccatgtacaccctggaaaaataaattgaatccatcaatgttccaaagttgactggtaggtggtggtctgtactccagctctccaactctgccaatcatcacgacaatcttggttgccttcctccattgagtcatgctttccagcctcttcagccagcttggaactttgatttgcagcccggtttgttcttgtagttggtcatttccttacccagtgggtcaatccccaacttcctgatctttgtatttattttttcacatcctgagacacttgggtacatgtttgttccatacctcaataaagcataagttcccttgaaggcaaaggagctcacccacgtttagcacagtgatttctacattaaaaatgcttaataaaagttacttaattaaaaaatacataatactatattagatgtttgtaatgggaaaagagtaatgtccccacttgcctaaatcttcttacatgaatcctcattggttcccactcactgggcaccagtggtcagtatgtggggactctgagtatgcgtatttgaaagatgcactggtatcaccaagggaaagccagctggatctgattccctgccaatggccctgacatctgacatctgcttatcagtgcagaggactggagaaggtctcacaataattaaaatacccataagaatggagttagcaccaaaaggaaatttattattgcacacagagaatcacattattcaaaggccatagcatcaaagcatttgttctcagtgagctagtccatgtgggaagctggatcataatgtgaaagttgcttaaagaggaagaaatcagggcaaggatgttagaagagtcaaataatcaacgacatccagctaagaaagcctaacaacagggttcctggcttctcagcaggttcagaaatactccatgtcttttgcctaaatcctcctctctcccttgtccagagccaggaagggatgaacatctccaccatccagttccaaggctcattctttcccaggcctccaggatcagccagtgccccatctgagagatacattatttcttcatctgtatcaatcagggcacaatgcagccatgatagcctaagagccactcaagatttttcagacaaccttggatatacatccatgttttcattcattttctgctgatcgtaaagaggccaattgtattttcttcattttcaaatgtttgggagccactttattacagcccctaatgcttcccatgtcactgaattgctttcacacctaaaaatgagtccttttgttgcttgcaaatcttattgccttgatacctagtattacatgccccagggagggtacatattaatagatttcaagtgcctgttctgattgactggtgattgcccagagtggagtgatgagaagaatttggtggttgcatctaggatcagtgaaaaagtggtgatcagctggtgacatctgccatgaaagtagaaaagaggattggtggcacttgtgtcctgttctgacacatgtcatcctgagcagtgctctcaattcagggattctgctggaccctgttaggcatgctctaaccttggattcacacaagtggagggattctaatgtgacatagatattgagtttattgagtgcacctgtgttgaaggatcatattcagagaaaggggtttgccaggcggatctgctttactggggctaatttccccatcacataaatgagactagcatccccaaattctgaattctcttctactggcctttccctcacatttcaactaaatagttggattttttcttcttttcttacaacttgtatatagcaaaagtgccttgtttctgggtagatttgattcccctttacacactgccaaggtgtttagtagtctagatacagctttccctgccagctctatgccatcatctctgagccaacttttatcaatgtagcagcaggatcttgaagcatatatatatatatatatatatatatatatatatatatatatttttttttactttttgaaaagttgaacagcccaagatcagggtttgccgctagagttctgctcccaagcagacattgattcaattatcaacattctctggatatggtctatgcatttttattactccacccaactgttttgtaagtattctatgagagaccttgataaacgtctggatgaaatttgggtaagcatctacactggcaatcttgtgaaatcctgactagaaatgaagttggaggtcatctttcaaacccacttatttgacaggtgaatacattgaatgccagccagagagagagagagagagcagatgtccctcaagatcacacacctagttagtggtagagtgaagacaaggacattcttctcccttcctgtgaattcagtgctcctctctaaccaccatcaaagtgctatgaggtcaatgggctggcatgattctccctatttacagacaagtaaattaaagctcagagagattagtgatcaatccccagactgtacaataaatgaggggtggaattgggtttggtgttctggttaagttaggtttttcaagggatgagagtttacttgtgaatagaatgtttaaagagcacaccaatacagcacagtctccatgaggttaagtagaagtgtgagcttgtaataattgagttccatgatctatttttctaataaggctttgtggcaaggccattcaaggcaaaggaggaaaacaggatgacccaagcctagtcaacgcagcaagcaaagatgatttaatttagagattttcggctctccaatgtaatcttaaagcaaccagcagcaacgtgatttgaggtgattgtagtctgtaaaatgtaacacagattcagtgaaactgaagggcgaggaaggaatattagaagcaagggaggtggtgctcagagttgaggagtattgtcctattgccttgaaatgtgttgcaagaagtaattgttttaatgtttattgtgaaaatgtattctcaagaactttgattgacacataatcattcacagtagcttagaagttctttaagggcagtattcatgccttatttcactgattatataacccttgtacctaggactatacatgatatatggtagacatttcataaatgttcattaaatgacataaaccaggagacaggtgttcttctcagcgaatgactgatctgggatgatgcttaaggaccctaatttggaacaatcagagatcacaaagccaggtttcagtacagagatgtatgcaagggttgtcctccattattttggtgcaatgagtgggctctgcaatgtgttcctcacccacaggggtggcaagattggaaaacgctagagatagttgacacctgagggtggtgaagcacagtgctgcaggaagttacccttattgtgtgaaaatggaacagaccgtcctacaagatagtgggttctccatccccattgggtttctagaaaatccttagaaccacattatacagatgcctgtgctggacatgaggtttcagaagatgatctcaaagttttgcttttctctaattctgagatcctaaaagccaactctacaacagagattgcttagataagtgcaaagtggtagagcaatttaaggactcataattatgtacgtgcaaggaactgtgtcaagtatatattttcatgatgctatcaaatattaagccaaattcaccctctgcatatctacacattcacagcctgaatcctttcccacttcgctcatacctcaatacctgtcacttgccctgtctcttgtctctccctgtgactgtgtttatcttgctctgaaggctttcttgaggcatttctccctcctttcaactctaaaaatccacaatctatcctacattaaagaaaaatcttcatttgacctttctatcccttctaactttgcctgaatattgaaataagtacttttcatcttctgtcttaattttttgggcttctgatcttaccactgaattgaatctgcagttttggggtcactaattatctctcacgaccaaatttaaatttcttacttcaagtctaacccttcctgaactattgttgaatgacattattaataatttaccctttcccctgcaccccctgcaactgccagtgatgcatagtattcttgttgaatgcctcagttatgctttgttccacaagttataaccattcctggtcattctttccctgctccattggtttctctccttcctctcattttaagtttgggtgctgctattttagacatctgctttgcaaacctcatgcactcacatggttataacccctttttacttttacacagaatctgtttgaaatttacatttgcagcctccacttcttctctctttgattgcttaatctgtaagcctcccctggagagttcactggagactgaaacacggcatgttttaaataaaactcaccatggcctcctcctgcttctctgagtgctagcacctcagcaaccgttagcatccgtgaaaactctcttgggagcttcccaaaggggagccatttctgaacctgtctctttatcaccagcctgctatgtctttccttatagcacctcagtgccactttttctttgcacgttggcaggagctgcccgggtccatgcctggtcagtccaaaacctgaatccacgcacacaccttcaggcttggagctcttcccccagggctcctcgaacttcctcatccctcctgtgtttttggagccttgtgtgagtaaatcttcatttcaccaaaatataaatttcttgccctggcctactgggtcctgaagcccctgccagtctccttcctgaccttccacaagaagcccccttggctccatcccagccagtctgtccccggtggcccagcgccagttgcttatttccacctttgcatgaggccctctgtgttcatttgttcgggctgccatagcagtgctccacagactgggggcttcaacaacagaatctgattttctcactgctctggaggctggaagttcaagaccaaggtgccaacagggttcattcattcagaggcctcgctctttgtcttgcacatggctgcctgctcactgtgtccccacatggtcatccgtctgtgtggtttgtgtcctaatctcttcttataaggaccccagtcctattggattagggcccaccctacagaccccattgaaccttagttacctcatttaaggctctctctccaaatacagtcatattctgaagaacttggggttaggacttccccataatgagcatgtgttggggggcacacagttcagtccatcacaccttctcttcccaactgcccatctgtcctttctttcatctccgtcttctttctttctgttcgtccctccctgccatcagcactcagcaatccccatttcattgtcttcactggatggtcttttcagcctcaccctatgagtttgtgcacagggacatgttacttcatgaatctgcctctcctccaggtcattccagtgctgcttctctgcctctgactcaattgagagcagagactgtgtctcttgtctcttgcacacagcccttgacttggaagcacttgagaaatgccattgctaagttactgtgagtccctcctcatgcacccccctcctctcacttctcaggagccctttcaagggaaaggccttgcttaggagcttttttcctgagtggtgagggggaacacaaatgttaactccatggacagcaaggaggaggagggctgaggctccatggtggtgacattcagtgagttaacctttctaaatcaggaaggaaaggagagggaatctgggtagccctaaaagcagtggtgaattcagggattttctgcgggacacactaagagcaataattctctcagaagctttggagaaagcgctgtttctttgacctaaggggctgaaaattctagatagaacccacttcctctccaagcagtaggttggctgggaggctcctgctgggagtagaaccaagctcgtggagggaagcccattgcgtcttcatgtcccacagaggaagacagctgggtgtcatgtgctgggagtggtgtcatgatgtgctggtggagccccgagtgccttgtgtttctgggcggactccagagtaagggccttgaaggtgggttgctgcggtcttccgctgtcctccctaatgatgcaggacaaatgtttgaggccctgcccaggagagacacgccattcagttaaagatccccctgctttcctcatgctcctcctttcatccttccatgcttccttcctctcccttcatcccttttcttctctctcccccttcccactctctcccctcattcactgtcaggaagggccatgccagaagggcccgttcagtgtggtgtggcagcggcagaggctagcagcaacggcagcttccacagtgagtctggatttgatttctggggccagggggctgggcagggcagtccacacacagacagacagcttgcaggctttggagaggcacttccatgggctggggcctgcttccaacctctttttccttgcctcccaccgtggagcatcatttaacttccatggaagtttcctgccaaagccattgatgtgcttgggatgtctcatggggagacagcatggtggggggtggcgggccataatctgctaaaattaggtgcacagccgggagagccgctggagttcacatggctgccagggcttctgtccagacctgtgcgtgtggtggaggctgaaggctctgcatggacgagtggtttggctgctttcttgcatttcaggaggtgtgaccttgagttttgagtacactttgggtgcttacactccataggagactccctgtaaggaaataagaatgccctaattgcacagagtagagggtctaagaactggaggtctccccattgacctcagatgaagcgtggtctaacagacctgatgctcaggatggtcactacagatcctctgtgactgagtcagatcccccagtgcttgcagggaggcttttgccctccccattttaatttctatggtaatttctggcagggagatggacatactgcagagtcagtcgaagttccatctgtcttaccttgatcatcagactgtattggatgacttccttccactttttgcttgggggcttttttcttctatttgggaaacagttcacttgggaaaacagaaccacagaattcacctactcagccttaaagatccatcccagactaagaagacacaagttctgcttgccatcttgagaggctttccacaggccagaggctgcttcctaacactgacagggcgtgcggtagttaagtcagttttgaagtgagaagcttctggtttctaatatacagtattatcctgatactgcagtcttatgggcaggtgcatgggaaggaaggcttttacagtttcattcatttctctcataatttggttagggaggtaaattaagcataacctcccaggttctctcaggatcagttttataggtttctcttcttgacactgctcctaataacagcatgaaagtttaagattttcagtactaacaagtgtgtatagctagggtatttcagaacaaacatgcttggcagccttatgagaattttgcaagcagaaccattatagaagattaatcaatctcttctcatgcttttaaaatattgtatgtatttcagtcgcatcgggttcaaactcttggttttaggaactgacaggttgcattaaaatatcaaattggtcaaatttattaattaatttcaacaaacatttaatattaatcaactgtgtatgtttgattgtctaaagttggacccttctgagaatgaaaagggaagttattaataattaaataggagctacaggcataaatttagacctttcttggtaaattggggcatacagtcattttatccatgtatcctgagttattgttggtgccagtgatacaactgtgagtaaaacagacaaaaatcgctgcccttactgagggagataaaaaaataaagataaagtaaagtatatagcaaattaagagtgataggttcttaagagagaaggaaagcagagaggagaaaaagaagtacttggtggtagtaatagtggtggtgttggtggtggtagttagtgttgtgtgtgtgtgtagtttaggtagggacgtcaaagcaatcgcattgcttaaagaatacgaaatattttagtttatttagtttctccaaggagggctttcatgactcagctaaaacttactgtatggatgaaatcgtatctgaaaattctgagtccaaataaagaaatactcacaaacttcataatgacagaaagcaaagagagaaaaccaggtggctgtggcactggaaggataccttgtctgcttgatggtcagcacgggtttcatctccctctgacaccactgagacggcatcagaaagtgaacatggctgtggattcatctatttggggagcatctttgtagaaagtcccttaatctctgacttgtgctggccattcagagcatcttaaggcccttccttctcccatctgcctttctgtggggtaacggaagggcagcttacagctgctgaacacctgctctagccaggcaccttgataggggctttgagtaaattaatttgtttaatttattctgttctcatgaagacattattatagttccactttgaggatgagaacactgatgtttaagctcagaaatagaaaatagtggagccaggatttaaatccaggttgaattatgtctgaaattctgcctttatcagttagcctcagcatctttccacagataccagttggcaggaagtggaagtaagaaaaggactcactgggtgacccgaatgtcccatgtgtgggctgatttgcatggctggatcaggagcagtagatgtgttggggtggttgtccatgtctttgctgattgcgcatgaaggcacagcaacttctgctgctttgttttttgagtgttgtcactggaaatggggatgggcatgggaaattttgggggcatgagagtaaatcttcctgtgtggcttccatcctcggctgaggtggaggcttaacttcagtgagtcagtgttcctggggctcacgcacgttggaaggagggaccatgcatggtgtctatgtatagataatagaggtggggagaatgcatgcagagtgctgagactgaacaaaggtttttcgacaggggtttgagcgaagagttgagtttgaagataatcctaaatttcctgtctgtcttttgtgaatggaatccacagactgacctcatccagtcttaggatgctattagcaagaaacaggatgtctctggaccacatctcagatatgatggttatatttaacctaaatatcactgtgtaatgttgcatttatttgtggtatactttcatatatttcccagaaaacaaataggtaacctgttgttttacgcataatatggtaacctcctgataaggttatgtttcaagcaaatcaccatttagatgcggaagagagacctgctacaacaaagtaaagaattactttgggatgccaataaccctctccagttttctttttgtgataaagtagaagattttctacctgtgatgctatactttccttggagttttagagcatatttatcccagggtctctatgcatgtcaagacaatgtttcttagtttcacaacatgtgtcataggggtagagagaagccatactcttgtcatttggcaaggattttctttttcattacattgttaccatcacagaaatatactccaagcactgggatgtccctcgctgtggtcttctaactattgggtagggttacctcatcaagttttggttctttactgcttttagggacccttgtctagtttcccccgtcattttgatacttgagggctgaggaggaaagcatcattcatcttcctccataggatactccactttcacttatctgagttctccctctggtagaaacaaataagcaagcaaattagcttttcttctaaaatattaacgcatctcaacacagttggcttctctcttctgcatatgtgtgctctgtggagtcccagctgggaatcagggtaaagatgagaagtgtctggttatatttcaaactgacaaggatagtcattctttttctggttacatatgggccgccctgccactcacacatacaagatatgtcttaattccagaagggcttagctgaagcttaaaagaataatacccatgccttagacacaagtctgcaagggcacctggtcatgagtgtgcctcggtctgggaatctgcttagagacttggtcatagatgcatcctttacagcagtacgccgggatttcaggggtgagatgaacctaagaaaaaagattcagagagatcccaaaggcccatattaaaaggcttattgtggctgggcgtggtggctcacgcctgtaatcccagcactttgggaggccgaggcggatggatcatgaggtcaggagatcaagaccatcttgtccaacatggtgaaaccccgtctctactaaaataaaataaaaaaaaaattagccgggcgtggtggcatgtgcctgtaatcccagctacttgggaggctgaggcaggagaagcacttgaaccccggaaactgaggttgcagcgagctgagattgcgccactgcactccagcctggcaacagggcaagactccgtctcaaaaaaaaaaaaaaaatgcttattgtagtttcattctagcagggcatgtcttggtcatagacaggtcctttaaagtagcatgctgggatatctccccacccaaacaaacttagtatttctaaggaacctaaggacacacacctgtttatttccatgtccagggtacacaaggagagcataagacaagctttgttcacccctcttggcatgcgagtgttttccagccatcactgaggttgtggagagggtctggttgcagtgaagatgtctataagctagagattattctaaaacccactaggactttcccaaagtcaaacaccaatgtagtttaatggttttgaaattgtggaatgtggtttccccccttttcattgctatcccaagtcttgtgatccaagatcattaagactggccttctggggaaaaccaatacagtcccctgtgtaagatgcctgtgaatgtacagggtatcgcatgtcctcattagtttagggagtttggttgtctgttcttagtcccagtcctctgagttcttaactggagatttatccagagataagaaatctgcccattaaatagtaattaatctttgaactctcagttgccttagcattttgctttctgatgatctgaagaaatatagtgtctcagagcagagcaagcccctagaacaggatgataaaaggggcctggaatgcagtggggctcaggtcttcaagggaaggggttgtaggagctacagggaagatgatggaggaggggagggaatctttctggttgtgccatccaggaccactcactgagaatgttgccctagtctcgtgatgggacttcttggtctgcatcttatcttcaaagctggtcaagtccctttgcttccgcaattcttttgggacaaatgactcatgagaaattcatatgactacaagaattgtgacaccgcctcctgtctggcgatgatgtgggttctgctatttctagactggtgcccacctctcttgagccttagctggttcctctgattagtgctgcctcctctcttcctgccacttgtggctagccctaatggaaagtagatctccaggcagatgcatccggctgaagaatcctggcaccggggcaaatgcagccctccaaggaaagcttttagttcagacaccggtctcagagcccacaatgtgaactgtgtcctgtgaggctttatggccagtgaagctctggcatttgggtgcagacatgtagggtggggaaggagcaagggggagtcggggtgagaggaggcttatcgtagtttcatcctagctgggcatgtcggtttttacatgggcctctgggatctctctgaatcttttttctttggttcatttctagaaatagacattgtatttctagaaatagaaactaacttgagagtcgaattttctagtgttttctcaggattttttcagctgtgacagaaaactctctaccttaagcaaaaaggcaatgtactgtctttataataaaatttttgttttccaggtttaggaattatttctagtgttggcttcattctaagacctaaataatgtcaccatgtagagcctgttgcttcctctctcccttcttccttctcatctctactctgacttctttccataatttcatcatcattctctgcctctctctttgtctgcccaagaccatgatcttagagaaagagatgttaacgggaaatagatttccaaacaatcaaggctaatgtattttgaaaattatgatgacaaatgctgccacagttgaacacattatctgggacctagatgttcagtagtgaaggcttgtcctcgtcagggaggccttgccatcaggagcctagctgatgaggtgagaaattatcagtgccatttctacaagagtgggacgggacattatgcagagaaaagctccaagagaaagacacaggaagcaaagtccatgactggcttcttttttccaatctgtctatggaggaacatagatattttctgatgtcatctttatgagtgctctctgggctggtgtaggttcccatcttacttcattgaatctgctgatttagatatttctgaatgaaaattccccttcagcttttctgagtgttttatataaatcacatttataggatttctatcacattgtccaaaatgtgccaccctaacctatcaatttacatgccttaaaacatttttactaatgagtctttttttaatttagaatgtataagaactttaacttggtggtgaataagaactttggttttggaatcagaataatttgggtacaagacttggatttttctatctcaagcatttttgaataagatgcttaacctcttcctctcctttttcccttcctctctccctttctccctctctccccccctccccaactttcctccttcctttcttcctttctcaatacaatgctgtcgataatagtagttttcatagccaatgcgttttaggaggattgagcgaagcagtgcattttaattcatttagcatatatcctagcacagtataaacatgcaataagttgttctatatccatgttcactgggacaagaacttagcccaactcaactcccaaacttggaatgctgaaagcatctctttctacctctgttatggtggaggccagagcttcagataaattaagatgagggctctacccttggggattacctaccccagcactcagcctggcttgaccttttggggacccactaggtgaccctgagaaagatacttcatcccagtttcgttagcctacaaacaagaagtccacctgctcaaattccccttctatattttttggaaacaggaatgtgtgttaacagaggaggaatgcctttgaataacaactctccaactgtgatttctggcttcacatttaagactttcttgtaggttcatcctcagagcagtcctctcctgccttttgaccttgaaggagaagccaagaggcagggcttgtttataaagagagatggagcagcccacagctgcaggcctcagattatggcctggaatcccagatgctgcatggaggtacagctcctccatctctttcatctgaacctgcccttggcctacacccttcactgccaagaggcaccccaggacccagttgtagagtagcaggctgtgtggaacgaagtggacctcagagctctaaccttctcacagggccaggaggggcatccaaagattatccagtctctacttgaccaaatcatccccttttggaactggatgatccctaaaggtcaactagtcgaagtctttccctcaccctaccaattatgcagatgagaacacagaaggccaggggtgagccaggaggtatgatgcaaactaaggcagggccgtggagctcctgaattctggcccatgctctccttcactgcctacagcacacacacacacacacacacacacacacacacacacacaccctctgtaaagtcaggctgctgatgctgcaggtgttaggaagggccttgagttgagctttcgttcagtgttcttgatgtcctgattcagatgagaaaattatgctcatgcaatttttgagcagagaggaatcttagcaaaactctggtccaactatgtcattattccaagtatgaacattgagaccaaaagaaaacatgggctgccaagaccacaggatggcacactagtagaactgggacaagaacccagatgacctgagtctgaatccagtgctcttttcactaaggttcctggtttatcttggtgccagaccttccctctgcctgtccccattccaggatgctaaagatgcctctaggccttgccagggctgtgtggctgggttaatagatgcccctttcctggcatttcccagggaaaggcccaactagaaacctatggtgcttaaaaagagtggtggtacttctttttttgatgaatcaccttgcagttcccagagtgctttgactgctgttaccacccaacctcagacttccttgagaatttaacgctgttattttttccaagttgaatccccacttttaaatgaagataaaggactttatcaactgtttcatgtctgtggtcctgcaagtgatctatgagctctctcctctcagcagcaagcatccttcctttagaattaaagggtcttttttcatgactcaaagacaaatcccattttccattggatgaagagtacattcaactcccaagaaagctttaggtgtgtgagaaggctaattgtttccaccttctccttgcccttatcaaagctcctccagcagccagtcagtgaacagatgggaaattcagctccagctcagagaagctagataaggcagcctgtagcctgcgaaggacttgtatattctttatgtcctctcccatgatgtgcatccgactaccctttgcctggggatgtggccatcagtagtaggtttctgctgtgctatgtattgtttactgaagaaattaaaatatgcaaagtgttcctggtccccctttttgggctccctctccagctccttctggcattttctgttggcagttaataaaacaaaaggggggcccaaaggctcgggtctccctccagctagaatggttaatttggagtggtttggaagtagtagatattacctctagctacagttgtgcctttctggctgatctgtccaacctgcaatgtgtgtcctgactgatggagttcgaatgcttcatgaaaggggcaggggattaagggcacagaaattgagggggtgggggaaggagaaaggaggggtgggtctccttttgcttattatagcagcacaaaccagcaaagacttatctttcctcaagacagccttacgttgaaagagctacagtccaagacacttgaaaattactccctaatccagcctaaatctttaccatcccttaccactaattatgcccatctacctgcactcatagaagttccaaatccaatcccttaccttatttaaatcctggacccagagaatacctcttgcaaatatttataagatatttatacaacactactgacaccattacaactcttattcatcccaatgactgggctggcacttggtaagccccaagatatgttagtaagtaacagttgcaattagagttgttatggtgttagtagtattgttcgcttataaatatttgcaagaagcgtgctctgggtccaggatttaaataagatgagggactggattgaaaatgtctatgtgtgtcagcctcccaagtagctgggactacaggtgcgtgccaccacacctggctaatttttgtatttttttttttttttttttttttagtagagacagagtttcactgtgttggccaggctggtcttgaactccagacctcaggtgattcacctgccttggcctcctgaagtgctgggattacaggcgtgagccacagcacccagcctagaatccctgattcaaggatccaatgccatcatcttaaagctggtgggatattcaatcaataagagatattattaatgtcgcttaaaggatgactcagtgagcccattcctagctaagtttgccttttgtggaaaaaagtaaaaagaagcttcacacacagaatatgcagtctctgagcctagtccaccgtagaaaactgcacattctaaccagcccacccttgtcttcaaaattcactttagctgctcctcctgagtgtctaagccccgcttttgtaaacagcctgaatccaaggatccagactggcagtcacacagatctggcagctcctttaaactgcttccagaacttaggtggaactgccttgaacctacaaaacccacaaaaagaaagacttggagtgcggcaatagattaacttctatctctggctttaccatgctgactggctggcatatcatccctgaagtggtttctcatccatacatttgggattattgtctcattgtaagggtaattgggcagaatgtctaagtccttagaaaaaataggaagtgctgtgtaacacacatgatcataatcattgagaaattagcatctttcaaggaagatttagattcaaagtattatgtatgtgcaggtgtcttgaagccttgccatgcctctgtttcacttactatctcatttaatttctgcacatgttctgagtgtgttattattcccatttttatgcacaaggaagtcaagtcttccagaggttaaataaattctctatggttgcttagctagcaaagagcattggctgagttatacattatttccttcgttcttttggatcctctatttccttatcctgtatacacaggatatgtatataattctgatatgttataatttttatattttttggcctctaactatttagtaaagtcaatcttatttgaaagaaattatcttattttggctaaataagtctgaatctaaactagaacctaactctcagtacctgagctatgcagggtcagatttttcaaaatctaggatcattaaaaggatgtattctaccattgtttacttacgaatatggtattataacctgcatttgggggctgagtggatccctttgaatctagtgtgatccattgatctgagcttggttgagacctccagctttgttgagtgacttgagctcttttaacatcatcttaaaatttgtttccactagaagatattagtgcagccaggaggcctcagtggagccatttgcaaaaggaaataagggccaaattatttttcaactcacatctttggagttgaaatgtctgctctattaaaaaatacattgcttgggggcagtaaaggacaatgaggtgtcagaaagagtgctagaatttaggcaggattaagaaagaggaaaacaaaataagttataaaaggcatgtgttcctggggcttccctcagaactttgctcctggcagatgcagctctaggtaagagaactggggagaatcacaatgggcctatttatcctctaggctcacactgctaaacggcttggctctcaactccttgtatttttggaagactccaagggtttttcctaatcctggggctagaggctcagactgagacagccgttccactgagattctgctaaatggatgctgtttgcgtaaactgtcagaaagccctgctctgagggagcaatactataatgatgtctttgtgagttttcgctgcattttccctccaaagaatctcaagcacctactagacccggggctgagatattcagtttgtctctaagaagctagataatagtctgtcctgctttactgggaagaggagaggcaaaaagaaggcaagcaattctgacttaataagtcagaagtctgatgtcactgtagaaaagtcataacctcttgtataaagctttcatctgtggggtttccataactggggcgaggccacagatggacatgtatctgtgagtgcacactcatgtattgtagatcagaaatcaaaaggatatccaaactaatatatccctaaggcatgcacccacacaaactggggagaacacagagttctaccaggtgactcaaagtctatatacaccaggataaaaagaaggaaaactatagaactgtcgatgaatggagtcaaactctgtaatatatatacatgtatatatttttttctttcctttctttcttttttttttttttctttgagacagaatctcaccctgtcaccaggctggagtgcagtggtgcgatcttggctcactgcaacctctgcctctcaggttcaagcaattctcctgcctcagcctcctgagtagttgggactacaggtgtgcgccaccacgcccagctaatttttgtatttttagtagagacagggtttcaccatattggccgggatgatctctatgtcttgacctcatgatttgcgtgcctcggcctcccaaagtgctgggattacaggcgtgagccactgcacctggcctgtaaaatattttaagagatttattctgagccaaatatgagtgaccatggccatggccagacacagccctcatgaggtcctgagaacatgtgcccaatgtggtcggggtacctcttggttttatatacttttagggaggcatgagacatcaatcaaatacatttaggaaatatatttgtttggttcagaaaggcaggacaagtcaacgtggggaggtgagggtgggttccaggctataggtatatttaaacattttctggttgacaattggttgaatttatctgaagatctggatcaatgggaaggaatgttcaggttaagataaaggattgtgcacatgtaccctaaaacttaaagtataataaaaataaataaataaataaataaaataaaataaaatgaaaaaaaaaagataaaggattgtggagaccaagttgtattgtgcagaggaatctctcagaaagcagacttcagagagcgagcaggttgtaaaatgtttcttatcagacctaaaagggtgcctggctcttagctgattatctcccagatctggaaagagaggaaggaaaacaaagggggaaggagattctccatataatgtggatttttcccacgagagactttgcagggcaatttcaaggtatggcaaggaaatatattttggggtaaaacattttgatttttttccttgttatgccaaagtcagattggaaaataagtcatgatatgcaaggttaaataaaacccatgtgatgagaatttgtggtttctagggcatactccccagaccccttagataggaatttgggcaagataaaaaattccgagcttcatcctcagaaccaaaatgtaaacttcattcagagactcaatctgtatatttctgatttgtttgcctttgtgtatgtatgctatagtacagtagtacatttacattaaaaacaataaccagacactgtgggacttcagttctgtttcatttactattcttagtgacttggacaagtcattgcttttctggccaaggtttctatgtctacaagtaggctgggtaacttccaaccctgtgtgtttattagctacagctttagtgttgaatctttcctttcaagccctgggttctgagaaacttggatttgaggagctggacaaggtacagttacagggtagggctgctccccacccccacaaagatataccaggaatccagatgatatctggagagaaagtaggatgaaccaccaaagagatatgcctaataaatgatcaggtggctgagaagagagccaaagaactggttcaaaatacagtgtccagtatccacaactcagaatagtcttagacagtgaggagagagtagagcaggggaggaggaggaaaggtaggaactaggggagagtttctgaagaccaggctgctatttctaagattctggcagcctcttgcatatgtggggaaggaactattgagacataccaacagttggagaaggggggcagtgagaaaggttcattccaggaaggagggctatatcattctgattaactagtttaaaaccaaagcattctcttcactgcttggagacagaacacattagaggaagactttgggtctttcctcctccatttaggccatttatttctggaaatgtccaagggaagtttcaccaaccccataccatcagggaatgatcagggcaggaccgacaggcccaggtctgtatctatgactgtacacacgatgcacatgcattgtcacacacacatgtccatctaaaccacctccccacagtgtatggatgtgtgtatgtatattacatgtagctaacccattatgtgcagccatgcaagtgaattcccaaaccctctggaccaagagtgccgatgattttaaagactgttatggtggctgctgggactgctagtgggatcatgttcaaggtgactgctagccatagctgatgccgtcctcagacagccaagcaaggtggaacaggccaaggccactggggcgtgtgggaaaccagacttcccagggaatgacgaaggcatagatttagtttttcatgttttcttaatgcacataaccacttttctatgtgaatagacatggaatcaagaaagattaaattttaataaataaaaaaatggcacttaccataaatgacaccctttatgacaatctcctgatagaccatttatcattaacatatgttgccaaggttttaccactcttcagagttgtctcctccaaagtagatgagttgctttctcatgtacttcatgactcagcccatgcagattagggaatacagaggaagcttgaatccctccattggttccagaaatattatgccctgtgaatccacgcttgctcatctttgctgggtctcggtttctttatctggaatatgggttacttcgtgtcctgtatgcctcatcggagttgtgtgagtatagatgttttgaacctctcagtgagaagcaggcttctctgtgatttttggaatccaccagctggctccttctgtaattagatgcggaagcctgagaaccttgtagaacttagctgagtttctatttaacccaaagcggtgggttccctctaactgaagaaaagttgcagtcactcaatggaaatgagcaagacaattctcttttcaggaaaggctggcttagaagaggagggacagctgtggttgggtgagttgggaggtaggagattccccagagtggaacactgccatgcggggcattctgccccaagtagaacctggagcctgagaatttgtagccactagacttggaacaccttctgcaccacttatttctggccctgaggagtggggcaaagtgtgagccctaaggacttgaatgaaaaagatggggtttgggggtttcagctaggcatcccagggctggaggtggaactgctgctcttgctcccctcctgtcccattctcccagtatatagagctgatggcttgaggaggggtacgatacagccttggggaaagacaagaggagcaggactctgaactttgcaccattaaatgctcagtctctgtacctgtggtcttgaaatgtttatgctcctataagaatgttgaaaaaatatatatgtccgttgcacatcttaagttgccatcaaaaatcttcaaagtaattttgaatagttgcattcaatgtcatttccagaatattgtaaatattgacattaaaaatacatcattcctttaacacatctgatgaactttaagtaccagagcaatttggtacatcatctattaaacacatgaacaagttcttaaacagtcagttttacatggctcctgttccttgaatttatattttcattgcagttaccccactgaattttatctttatatatttttatgcatgaaatccttttattggccactctatcataatttactgtgacaaaaatatgtatgaagatttaaatttaacttttaatggccaatgatcatacatttctagatgttaagtgtttttggtttgagttatcattatgattactagtaatacacagaaattggaaattaaggtataattattagtgatgcacaaaaaagtcgtcgacaaaataatatacatatcaatttttgaggaatataaaagataaaatgtaaaatattaatggaaatgcatctcatattttcaattagttcatgtattcattaatgaatattgttttaaactaagaaagataaattgatggaaaagaaagacattttgttattgaaatgtaactcaattctttgaactattatctagttatactcctaaaatcacatattggactcttatcaaaaattactttcaatcttctctcagctgataattcttttaagtttgtccctctccagtcgtttgaaaataattgaaaactatccaacttgcaaacagatatttccccaatcattagagattcattttcaacacctgtaccagtattttatacagttccttccattgtactctgtagggtttcactcctgagatttagaatgggtgagaagtttgtccttccttttggagagtggtgtgtgcgtgcgtgtgtgtgtgtgtgtgtgtgtgtgtgtgtgtgtgtgttggggatgggggcaactggacaagggattgatggctcacaggggctctgcatttaattttagaaaaaatccatgtgagagttgtgcatctgcaaagtccctcaaaactatccttgcctgagtacacgctggatagacttcatgttctgcatattctggtttgaaacctcttgcatggacactgtactgtatctctgcctattacatggcacggaaattctagacctcatcccatgggacagtggctgttgctcttcagggtgtgtatggataacatgaggtatatataaaaagtgcacttccccatggacaataacaaaagactggaaacaatcaaagtgcctattaataggaggttagtgggagaaactgtggcatctttaagcacagtggaatcctctacagctataaaaagaatgagtgaacttcagtgaaaaaacccaagaacagaacagatatggtatgttacattttatctaagatagggatgaagtgaatgtaaatccatatttgcttatgtaagaaacaatggaaagataaactaaaaccaaacagaaatggttatctgtaggaggaagagaacagggtgaggagactgagcagagatgggacaaaattttgcttgaatgtaccttgttttgtggttttgactttgaaacagtgtctcagtttttacatcattataaagcaacattaaatcaaatgcaaaataaaaaacaaagcaagtcctaaaaattaaaagcaaacatgaaacaaataagcctaattgtgtattacactggtggcttcaccacacagaaaggagctactacaaatgactttaaaacatagctatgttttctacatgcccctagtaggtagattctaaggacagaaagagctgcaaagattgtaggttgaaggttgttttcagtaatcatattattagtaataatatttgaactgttattttgaaactctctctaatatactgtatattatttaaacaaattaggataaagcagataatattatgagtgttaataggaatcaagattttctgcatgagaaagaacacaaacataaaattaaagaagtaaaagctctgtaaatttgatatgagaaaaatcaataagaagtcatgatattttttctcttaagaaatttttttcctagctatttttataacaaagacctagaaataataaccaccccagtagagatgagcactccaacgatccatgttgtggtctttaaattccattgccctccaaaaggatccaggaatccctggagatatggctgattcaaaggctggagtgggaaatatacaagatgagcctagagtattattttatgtcagaaagcaaggatgctatgaagactatttattggcgttatgtgagaagacacaggcataggatttcatttcccaaagatgaaacaccaggcatcagaaataataactactaactacaatagaatgaaacacttcaagtgtgtgtgtgtgtgtgtgtgtgtgtgtgtgtgtgtgtaaagaacaagcattggtaatgctttccaaaaccaaaacaaacctctcattggtcacctctggaggatgctatgggatgaattcattattctaataactagcaaataaagagaatgaatttatcttaccggtcctgtataaacagtttccagtgtagccaaatagctgatgaaaggaactttttatttataaaagatttccagctaatatatgcagaaggaatactataattacaatgtctcccttttgcagccactaaagaaataatggacctgggcagtgatcatcagtgactgctaaaattgctaggtgaaagggaactttataatatcagattgaatccactgatcagtcttaacatcacaaagaagtttgcctggtgttgtgttacagaaggaagcaaacagcaccatttatgaacctagatctaatcagggctctggatacctggtcaggtatcatcaagtgttcctgattataggaaatgcggcaggtagaggaacaggtgaaataacccatggggatacagtgaaataaacagactttgagaaatttttgggacaagtgacccgggatcatcaacaataaataaataaataaataaataaataaataaataaataaatggaaagttggggcagaaggtaggggaatcctatagattaagaccataggagacattactaaatgtgatgtgtggatcttttctggatccaactttcaaaaatcacttgaaaacatttgggaacttttgacactgaatggtatttggtgttaaggcattattagtattttgataacactacaacaaaaccatatgtctctggttctcctaccctttgagtctaagtcaggggccacccaactctgtaaaagatcacatagtaaatattttaggctttgcaggtggcccctgttgcaactttaaggtgatctcttctgtaactattcaactcagcccatgcattatgaaagcaatcatagacaatatggaaactaatgagccagtcatggtgccatgtgcctgtaatcccagcaactcaggaggcagaaggaggagaattgcttgaacccgggaggtggaggttgcagtgagctgagatcctgccactgcactccagcctgggcaacaagagtgagacttcgtctcaaaaaaaaaaaaaaaaaaaaaaaaaggaactaataaactaacgagcatggttttatgccagtaaaactctgtttccagtaacaaatgacaagctataatttgttgacctctggtctaattcattgggtttgctgtcaagcctaggaatctatatttttaacaagcatgccaggtgcttatgatcaggcaaacagccctgggaggtgaatatagttatcccttccattttcacaccagaaaacaggcttaagtaggaaaaatgacttgcccagggatccacagctagaaggtagcagagctgtgtttataggggaaaatcctggctgccatgtcccctctctgccacattcaccccactggaggatgctaaggagaaacagggggagaaggctgggaagagcacaggaggagagagaagaaagtttttctgtgcattgtatccctaactcatcagtcttctttaggatgaggcagagccaaagggagtgagatagagcctgcacacgtgcagaaagcccagcggataaaaggaggatgttctggagcataatgtcaacttcctcaccaggtctgcaatccagagttgccagactttgcaaataaaaatacaggacaccttgctaaatttgaattttagacaaaaaaaaaagccaacatatttttagtatgagtatgttctatgcaatatctgggacataagtataattttttaaaatgttgttcaactgaaagtcaaatttaactgggcatcctgtgtttaatctggcagccctgctaacgtgtgaagcaaattagtaaaagcatttaacaaaatattggtgggaaaggggtcaaggtcaccccctgccaagggactatgggaatcatcaggaagctgcttacagggaaggttcagagttcacagagactgagcttctctggcttggccagatttgggaataggcacttgatgctctcctgtaagttcttggtttgtagttgaccttgacatggatatcctaaagcctgagttgatcaggtacctcttgtctctctacacaaaatctggaatcattcagaacccatctggtctctgggtataaaaggaattttatggagatagtgacattctcgttctgctccagcttgatccgtagtgtaccaggagtggtcatttttctgagaaacggtcttaataatgcaaccaggattgcattctttaattagtgctcattccccatgagcactttcagcctcccaaatttttcaaactctcatcctctttgtgagcatgtgtgataggtcagggaaaggcaatgatcggtggaaggtaccaaggtagccgtgggctcttccccagtgcaatccaaagatctgtttccctccaagtacttatttttatttctagaatcattccttggaatatttcctgtgccttattacttacatctcttttttcagggttcagccttaaaatccttaattatctcattgagagcttgggtcagtagctaatatttcttatgcagtgcttgggcaaggtaccctatcttcatctgtgacttggggatgatagaggcttctatcacacaggaatggagagagcttaaataagggatgtatgtaacatgctgtggccagcactcattattaattaattagcactattcttattgttcatattactgtttctggctagtttatgtctggctaagttttaccatgggacgtatttgtcaataattttttaccggggaaggctttgaccactacctttcccagacagggtctctccagagaatggtattggtcaccttggaggaagatcagcatggatttttatgggaaataaggaaatttgaggaaattaggtttgttatgctgcacagtagcatataaagacacacacaatgaacagttactgtactttgtgtatatacttttgcacttaacgatgctcaatgggtttttacatacataatctcattttaggcaggctgttgcttcactcttattttgaagataaggaaactgaagtgcacagggtgttaagtgcttgtcaaaagtgacatttagaacccagggcttctgacttccaacatcatgctctttgttgtatcacaggcttcttgaaatattttattaatagtccattcctggaagaatgcagtataaacttcatccacattggttgtgctgcttggttagaattttgaagattcttctcaggggagtctccatgaccaattaatatccttctgacacttttttgctcaaatacttaagtgcattacagtttacacccaggacacttgaatttctgtctgtaaaattgaggctttcaaactggaatacctcttctgggttgtgtttaaaattatgaaatgagatacacaccagcatcaatttttaggactctgttattgaaaaattttcatcaagagaaatgttcctatattcctgacttctattttttttacatcaacaaaccaagtgcaataaaccagtctatgatattctatcacaaacataatttttcttttaaaaatattaattttttgataaatagaacttaaattaggtccactggtttccttatattcgcacttttttttttactatttttaaattttcaagtgtgatacatgattatcacaaaatttcaaacagcatagaaatatatatatatatgtgtgtgtgtgtgtttatgtgtgtgtgtgtatgtgtgtgtgtgtatatatgtatatatatatatatatatatatagcaaaaagtgggatttttctctttggtcattactcacatactatagaggaagccactggtttgttggttttccgaacatttttctatgcattttcaaggttacatggtatcactatatatttgcatctgtatccacatatacatttttacatgaataagaatactacaatatatttttcaatgccttgtgttgtcacttaatatatcttagatatatttacatatcagtacacatagctctactatattctttttaactgctgcctataactttaatggtgaacaaatttttgcctttagaatgaatgaaataaacacctttaactcagtatttttgcttacctgagtgaattatctttctaagactcctagaggtgaaattgctgggttcaaagtcacttgcacctttaatgttgacagattctaccaagctgccctcagaaaaagcagaaacatttctcaccagtggcatttgagaataactctttcctcacccctctcaaacacaagatagcaacaatttttttcagtctttcccaattgacattcagaaatgtgtttctgttgttttaattggcatcttttcatatgtttgtggccatttctagtccttttgtggatcatctgttcttaccctgtattcatttttctgctgggttgcttttcctaactaatttgaaggagcactttgtattatatggattttaattctttgtctgttacatatattgtacttttttggccatttgtcttttagctatgcttatgttgtcttttgccatgcaaaagaatttaatttttgtaagttgtatctctaaatcttattcttgatggcttcttgaacatgtgtcttatttaggaaggccttccttttctgaggataaagaatacttttctaagttttcttctaatattattattgttttgttttttatgtttagctctttaatccatctggaaatgatttttgtatatggtgtgaggtaggtatctaagcgtattttttttaatgaatagttcattgtcccaacactttaattactaagccattgtttcatatattaaattccaatatttatacatgggtctgcctctggactctctagtttgttccattaataaatttgtctaccctatgccaaaatgcaatgtgttcattacatagtttgataaaatgctttgctatctgatagagtaactctcccttattgttctatttcaagtatatcttagtttttatcaaataattactactttagatcaattttgggttcatcttgtcaatttccatacaccatttcatttgggttttcatatatattgtgttaacttttcagattaatctaaagaagaaatgaaatatgtataacattgagtcttcctattcaaggaaatgacacaacttttcatttgttcagatcctcttttatgtttttcaatgcatttatttaaataaccttggacattttctgctaaggtttatgctgaggtgttttaaacacttctgttgttattgtacaaataatcttattttccattgtattttgaagtcattgccaccggcatgtgagaatagtttgatttttgtgtgtttctcttatttctgggtaggctgctaaatcatataatggttctaactgctttttcgttaattgtcttgaatagtcatatcatatccatacaacaggcagtttgacgttttgttttcaatatttctacctcatttaaaaaattcttgctttattgcattggttaggacctcttgaaaaatgtcacataaaattcgtgatagaagatactttgtattttcctaacgttttgtcagtaaatatgatatttagtatatttaataaaggaagttaccttctatgaattagacttttaatcagaaaaagatgttggaaatttttggcatttttgaaaatatggtttttcttcttttatcttttaatttagtaaatttaacagtaggttccccaaggttgagacattcttacatttctagggtaaaccttattgagctatatataatatggaattcttgtaatatagtgctgatttgataaatattttatttgtatttggagagtatattcataacatagttttacacacatatagataactatgtatgttgatatttattatgtaaatatacatgtaaggctgtatgttaaatttgactgattttgtcttcagggacgtttaaaccacatagaatggtttgggaaagtttctatctttttttgctttgaaaaagtataaataagacagaaaactttaatagaactcaaccagaaaactatctgaaccttctagttttttaatgtatagattttttttacaattatggtttttgtattcaacttttctatttaacttttaaaaaattaatatttttagtaaaccaataatgcatgtatactttcaaatttatggatgtaatagtcttaacattttacatttgtctcctctacatcccttattaatcttgccaaaagtttatgtaacttttgagagaactaacaattgattgtgtagatcaattctgatttttattttccttttggctggctgttttgctttgtttgttttacactgattaatcagtatttattttattttattgtttatttcttcttacttttcttgcatttgtttagtggatctttactgccttttttttttttcttgctgaatccttattaatttaattatattttcactattttaaaaataaatgcttaaatgctgtaatttttttttcaaaaattacttcagttatatttcatagatttcaagaaataggactttagttattgttacaataaatacttttacattttattttcaattttttctttaccaaataatttaattgcccaaagacaacttttaaaaaattattctttcttgttaacttttattttattatatttgatacagaaaatgtttcttatttttacttcatatttattttttatcttggaattccagttttcctttgagatttaatatgtgattggttttgatactttttttaggtaattgaaaataatgtgcaattttttaaggaagctgaaagatgcacacaatcacaacactcatatctacttattgaaacccattatttgtatttttaaagtgtatcttcatttatgttgtcttcttgatctttcaatttgtgaagcattttagttttccattataatgatagctttgtcagttttcttttatttataacttgtttttactctttatatatatatatacacacacatatacatatatatgtattatttctatatatttttataaatttttatatattgttgctatattaattggagcataaacttcatcatcgtaatggtgaattttaccagctttaaatataatattaattatgatataaatttaatataaattatttagtcttactttagtttttgacattttgaatcctttttttcacatatatatgaaacaacagacaacgtgtaaatcacaataaaagaaatgtaattggctatatatatctgtatatgcatatatatatatacatgtatatgcacatatatgcatatatgtagccaattatatttttcttttatgtatagttgtatttttagcactcttccattttcaatgttttctgccattttgttttagacatgtctattttaaataacatgcaacttgatttttctaacctaaatttctctctcatttaagaggtgatataactcatttgtacttattgtctctagtggtgttttctaagcttcattttcattttgtgctttttagtcatcattatcctactccgcctttctgtagtctttttggtattagttaaagattttggctttatttaaaaaacggtttgaaagctatatgtactatttctattctagaagctactttaaaattttagtaagcatatttaaatttaaagtgttaatctcaacaattaatcactgtaagcttcttttttcctttctataacatacagcctttatcaggcttttaattatttctatatctactcttctatgcatttatggttgaaattattggaaagtttcattccagataagtatgttagttgtatcagtggtagtactaatagcattattagtattattatttactttatgtctctattttacaggaagcctttattagtaattgtattacttttactaccaaattaacaaccattattcaaatttaaattgcatttttgtggcttatttgctctgcattttttgttatgttccaataattgcatagcttgggttatttttactgtttttctagaatatgtattcaattagcttggctcctatattttctgaaaggatgtgagtggtaagctttctgagtctttgcttgtctgaaagaagtatcttcagttttctttacactggatacaaaactatcctgattagaaagtcccaggttgaaaataacttttctggctaggcaaagtggctcacgcctgtaatcccagcactttgggaggccaaggtgggtgtataacttgtggtcaggagtttgagaccagcctgaccaatgcggtgaaaccccgtctctactgaaaatacaaaaattagccaggcatggtgtttcatgcctataatcccagctactcaggaggctaaggcaggggaatcgcttgaacccaggaagcggaggttgcagtgagcggagatcgcgccactgcactccagcctgggcagcaggagtgaaactctgtctcagaaaaaagaaagaaaagaaaagaactgctctgcaaacttgtattataatttacctcctaaaattcttcaagtggttaaggcaaacatgatttccctttttggaaacaagattgcccatctcccaacttattcgttcttaattattcattgttattatttctctaactgaccccccatagaaataagaactttaggccgggcgcggtggctcaagcctgtaatcccagcactttgggaggccgaggcaggcggatcacgaggtcagaagatcgagaccatcctgactaacacagtgaaaccccgtctctactaaaaatacaaaaaattagccgggtgtggcagcgggcacctgtagtcccagctactcgggaggctgaggcaggagaatggcgtgaacccgggaggtggagctggcagtaagccgagatcgcgccactgcactccagcttgggtgacaaagcgagactccgtctcaaaataaataaataaataaataaataaataaataagaaagaaggaaatgagaactttaagtaatacctcatccggacataaatagacaactcttttttcaatattaagtagtttttttaacaatgagttccatgtattaggcaaaagtttcagttcctgaaaatctatttactaatgatgcagttagttcctgagttttcacacatgctgtgaattttctcccacttatgctaacatctctagcctgctgggcaaagaggagttccctaatgtttttctcagtaaagggtaccctgggtgtttatccttgtcagtcacttccttttccccttggctttcagtttggcagattcacaggtggttgatatcctccttaggctatttttaaagactctccctactgtcctttgagatcttactaagaactgtggtgaattctctttctgtccatctcctaccttattagcacgtggtcttccacgcttttggaatgtctctgtctccttcacttgaaacactgagtcctaaattgtggtgagagattcgagattgtcagttagaagctaaagttctgcagatcagatgcacatggaatatactgtgccactgcagccaagaatctaacctgatgtttgcagatactgatccttggtgactggcttagtcattctgctgacttcttgctggacttgctcttaaggttagatttttctgtagtgctagattctgaaaccttctctctcacttcagattaccttgatctttctacacactgagtgccaaggaacctaccttccctcaggtgttacctctagttgctagtctagctgtctcctttatcgtaggtctccaaagtcagcatcttcacacacctctgatagaagttgcataaagctgtgactatcttagaataggatgcatcaagagtgcatctatgtgtgaagagtgcagacagataacactcattctggccatctggtcactctgtgtgcctctatctcaaccccttttaggtgggaggacacaccatgctccccattcgctggatgcctcctgaaagcatcatgtaccggaagttcactacagagagtgatgtatggagcttcggggtgatcctctgggagatcttcacctatggaaagcagccatggttccaactctcaaacacggaggtaaaaagggggtgcgtaggaatcttgattgggggagggctcataagagctatctcagcccagaacttggacctactgaacaagacattaggtgggatttagagccagcagagtgaatgcaggcattagtgggagcagagagcttcttagtaggaaaaaaaaaatggaactgtaggaaatgtggtgtaattgtcaaaagagcatgaaatcagaggtctaaattgagactcaagtcatgcctctgttaaatctgctacccttaaaaatcacaaatgtttcactatgacaaaaaaggaaaacagaacagctatgagtttttcaattgtgccatcttgtggaaacacccactacttagtatgcccacataatctgggtgcacaaaggttttaggtatgccaagcccagggatgtaccagatggtcaatttgggaagaccagttttataactggtagagtcatgtgtgaacgtctaggaataaaataaaccgtgtttattttattactatgtttttactatgtttattagtatgtttactgttaaacttagtaataaatagccattatattttttataattgtaatttgcaataataaaaaatgctagtaaacataaattaatagtagctgacatttagtggtaggcacttttctaagcatgttagctctattaattcagtaatttttgcaaaaacacctgttgagattcaggttaaaggaagggggtctgcttgaggtactgaaatgggctggccagggtctcacaggtaagagcctccaaagcagggacaaagcctgggctgtaatcctaggactcctctgcctccaaagcccatcaagatgcttctcagtgatgcatggaccatgccatgttgccccagggaattcagtgcagtttgtaggcagtaaggagctcagtctttcaacccagtcgacctatgaaacatccctatgaaacatcgcaattctttttatggtcttctgtttgctgggaaaatgtaaacacaagacccttttggtattgaaatcttatttgaatattcaacagagtgtctttcttcttggaagctatgtttgtctctgctctcctatgtcttgaccacttgattaagtgaattacaaagactgaaaagaaattattttttaaaacgtgtactatctcatgattcacaagctcagtggggcctgaccacatttcccaaagtagaacaaaatattttaacaatcttttaaaataatgaaagtatatatactagaacccatttgttatggtgtttaagaaattgttactgttttcgcaggggaggaagggttaggaacacacacacacacacacacacacacacacacacacacaccatgcatgcacctgaacactgcctccttgtagtttggtggccccagtaaacagaggttctgggctgaggttgctattggtcttaacagaagactcagcatctgttcttgagctggctcatagcagctaacagggtgtttgcagtttcttctaagactcacagaggcattggccttaaaggcaggctttctgccctcagccacttcccccactccacccaccatagcagccacatactgacagtctctgatcatcggtttctccatggaaatcaacaaacctggatagtccaacattagaagagacactcccaggtgcctttgatcttggcattagcagctgctactgtagttcgaactgaatcccttttcctggaggtgaaggtaatggagggtggaaatgggtctctaatatgaatggggaatataagcagctggagacttatcaggctggtaaagaaatgagccaaggggccatcgtaaactccagggtgaatataaccaggcggatgctgacacagtgatggtttgaccagccctcccaaagtcagcgtgacatgagacaatactggaaacaaggcactgttgagcagtgtagggacatgcaaaggagaaaaaagacagtgcttttacctaattagatacagactaatggtggcagagaagggaaataatatttgttcagctgctgagctagagattattctttgtatttttatcattatgaccaatctttaaatgcagaaactgaagttcggggtcagtgacttgaccaaagttatgcagtggtagagttagggagaagtgaaaaccaacctaaaaactagacaatgaagccttgaaaatgcatatattcagtgtcagtaaagaattatctttgaggaattggaaatgcattgcaaattatacacttgggtctcaagtggcctgctggggttggccaggcatgcattacttgttttcttcctactcctccttatggcttctccttcagtatgttgggccatacagtcccttttcgtggtctcatttcatccttacaacactcctgggggtggttaaggcagacatttgattccatcttacagatggacatgctgagatcctgaggttaacagacttgaactggccacccagaaggcagtggtgaatcaagcagttagtcctattgttaaggactttaagagaaactggaagcatggtttagtgcaagcagcagggaaggatgggtcttgctgcaaaagggtcctatgtaatgactcagaggcaagtgtggtgacgtgcacagagtctgcaactgggagcctgccaggaatgagagataagaggagataggcatgcaggggccagagggtgcagagctccttcatggcagtttcaaagtgaggcaggctcatgaaagggggagggacaggtcagaagcccatgtccactatcaagtgaaaaatgaatgcagctcagtcatcctgatgagattcaggactagagaagaaaagtgaggtaaaagagaagagagtatggggagtcaatggtcaatgtgggcctggcccaagaagtggagtatgaagggcagcagaggactccaccagccactgctgctcactgcactgtgcaccagacagacaaatataccagtgctgtatacagcctagcctttagcttgtgcttgtgagagcctcggctctgcatagaaactaatccgggaagttgttgctttttgccgagtctgagccacaggaccaaggctgagctttgggtgtaacttccttgttcttctcactctttcaggtcattgagtgcattacccaaggtcgtgttttggagcggccccgagtctgccccaaagaggtgtacgatgtcatgctggggtgctggcagagggaaccacagcagcggttgaacatcaaggagatctacaaaatcctccatgctttggggaaggccaccccaatctacctggacattcttggctagtggtggctggtggtcatgaattcatactctgttgcctcctctctccctgcctcacatctcccttccacctcacaactccttccatccttgactgaagcgaacatcttcatataaactcaagtgcctgctacacatacaacactgaaaaaaggaaaaaaaaagaaagaaaaaaaaaccctgtaaggcagtttggcaaatatatatatatatatatatatttatatatctaactatctatcaatctatatctacagagagttaccttctctagtacacagagaagctgctgatacagaaaaccacaagactttaacaactcagaaactctaaaatattaataatacaaaggaaaattccctttgacttaagctgtggcccatgcttctaatgctacggctctttggagcagaagacctggaccatgcagagagacaatctttgggatgagagctctgggacgggaggagttaaggtggtgctcagtcgctgctgtgtgtgtctgttaccccggaagctcaccacaggcacatgtggggactgcatggctgtgctcagcaaagaaatgatgcctgagcagggtccttgcctccacttcttccccatttcctccacttcaggacaatgttctaatttgtccattctaaaaagtgtaatcttgatgcttttgggaatcaatgatggcacctacgggtaaacacagaacagacaaccccacaacacaaaaccatgacaagagctgacagcatccatcctgggtgtaagcttcttgctggagttgcaaaggatgtgtctttctattctcagaacttaaagaactggactttctggagtaaaagaaccacagaagaaaaaatagctgaaacctgaaccctgccaagacactgccacctgtcttttccatcattgcaaagattccttggcctcacctcccactttcaggcccctgggaagcttagggggttaggaaacaggtccccatgttatctttgaatgtagacacagcacgctttagggttgcaatagcaagagacttggttgcttgtaggtcattataacgaatgccccctggtcctctcagtttctcatcctgcttccctagatcctagaccccacttcctgggtctctactgagtcccaggtaaaccccactgccaaggaagggagccaggtctagtgagaggctgcagcagtgagtgtttcaggaaagcaagcagtggagtgggtgagagccagcaggggagaatctacttggcacctgtgccaggccccttggcattctcctcacgtttccagcccctgggaggattgatgcatctgcctttgagctgttgtgaaaacgcaggggctgagaaatcacttttgtgggctggggtagggggaagggctgaggcttctctgggagatgtccaatgagcggccagtgctgcaggcttggaatcttaatgaggcctgagccctgaccggagagagggaaggaaacatctgtgctggggcctgctccctctgccccagcactggggaatcactgccttcctggctgctgccacataccacagtggggccgacctctgggcctccctgtcacatgaaacatggaagccaacagcctggccccacagatctcctctgctggagaggagaggatgtgttcctcccaggccacggggcccctctgccttgccccaagcacagagctacctaagggactgacctttgccacactggagctcacctcccgggggcctctggcctacccttttccctgccagctgaagagactgccggcagcctggacgtcctggttagctgaaggcagctgaaatgtgggcctccctatgtggggtttagtactgaattatgtgtttgtggttttgcttctttttgtagacccacaaatatttttatttgaatagtaaagagctgtgctcagattgtagccatggttgggatttgggatcaacgaggctggttagctggactgggaggggaggcaggtgagatgggaatttggtgttggttttctcactgtgctgtgctcctagcccctgaggactttgcaggaaagctgtttggattgaccacctcaaggaactcctttgctgtcctatgacaattactcctcttgtctttccacctagaggaccgttatgccggggctgtgagttctggctgaagctgcacaatctggctttgatctgggtagctaagaacaggtgttcagggagggcatggtctggaggcgcctgagggaaaagtatcttctggttagaagtgaagcaccaatgctcctgttgcttcccttctcccatatcctctcctgaacaaacactgtgtggcttctgtcttcttggctgtgtgtttcaaaactgatagtcactgatgggctgggaagaagcaggagaagaactgggttggagatgggtggaaaactgggaataaggaccatgctatggttttatcttcagggcactgattcatcatggcctaatgaaagaaggtgattccttgggggaacaagaagcactgaaggagaccgcagttgtcagattgctgccaccttaggcccacgggctttcacgctgatcttggggtcatgttcttactgtgtccattgtaagcagctggctgtggaagagtgccagagagagaggggcagagaagggaagggaagcgagggaagacctgccatccttcagccctggctgtcctgtctatacagagtctactttgatatattagccttggcagattaaaaaaaaaaagatttattttggagagtaaaggaggcagaaaatagggccatggaaattgcagggtacactatggctctggggagtgtggcatgtactgggacacacctgtccctcctatattgggacaggactgataaggcttagtacactgtatcttaatttccccatctgcagaataaggggtacacctgctaatctctggccccttctagctctgagttcttagattctgacaacgttgtgtcactgtgccatttttctcaataccattctggaatggcaggacagccttgcataggtggggggcagttgccgctgaaggctcactgggcctgggcaaggctgagttccaataagacactcctctccttctttgccccttgtctcaacatttcggagtctgaagtgtctgagacgactgtaagccaggaggggagcatttggtcggcttcccatcctggcattcctacataccagaaaagcactgtcgacggtccatttatttatttatttatgaagagcctaatgtgatgaaatgtgttgtgaaatgacatcctattagccaatatggccactccagttcatttcaccctcattttcccataccaaagtccaccttttagaagaccatgtcacatcgcctctgagagcttagctttgaagtgagctcttttgtgtcttttgatgaacgctccagggcacccaggctggtctctctgccatgccaacctcaccggatcctctcctggactgagtgagagtgacctgctgttgggtgtccaccttggagtagggtgttgtggccatgggacctcccaattcttctttctttggatgtgaacctaactctgccctctaatgatatccctgaactctgaggggaccttgggcatcactgaacctcctctagtcaagaaacaagaaaaaggaggtgctgcttcctccattcagcagatcatgcacaaattactcctagacagaggcttcccacttgaggcaaaggatctttggtccttctgggttcaggttgaacattaatgttcttctctagtgatgcctactttgcggaatacactagtgcaagtcattttggtgctaaatactgcagaaaccaacaccaacgggagagctgtcagccagcttctggggctgcacgagactcaactcagaagtagaagtgagtcagccatgccgggagagtacagggtgcattggaagttaagtagaaaagtggcagggtgaaaagaccagcaaaatttctgattttgctattagttatccacgtggccttggccaaatcagcttatttctcatttgagacatttaagaggtttgtatagatatttttagagtccttttcatttttttaaagctaggttctggtcccacctgatatatatgtacttgcttgttaaaaataagagatgaagtgaaagataaggaaggagacgaagaaaagttaccaatggcaaaggattgattatagaagacaatgaaagaaggcctggtgactggtagatttgaggaatattgtacagggagccaggcagacaagccagagacttcatttttatgctcttcacaggaggtcactggcctagccacttgcctgcgtttcaccaggctgttcccctcagctagtcaaccttccctgttcaaaaccaacatgctaacacttggcagaaactattccaagatatggagagaggcctgcccatctctcatgcaggccactggaaatcaactctgggtcaaaaccgacaagatttttatcttttaatgcttattgtaagaggccgggatgtttgaaagagggcagcgtcttaagttgcagactattcaccaaagtccttttctattcaggaatgactaatgactttctttgttccccttttccaaaccaaacagcagcagtattaccttgactccaaagtacagtgattgcaatggacagtcttgagattaagggtctttttagtgctttgctcggaatctggagcaaggaaatgtctagggatgtttgttgaatgaacccacctgccagcagtccagagagctgtcccaaaggcccctgagatgtctattgtctgctttggtagggagccaacctgctagaagactcaagggcatttgccttagagagaaaaaaaaatggcacatttagttccgggcttgggtgctgaagtcactgtgtttttggctcctgaagctccactttcttttttcataccaaataaattgttttggccaatatttaaggatttaaatatttaaggttttgaaggaaaattccaagtttatgcatcattattaagacatcaatatgggcttgggaaaatgttttggtgttgcttaataatactgggagtgtcttctaaagaaagtatacatatatgtacgttgtgtgtttatttctatatattggattggaatggcttcaaagaaggcctgtttgaagtcagcaaattgatttcaatttgggattctcttttagccttaccgttcttggggataagaaatctggagatgaactggcctcagaaacattcaggaagattacgatgggaaatctgtcatcttgtaaagttggatcatttggtgctctctgaactaaattatgctgactaacattctgagcatctgaaaatcattcttcctggttgcctgatagatgaccacacaggagtcatttctatcacatcttatttgggggttggtatagacgccaccagcactgcagggaaaaccaccccctaggaggggtgagacagagagaatgtgagattttgatcattgattgctctttctgaaaggcactgctgaccatagtaggtgtggtgaatgtttgtgtcactgcattgggtattagaacttttgctctgagcatgggctgccctaccctgaagagctgaatcttggcttctgacagaagctctgcatgacacattctcctcaagcatattttccttattttcctatgaaagtatctatagtttgcaacaagaactgtctttggttcaagtgtcagtgtactagaatagatgcttttctgtgagacctgtggaggttggattggggtggggggtgttccttcaaagtacttggaattctttatcaaagaaataaaactcagattctcttctttctagtttacttctaagttccaaatttaaaacaagacccagtttgacatttgcagtaggagataatgtcttgaaccagtgagcttggctatctttctttcatcatagggaggcagggcagtaagttgtattaatttttcctaatcacccaggcaaatattgctttttgttcagtgtcgtgacccacattcatagcttgcaggggatacttctagctgacaaagctggaagtttctaatagaagatgtatcaagataacagaggtgaggaaaggcctgttgaacatctacttctgagaatcactgaggcactcaggtcttgcttttcagtttagtatcttacaaaaggagttggtttcttctcattttagcaatgataaatttagacatcttttttgaaaggccaaaggtagattgagagctcaaatacttacggtgtactctgacagtcttttattctatttttcaagacttattttatatatacatattttttatttccataggttattggggaacaggtagtgtttggttacatgagtaagttctttggtggtgatttgtgagattttggcacacccatcacccaggcagtatgcaccatatttgtagtcttttatccctcactcccttcccacactttccccctgagtccgcagagtccattgtgtcattcttataccttgacatcctcacagcttagctcccacatatcagtgagaaagtacgatgtttggttttctattcctgaattgcttcacttagaatagtggtctccaatctcacccaggccgcttcgaatgccattaattcattcctttttatggatgagtagtattccatcatacatatatatgtttgtgtgtgtgtgtgtgtgtgtgtgtgtgtgtgtgtgtaccacagtttctttatctgctcattgattgatgggcatttgggttgattccactttttgcaattgcaaattgtgctgctataaacatatgtgtgcaagtatctctatctcttatgtataatgacttcttttcctctgggcagatacccagtaatagggctgcgggattactgacattcttttacatgcaacatccctaaaacccaacaagacgtgtaaacactgaagtccaagtctgataattattctttcatttaagaagaacacatgggagtttcacatattatttttaaaaactaattttgtaatatgttaaatggtaggacacattcaattttttttcctcattggagatctgtccatgttctgtctcaatttaatagctacctggcatgtaactgatgcctctgagcctacctctggagtgaataaataaacgtggtccaggtgatttgatttctgccatttgtagtggagaagtaaatctcagtgaagaagattttttttcatatttcttcttttttctttttcttttggcttctatcctcctgcttccatgggactgacaatccagcttctcaaactccacgaaagtcttaatacagggtgaatcccagagccacaaacagtttggacttcaaacagtgagaaaattggaccgaatgattcggcacacaaagcagaaaactttcatttcctgtaggcaggatggaattgactgttatattaagacttctgaagaagccctgccctggagtaatttcagtgctgtcagacgatgttgacatctagattaacctctgtgcagtgaattttactgcaaagctcattgagatgcatgtgatgtgtctccacaaatcccatctggaacccgtggtggcccaccctcagcaaccctcctctccccactgactctgctttctctgtccataaacttttagcctccaggagcagaggagccgtggctgagatctgaccctaggagagggagtttgggccttctctgaccatgatgctgagccaggctttctgcttagagtgacagagattgtcattgtattgggtttcccctgagggaactgcaaattaaggcatgaaaaacactctgctgatgacagtttcacagcatatcttaatgctgcacaaagtgaaatggtttaaaaggaattagtgtgtcctaagtcattgagccctgctctgggctctgcaatcctctagggattcaagatcccattgcaacaaggtcatgactgcgtctaggccggacagatggattctgaaggacaaggtgtttgtcttttgtgcaggtctttcctatggtccttacaagagaggcagccacagctcctgtttctcccaactgggacaaaagatgtagctgttttctaagcactggtttgtcatctctttaaggagtggttggctccagaatgagccagactcactctataattccacattgtggcacaacagccacatagaacctcaaagctgaaattgcaacttttctgcaaaatagggccattgattacatccaaagttttgagaaaaggccttcaggttagattcagtcaccttcagactccacagagttgctcagcatggttgcaggcgtctttggaaacttacctcagggttttagaatacgttaccctgaagtctggataacaattttctctgagattttactgattctaattccctttgaaattgtttttcctacttgcctcttgtctttcatttaaataataagaatctccttgcatattcttaggtatttctttaggagaattggaagtttccagccaaggacactgtgtttatgaattggaaagatatctttctgggctgaaaaaggtaaaaatcatacggaggcaatcttgatgactttatttaaaagcaattatcagcattgtgttttattctaggtgctcgtgctcatagtgcaaactacattcacgtttttaattatttatgttatgatacttattcgtgtgtacatatatgcgcacacacacacacaaaagcctccacaatcctactggtatacaaatccatatgccccatttgtgtcgcttccgttgatctttgtgtgcatgcatttgcaatgaagtgtgcatcacatgtgtgatttcttaaagtcatctatagctcatctttcctcttattatcgacacataccctttgactttctgcactttggagctcatgaaattaaggctttttcaagggagactacatcttgagtttctttaaaccttcatatttaaagataggactggttttcttcgagaaacaaaaacttgattcagattttatttaattaattaattttctgggggaaatggtactgaatttgttcctgagtaacaaatagtagtaagtgcaaatataaatgtgaagtagtttaagcaggttattgaacctatcttgtggctgaaacaagtagtcagatatgaagctcagacactcaaattgaattagaacgtgaaccaaaacggttagcatggggcaggagaagagcactgggctaggagcaagcctgctagattgtcacttgagtgtccttagcttaatgtgggcatctgacaactagttgcagtcctgtgcccctctaattccagagatggggcaagccaatctgtttctcatccattgctcaagttggttatcactgaaatattatataccatctcaagatcctgccctgaacaagtttgcaaacatcccccccacactgaggagtcagtcccatttttgttttatggcagtttatctcttgtgaccctcctttggaagctgtccaaactctgaacacttgctgtccattccctgctccccaccccaccctttaaggccagggaaaagccagggaaagccctattggctcatctccctctttcctagcctgcacatcaaccaagcttgggatttagcctaggttttcagagaggaaaacaagtgcgttctcccagccatcagtatctttccagccccctggaccaagtgattagtgcctcattagcgcctcatcagttgcttttgcacaagagactctgggacaacaagcctattataatgcctcagtctgtctttttgaagtcaaaccatccttctggcttggttaggaaaggggagcctttctccaaacacgttttcttttaatttcctctgttgttttctggctgttaactatatggataaatggtaaaacataattttcattttttctaggcccctatgagagtggatatgctatatttctatagatgaggagttccacatgtcagcaaagcatttatttatttagtgaagtgactataatattgacacacagatttgcagcagcatccaaatcttgagggggaaaaaaaagcctttttcaatcaaatgaaaccttttctgtgatggcaccagagaggtttatatcttaagcacagaactgaacctgataatatgcttcctttctagaaacaaagagatagaagaaattgctgaaggagctggaagaccaaaccatctattccccaaatcattatgtatcaatagatacttcaactctgttccttaaatggctctgaaaaacacaaataaccatatttactattaaaaacaaattcataatgtctaacccaatcccttattttaatatatatacatattaaaataatcccatgtatatatgattattattatatgggatatatatagtttacatatatataggggtgtgtgtgtatatatatatatatatttacatatatatgtaaatgtatactttttaatgctggggatagttccatattgtttcttttcttgattccttctaatatattcaatgagatttataatttttttcacttttatttctttaggaaagagttggggtctattatgaatgctttctaggataaaatggcaaaacagatggaaagtgtggtagagggaggataatgggaataggaggcagagaacttgcacatttctatttcctgctgagagatcttggaaaaacattgtctgccctttacctcagtttcttaacatacaaaatagaactactatcaaccccctgcatgccacagagggttatttgagccctaaatgagatcataactgttaacata

SEQ ID NO: 69 - DNA, 2342 bp, Homo sapiens
gcggcggctgctgcagctcctactgcatcttccttctcttcctttcctcgggctccggtctcggagtcggagagcgcgcctcgcttccagagcccccggacccggcgagtcagcgatcgccgagccggccaccatgcccggcagaccgcgccactaggcgctcctcgcggctcccacccggcggcggcggcggcggcggcggcgtccgcgatggtttcagacgctgaaggattttgcatctgatcgctcggcgtttcaaagaagcagcgatcggagatggatgtctctctttgcccagccaagtgtagtttctggcggattttcttgctgggaagcgtctggctggactatgtgggctccgtgctggcttgccctgcaaattgtgtctgcagcaagactgagatcaattgccggcggccggacgatgggaacctcttccccctcctggaagggcaggattcagggaacagcaatgggaacgccagtatcaacatcacggacatctcaaggaatatcacttccatacacatagagaactggcgcagtcttcacacgctcaacgccgtggacatggagctctacaccggacttcaaaagctgaccatcaagaactcaggacttcggagcattcagcccagagcctttgccaagaacccccatttgcgttatataaacctgtcaagtaaccggctcaccacactctcgtggcagctcttccagacgctgagtcttcgggaattgcagttggagcagaactttttcaactgcagctgtgacatccgctggatgcagctctggcaggagcagggggaggccaagctcaacagccagaacctctaaccttcctgagatcagcgtgagccacgtcaacctgaccgtacgagagggtgacaatgctgttatcacttgcaatggctctggatcaccccttcctgatgtggactggatagtcactgggctgcagtccatcaacactcaccagaccaatctgaactggaccaatgttcatgccatcaacttgacgctggtgaatgtgacgagtgaggacaatggcttcaccctgacgtgcattgcagagaacgtggtgggcatgagcaatgccagtgttgccctcactgtctactatcccccacgtgtggtgagcctggaggagcctgagctgcgcctggagcactgcatcgagtttgtggtgcgtggcaaccccccaccaacgctgcactggctgcacaatgggcagcctctgcgggagtccaagatcatccatgtggaatactaccaagagggagagatttccgagggctgcctgctcttcaacaagcccacccactacaacaatggcaactataccctcattgccaaaaacccactgggcacagccaaccagaccatcaatggccacttcctcaaggagccctttccagagagcacggataactttatcttgtttgacgaagtgagtcccacacctcctatcactgtgacccacaaaccagaagaagacacttttggggtatccatagcagttggacttgctgcttttgcctgtgtcctgttggtggttctcttcgtcatgatcaacaaatatggtcgacggtccaaatttggaatgaagggtcccgtggctgtcatcagtggtgaggaggactcagccagcccactgcaccacatcaaccacggcatcaccacgccctcgtcactggatgccgggcccgacactgtggtcattggcatgactcgcatccctgtcattgagaacccccagtacttccgtcagggacacaactgccacaagccggacacgtgtttcagagaaattatgttgaatccaataagccttcccggacattccaagcctcttaaccatggcatctatgttgaggatgtcaatgtttatttcagcaaaggacgtcatggcttttaaaaactccttttaagcctccttgttttgatgtcaccttggtaggctgggccctctgagaggttggaagctctaggcattgttctctttggatccagggatgctaagtagaaactgcatgagccaccagtgccccggcaccctttaacaccaccagatgggtgttttcccccatccaccactggcagggttgccccttccctccaatcatcactgtgctccttttttcccggcctacgaggcagctcctgccactatctttagagccaataaagagaattaaaaacctgtgcaccaggagcatcttttaaatacactagccattctcttgctttacaaaaacaacctaaccatcacaagaaagcctgatgaagtccagccgtgctccagcctcactttccctgcttggaagcgtggggtctcc

SEQ ID NO: 70 - protein, 272 aa, Homo sapiens
MSNASVTVYYPPRVVSLEEPELRLEHCIEFVVRGNPPPTLHWLHNGQPLRESKIIHVEYYQEGEISEGCLLFNKPTHYNNGNYTLIAKNPLGTANQTINGHFLKEPFPESTDNFILFDEVSPTPPITVTHKPEEDTFGVSIAVGLAAFACVLLVVLFVMINKYGRRSKFGMKGPVAVISGEEDSDLHHINHGITTPSSLDAGPDTVVIGMTRIPVIENPQYFRQGHNCHKPDTCFREIMLNPISLPGHSKPLNHGIYVEDVNVYFSKGRHGF

SEQ ID NO: 71 - DNA, 2175 bp, Homo sapiens
gcggcggctgctgcagctcctactgcatcttccttctcttcctttcctcgggctccggtctcggagtcggagagcgcgcctcgcttccagagcccccggacccggcgagtcagcgatcgccgagccggccaccatgcccggcagaccgcgccactaggcgctcctcgcggctcccacccggcggcggcggcggcggcggcggcgtccgcgatggtttcagacgctgaaggattttgcatctgatcgctcggcgtttcaaagaagcagcgatcggagatggatgtctctctttgcccagccaagtgtagtttctggcggattttcttgctgggaagcgtctggctggactatgtgggctccgtgctggcttgccctgcaaattgtgtctgcagcaagactgagatcaattgccggcggccggacgatgggaacctcttccccctcctggaagggcaggattcagggaacagcaatgggaacgccagtatcaacatcacggacatctcaaggaatatcacttccatacacatagagaactggcgcagtcttcacacgctcaacgccgtggacatggagctctacaccggacttcaaaagctgaccatcaagaactcaggacttcggagcattcagcccagagcctttgccaagaacccccatttgcgttatataaacctgtcaagtaaccggctcaccacactctcgtggcagctcttccagacgctgagtcttcgggaattgcagttggagcagaactttttcaactgcagctgtgacatccgctggatgcagctctggcaggagcagggggaggccaagctcaacagccagaacctctactgcatcaacgctgatggctcccagcttcctctcttccgcatgaacatcagtcagtgtgaccttcctgagatcagcgtgagccacgtcaacctgaccgtacgagagggtgacaatgctgttatcacttgcaatggctctggatcaccccttcctgatgtggactggatagtcactgggctgcagtccatcaacactcaccagaccaatctgaactggaccaatgttcatgccatcaacttgacgctggtgaatgtgacgagtgaggacaatggcttcaccctgacgtgcattgcagagaacgtggtgggcatgagcaatgccagtgttgccctcactgtctactatcccccacgtgtggtgagcctggaggagcctgagctgcgcctggagcactgcatcgagtttgtggtgcgtggcaaccccccaccaacgctgcactggctgcacaatgggcagcctctgcgggagtccaagatcatccatgtggaatactaccaagagggagagatttccgagggctgcctgctcttcaacaagcccacccactacaacaatggcaactataccctcattgccaaaaacccactgggcacagccaaccagaccatcaatggccacttcctcaaggagccctttccagttgacgaagtgagtcccacacctcctatcactgtgacccacaaaccagaagaagacacttttggggtatccatagcagttggacttgctgcttttgcctgtgtcctgttggtggttctcttcgtcatgatcaacaaatatggtcgacggtccaaatttggaatgaagggtcccgtggctgtcatcagtggtgaggaggactcagccagcccactgcaccacatcaaccacggcatcaccacgccctcgtcactggatgccgggcccgacactgtggtcattggcatgactcgcatccctgtcattgagaacccccagtacttccgtcagggacacaactgccacaagccggacacgtatgtgcagcacattaagaggagagacatcgtgctgaagcgagaactgggtgagggagcctttggaaaggtcttcctggccgagtgctacaacctcagcccgaccaaggacaagatgcttgtggctgtgaaggccctgaaggatcccaccctggctgcccggaaggatttccagagggaggccgagctgctcaccaacctgcagcatgagcacattgtcaagttctatggagtgtgcggcgatggggaccccctcatcatggtctttgaatacatgaagcatggagacctgaataagttcctcagcagtatctccagccccaagagccaccagcagggt

SEQ ID NO: 72 - protein, 629 aa, Homo sapiens
MDVSLCPAKCSFWRIFLLGSVWLDYVGSVLACPANCVCSKTEINCRRPDDGNLFPLLEGQDSGNSNGNASINITDISRNITSIHIENWRSLHTLNAVDMELYTGLQKLTIKNSGLRSIQPRAFAKNPHLRYINLSSNRLTTLSWQLFQTLSLRELQLEQNFFNCSCDIRWMQLWQEQGEAKLNSQNLYCINADGSQLPLFRMNISQCDLPEISVSHVNLTVREGDNAVITCNGSGSPLPDVDWIVTGLQSINTHQTNLNWTNVHAINLTLVNVTSEDNGFTLTCIAENVVGMSNASVTVYYPPRVVSLEEPELRLEHCIEFVVRGNPPPTLHWLHNGQPLRESKIIHVEYYQEGEISEGCLLFNKPTHYNNGNYTLIAKNPLGTANQTINGHFLKEPFPVDEVSPTPPITVTHKPEEDTFGVSIAVGLAAFACVLLVVLFVMINKYGRRSKFGMKGPVAVISGEEDSDLHHINHGITTPSSLDAGPDTVVIGMTRIPVIENPQYFRQGHNCHKPDTYVQHIKRRDIVLKRELGEGAFGKVFLAECYNLSPTKDKMLVAVKALKDPTLAARKDFQREAELLTNLQHEHIVKFYGVCGDGDPLIMVFEYMKHGDLNKFLSSISSPKSHQQG

SEQ ID NO: 73 - DNA, 3671 bp, Homo sapiens
gcggcggctgctgcagctcctactgcatcttccttctcttcctttcctcgggctccggtctcggagtcggagagcgcgcctcgcttccagagcccccggacccggcgagtcagcgatcgccgagccggccaccatgcccggcagaccgcgccactaggcgctcctcgcggctcccacccggcggcggcggcggcggcggcggcgtccgcgatggtttcagacgctgaaggattttgcatctgatcgctcggcgtttcaaagaagcagcgatcggagatggatgtctctctttgcccagccaagtgtagtttctggcggattttcttgctgggaagcgtctggctggactatgtgggctccgtgctggcttgccctgcaaattgtgtctgcagcaagactgagatcaattgccggcggccggacgatgggaacctcttccccctcctggaagggcaggattcagggaacagcaatgggaacgccagtatcaacatcacggacatctcaaggaatatcacttccatacacatagagaactggcgcagtcttcacacgctcaacgccgtggacatggagctctacaccggacttcaaaagctgaccatcaagaactcaggacttcggagcattcagcccagagcctttgccaagaacccccatttgcgttatataaacctgtcaagtaaccggctcaccacactctcgtggcagctcttccagacgctgagtcttcgggaattgcagttggagcagaactttttcaactgcagctgtgacatccgctggatgcagctctggcaggagcagggggaggccaagctcaacagccagaacctctactgcatcaacgctgatggctcccagcttcctctcttccgcatgaacatcagtcagtgtgaccttcctgagatcagcgtgagccacgtcaacctgaccgtacgagagggtgacaatgctgttatcacttgcaatggctctggatcaccccttcctgatgtggactggatagtcactgggctgcagtccatcaacactcaccagaccaatctgaactggaccaatgttcatgccatcaacttgacgctggtgaatgtgacgagtgaggacaatggcttcaccctgacgtgcattgcagagaacgtggtgggcatgagcaatgccagtgttgccctcactgtctactatcccccacgtgtggtgagcctggaggagcctgagctgcgcctggagcactgcatcgagtttgtggtgcgtggcaaccccccaccaacgctgcactggctgcacaatgggcagcctctgcgggagtccaagatcatccatgtggaatactaccaagagggagagatttccgagggctgcctgctcttcaacaagcccacccactacaacaatggcaactataccctcattgccaaaaacccactgggcacagccaaccagaccatcaatggccacttcctcaaggagccctttccagagagcacggataactttatcttgtttgacgaagtgagtcccacacctcctatcactgtgacccacaaaccagaagaagacacttttggggtatccatagcagttggacttgctgcttttgcctgtgtcctgttggtggttctcttcgtcatgatcaacaaatatggtcgacggtccaaatttggaatgaagggtcccgtggctgtcatcagtggtgaggaggactcagccagcccactgcaccacatcaaccacggcatcaccacgccctcgtcactggatgccgggcccgacactgtggtcattggcatgactcgcatccctgtcattgagaacccccagtacttccgtcagggacacaactgccacaagccggacacgtatgtgcagcacattaagaggagagacatcgtgctgaagcgagaactgggtgagggagcctttggaaaggtcttcctggccgagtgctacaacctcagcccgaccaaggacaagatgcttgtggctgtgaaggccctgaaggatcccaccctggctgcccggaaggatttccagagggaggccgagctgctcaccaacctgcagcatgagcacattgtcaagttctatggagtgtgcggcgatggggaccccctcatcatggtctttgaatacatgaagcatggagacctgaataagttcctcagggcccatgggccagatgcaatgatccttgtggatggacagccacgccaggccaagggtgagctggggctctcccaaatgctccacattgccagtcagatcgcctcgggtatggtgtacctggcctcccagcactttgtgcaccgagacctggccaccaggaactgcctggttggagcgaatctgctagtgaagattggggacttcggcatgtccagagatgtctacagcacggattattacagggtgggaggacacaccatgctccccattcgctggatgcctcctgaaagcatcatgtaccggaagttcactacagagagtgatgtatggagcttcggggtgatcctctgggagatcttcacctatggaaagcagccatggttccaactctcaaacacggaggtcattgagtgcattacccaaggtcgtgttttggagcggccccgagtctgccccaaagaggtgtacgatgtcatgctggggtgctggcagagggaaccacagcagcggttgaacatcaaggagatctacaaaatcctccatgctttggggaaggccaccccaatctacctggacattcttggctagtggtggctggtggtcatgaattcatactctgttgcctcctctctccctgcctcacatctcccttccacctcacaactccttccatccttgactgaagcgaacatcttcatataaactcaagtgcctgctacacatacaacactgaaaaaaggaaaaaaaaagaaagaaaaaaaaaccctgtaaggcagtttggcaaatatatatatatatatatatatttatatatctaactatctatcaatctatatctacagagagttaccttctctagtacacagagaagctgctgatacagaaaaccacaagactttaacaactcagaaactctaaaatattaataatacaaaggaaaattccctttgacttaagctgtggcccatgcttctaatgctacggctctttggagcagaagacctggaccatgcagagagacaatctttgggatgagagctctgggacgggaggagttaaggtggtgctcagtcgctgctgtgtgtgtctgttaccccggaagctcaccacaggcacatgtggggactgcatggctgtgctcagcaaagaaatgatgcctgagcagggtccttgcctccacttcttccccatttcctccacttcaggacaatgttctaatttgtccattctaaaaagtgtaatcttgatgcttttgggaatcaatgatggcacctacgggtaaacacagaacagacaaccccacaacacaaaaccatgacaagagctgacagcatccatcctgggtgtaagcttcttgctggagttgcaaaggatgtgtctttctattctcagaacttaaagaactggactttctggagtaaaagaaccacagaagaaaaaatagctgaaacctgaaccctgccaagacactgccacctgtcttttccatcattgcaaagattcct

SEQ ID NO: 74 - protein, 821 aa, Homo sapiens
MDVSLCPAKCSFWRIFLLGSVWLDYVGSVLACPANCVCSKTEINCRRPDDGNLFPLLEGQDSGNSNGNASINITDISRNITSIHIENWRSLHTLNAVDMELYTGLQKLTIKNSGLRSIQPRAFAKNPHLRYINLSSNRLTTLSWQLFQTLSLRELQLEQNFFNCSCDIRWMQLWQEQGEAKLNSQNLYCINADGSQLPLFRMNISQCDLPEISVSHVNLTVREGDNAVITCNGSGSPLPDVDWIVTGLQSINTHQTNLNWTNVHAINLTLVNVTSEDNGFTLTCIAENVVGMSNASVTVYYPPRVVSLEEPELRLEHCIEFVVRGNPPPTLHWLHNGQPLRESKIIHVEYYQEGEISEGCLLFNKPTHYNNGNYTLIAKNPLGTANQTINGHFLKEPFPESTDNFILFDEVSPTPPITVTHKPEEDTFGVSIAVGLAAFACVLLVVLFVMINKYGRRSKFGMKGPVAVISGEEDSDLHHINHGITTPSSLDAGPDTVVIGMTRIPVIENPQYFRQGHNCHKPDTYVQHIKRRDIVLKRELGEGAFGKVFLAECYNLSPTKDKMLVAVKALKDPTLAARKDFQREAELLTNLQHEHIVKFYGVCGDGDPLIMVFEYMKHGDLNKFLRAHGPDAMILVDGQPRQAKGELGLSQMLHIASQIASGMVYLASQHFVHRDLATRNCLVGANLLVKIGDFGMSRDVYSTDYYRVGGHTMLPIRWMPPESIMYRKFTTESDVWSFGVILWEIFTYGKQPWFQLSNTEVIECITQGRVLERPRVCPKEVYDVMLGCWQREPQQRLNIKEIYKILHALGKATPIYLDILG

SEQ ID NO: 75 - DNA, 2536 bp, Homo sapiens
gcggcggctgctgcagctcctactgcatcttccttctcttcctttcctcgggctccggtctcggagtcggagagcgcgcctcgcttccagagcccccggacccggcgagtcagcgatcgccgagccggccaccatgcccggcagaccgcgccactaggcgctcctcgcggctcccacccggcggcggcggcggcggcggcggcgtccgcgatggtttcagacgctgaaggattttgcatctgatcgctcggcgtttcaaagaagcagcgatcggagatggatgtctctctttgcccagccaagtgtagtttctggcggattttcttgctgggaagcgtctggctggactatgtgggctccgtgctggcttgccctgcaaattgtgtctgcagcaagactgagatcaattgccggcggccggacgatgggaacctcttccccctcctggaagggcaggattcagggaacagcaatgggaacgccagtatcaacatcacggacatctcaaggaatatcacttccatacacatagagaactggcgcagtcttcacacgctcaacgccgtggacatggagctctacaccggacttcaaaagctgaccatcaagaactcaggacttcggagcattcagcccagagcctttgccaagaacccccatttgcgttatataaacctgtcaagtaaccggctcaccacactctcgtggcagctcttccagacgctgagtcttcgggaattgcagttggagcagaactttttcaactgcagctgtgacatccgctggatgcagctctggcaggagcagggggaggccaagctcaacagccagaacctctactgcatcaacgctgatggctcccagcttcctctcttccgcatgaacatcagtcagtgtgaccttcctgagatcagcgtgagccacgtcaacctgaccgtacgagagggtgacaatgctgttatcacttgcaatggctctggatcaccccttcctgatgtggactggatagtcactgggctgcagtccatcaacactcaccagaccaatctgaactggaccaatgttcatgccatcaacttgacgctggtgaatgtgacgagtgaggacaatggcttcaccctgacgtgcattgcagagaacgtggtgggcatgagcaatgccagtgttgccctcactgtctactatcccccacgtgtggtgagcctggaggagcctgagctgcgcctggagcactgcatcgagtttgtggtgcgtggcaaccccccaccaacgctgcactggctgcacaatgggcagcctctgcgggagtccaagatcatccatgtggaatactaccaagagggagagatttccgagggctgcctgctcttcaacaagcccacccactacaacaatggcaactataccctcattgccaaaaacccactgggcacagccaaccagaccatcaatggccacttcctcaaggagccctttccagagagcacggataactttatcttgtttgacgaagtgagtcccacacctcctatcactgtgacccacaaaccagaagaagacacttttggggtatccatagcagttggacttgctgcttttgcctgtgtcctgttggtggttctcttcgtcatgatcaacaaatatggtcgacggtccaaatttggaatgaagggtcccgtggctgtcatcagtggtgaggaggactcagccagcccactgcaccacatcaaccacggcatcaccacgccctcgtcactggatgccgggcccgacactgtggtcattggcatgactcgcatccctgtcattgagaacccccagtacttccgtcagggacacaactgccacaagccggacacgtgggtcttttcaaacatagacaatcatgggatattaaacttgaaggacaatagagatcatctagtcccatcaactcactatatatatgaggaacctgaggtccagagtggggaagtgtcttacccaaggtcacatggtttcagagaaattatgttgaatccaataagccttcccggacattccaagcctcttaaccatggcatctatgttgaggatgtcaatgtttatttcagcaaaggacgtcatggcttttaaaaactccttttaagcctccttgttttgatgtcaccttggtaggctgggccctctgagaggttggaagctctaggcattgttctctttggatccagggatgctaagtagaaactgcatgagccaccagtgccccggcaccctttaacaccaccagatgggtgttttcccccatccaccactggcagggttgccccttccctccaatcatcactgtgctccttttttcccggcctacgaggcagctcctgccactatctttagagccaataaagagaattaaaaacctgtgcaccaggagcatcttttaaatacactagccattctcttgctttacaaaaacaacctaaccatcacaagaaagcctgatgaagtccagccgtgctccagcctcactttccctgcttggaagcgtggggtctcc

SEQ ID NO: 76 - protein, 608 aa, Homo sapiens
MDVSLCPAKCSFWRIFLLGSVWLDYVGSVLACPANCVCSKTEINCRRPDDGNLFPLLEGQDSGNSNGNASINITDISRNITSIHIENWRSLHTLNAVDMELYTGLQKLTIKNSGLRSIQPRAFAKNPHLRYINLSSNRLTTLSWQLFQTLSLRELQLEQNFFNCSCDIRWMQLWQEQGEAKLNSQNLYCINADGSQLPLFRMNISQCDLPEISVSHVNLTVREGDNAVITCNGSGSPLPDVDWIVTGLQSINTHQTNLNWTNVHAINLTLVNVTSEDNGFTLTCIAENVVGMSNASVTVYYPPRVVSLEEPELRLEHCIEFVVRGNPPPTLHWLHNGQPLRESKIIHVEYYQEGEISEGCLLFNKPTHYNNGNYTLIAKNPLGTANQTINGHFLKEPFPESTDNFILFDEVSPTPPITVTHKPEEDTFGVSIAVGLAAFACVLLVVLFVMINKYGRRSKFGMKGPVAVISGEEDSDLHHINHGITTPSSLDAGPDTVVIGMTRIPVIENPQYFRQGHNCHKPDTWVFSNIDNHGILNLKDNRDHLVPSTHYIYEEPEVQSGEVSYPRSHGFREIMLNPISLPGHSKPLNHGIYVEDVNVYFSKGRHGF

SEQ ID NO: 77 - DNA, 3713 bp, Homo sapiens
gcggcggctgctgcagctcctactgcatcttccttctcttcctttcctcgggctccggtctcggagtcggagagcgcgcctcgcttccagagcccccggacccggcgagtcagcgatcgccgagccggccaccatgcccggcagaccgcgccactaggcgctcctcgcggctcccacccggcggcggcggcggcggcggcggcgtccgcgatggtttcagacgctgaaggattttgcatctgatcgctcggcgtttcaaagaagcagcgatcggagatggatgtctctctttgcccagccaagtgtagtttctggcggattttcttgctgggaagcgtctggctggactatgtgggctccgtgctggcttgccctgcaaattgtgtctgcagcaagactgagatcaattgccggcggccggacgatgggaacctcttccccctcctggaagggcaggattcagggaacagcaatgggaacgccagtatcaacatcacggacatctcaaggaatatcacttccatacacatagagaactggcgcagtcttcacacgctcaacgccgtggacatggagctctacaccggacttcaaaagctgaccatcaagaactcaggacttcggagcattcagcccagagcctttgccaagaacccccatttgcgttatataaacctgtcaagtaaccggctcaccacactctcgtggcagctcttccagacgctgagtcttcgggaattgcagttggagcagaactttttcaactgcagctgtgacatccgctggatgcagctctggcaggagcagggggaggccaagctcaacagccagaacctctactgcatcaacgctgatggctcccagcttcctctcttccgcatgaacatcagtcagtgtgaccttcctgagatcagcgtgagccacgtcaacctgaccgtacgagagggtgacaatgctgttatcacttgcaatggctctggatcaccccttcctgatgtggactggatagtcactgggctgcagtccatcaacactcaccagaccaatctgaactggaccaatgttcatgccatcaacttgacgctggtgaatgtgacgagtgaggacaatggcttcaccctgacgtgcattgcagagaacgtggtgggcatgagcaatgccagtgttgccctcactgtctactatcccccacgtgtggtgagcctggaggagcctgagctgcgcctggagcactgcatcgagtttgtggtgcgtggcaaccccccaccaacgctgcactggctgcacaatgggcagcctctgcgggagtccaagatcatccatgtggaatactaccaagagggagagatttccgagggctgcctgctcttcaacaagcccacccactacaacaatggcaactataccctcattgccaaaaacccactgggcacagccaaccagaccatcaatggccacttcctcaaggagccctttccagagagcacggataactttatcttgtttgacgaagtgagtcccacacctcctatcactgtgacccacaaaccagaagaagacacttttggggtatccatagcagttggacttgctgcttttgcctgtgtcctgttggtggttctcttcgtcatgatcaacaaatatggtcgacggtccaaatttggaatgaagggtcccgtggctgtcatcagtggtgaggaggactcagccagcccactgcaccacatcaaccacggcatcaccacgccctcgtcactggatgccgggcccgacactgtggtcattggcatgactcgcatccctgtcattgagaacccccagtacttccgtcagggacacaactgccacaagccggacacgtatgtgcagcacattaagaggagagacatcgtgctgaagcgagaactgggtgagggagcctttggaaaggtcttcctggccgagtgctacaacctcagcccgaccaaggacaagatgcttgtggctgtgaaggccctgaaggatcccaccctggctgcccggaaggatttccagagggaggccgagctgctcaccaacctgcagcatgagcacattgtcaagttctatggagtgtgcggcgatggggaccccctcatcatggtctttgaatacatgaagcatggagacctgaataagttcctcagggcccatgggccagatgcaatgatccttgtggatggacagccacgccaggccaagggtgagctggggctctcccaaatgctccacattgccagtcagatcgcctcgggtatggtgtacctggcctcccagcactttgtgcaccgagacctggccaccaggaactgcctggttggagcgaatctgctagtgaagattggggacttcggcatgtccagagatgtctacagcacggattattacaggctctttaatccatctggaaatgatttttgtatatggtgtgaggtgggaggacacaccatgctccccattcgctggatgcctcctgaaagcatcatgtaccggaagttcactacagagagtgatgtatggagcttcggggtgatcctctgggagatcttcacctatggaaagcagccatggttccaactctcaaacacggaggtcattgagtgcattacccaaggtcgtgttttggagcggccccgagtctgccccaaagaggtgtacgatgtcatgctggggtgctggcagagggaaccacagcagcggttgaacatcaaggagatctacaaaatcctccatgctttggggaaggccaccccaatctacctggacattcttggctagtggtggctggtggtcatgaattcatactctgttgcctcctctctccctgcctcacatctcccttccacctcacaactccttccatccttgactgaagcgaacatcttcatataaactcaagtgcctgctacacatacaacactgaaaaaaggaaaaaaaaagaaagaaaaaaaaaccctgtaaggcagtttggcaaatatatatatatatatatatatttatatatctaactatctatcaatctatatctacagagagttaccttctctagtacacagagaagctgctgatacagaaaaccacaagactttaacaactcagaaactctaaaatattaataatacaaaggaaaattccctttgacttaagctgtggcccatgcttctaatgctacggctctttggagcagaagacctggaccatgcagagagacaatctttgggatgagagctctgggacgggaggagttaaggtggtgctcagtcgctgctgtgtgtgtctgttaccccggaagctcaccacaggcacatgtggggactgcatggctgtgctcagcaaagaaatgatgcctgagcagggtccttgcctccacttcttccccatttcctccacttcaggacaatgttctaatttgtccattctaaaaagtgtaatcttgatgcttttgggaatcaatgatggcacctacgggtaaacacagaacagacaaccccacaacacaaaaccatgacaagagctgacagcatccatcctgggtgtaagcttcttgctggagttgcaaaggatgtgtctttctattctcagaacttaaagaactggactttctggagtaaaagaaccacagaagaaaaaatagctgaaacctgaaccctgccaagacactgccacctgtcttttccatcattgcaaagattcct

SEQ ID NO: 78 - protein, 835 aa, Homo sapiens
MDVSLCPAKCSFWRIFLLGSVWLDYVGSVLACPANCVCSKTEINCRRPDDGNLFPLLEGQDSGNSNGNASINITDISRNITSIHIENWRSLHTLNAVDMELYTGLQKLTIKNSGLRSIQPRAFAKNPHLRYINLSSNRLTTLSWQLFQTLSLRELQLEQNFFNCSCDIRWMQLWQEQGEAKLNSQNLYCINADGSQLPLFRMNISQCDLPEISVSHVNLTVREGDNAVITCNGSGSPLPDVDWIVTGLQSINTHQTNLNWTNVHAINLTLVNVTSEDNGFTLTCIAENVVGMSNASVTVYYPPRVVSLEEPELRLEHCIEFVVRGNPPPTLHWLHNGQPLRESKIIHVEYYQEGEISEGCLLFNKPTHYNNGNYTLIAKNPLGTANQTINGHFLKEPFPESTDNFILFDEVSPTPPITVTHKPEEDTFGVSIAVGLAAFACVLLVVLFVMINKYGRRSKFGMKGPVAVISGEEDSDLHHINHGITTPSSLDAGPDTVVIGMTRIPVIENPQYFRQGHNCHKPDTYVQHIKRRDIVLKRELGEGAFGKVFLAECYNLSPTKDKMLVAVKALKDPTLAARKDFQREAELLTNLQHEHIVKFYGVCGDGDPLIMVFEYMKHGDLNKFLRAHGPDAMILVDGQPRQAKGELGLSQMLHIASQIASGMVYLASQHFVHRDLATRNCLVGANLLVKIGDFGMSRDVYSTDYYRLFNPSGNDFCIWCEVGGHTMLPIRWMPPESIMYRKFTTESDVWSFGVILWEIFTYGKQPWFQLSNTEVIECITQGRVLERPRVCPKEVYDVMLGCWQREPQQRLNIKEIYKILHALGKATPIYLDILG

SEQ ID NO: 79 - DNA, 3613 bp, Homo sapiens
tctcggagtcggagagcgcgcctcgcttccagagcccccggacccggcgagtcagcgatcgccgagccggccaccatgcccggcagaccgcgccactaggcgctcctcgcggctcccacccggcggcggcggcggcggcggcggcgtccgcgatggtttcagacgctgaaggattttgcatctgatcgctcggcgtttcaaagaagcagcgatcggagatggatgtctctctttgcccagccaagtgtagtttctggcggattttcttgctgggaagcgtctggctggactatgtgggctccgtgctggcttgccctgcaaattgtgtctgcagcaagactgagatcaattgccggcggccggacgatgggaacctcttccccctcctggaagggcaggattcagggaacagcaatgggaacgccagtatcaacatcacggacatctcaaggaatatcacttccatacacatagagaactggcgcagtcttcacacgctcaacgccgtggacatggagctctacaccggacttcaaaagctgaccatcaagaactcaggacttcggagcattcagcccagagcctttgccaagaacccccatttgcgttatataaacctgtcaagtaaccggctcaccacactctcgtggcagctcttccagacgctgagtcttcgggaattgcagttggagcagaactttttcaactgcagctgtgacatccgctggatgcagctctggcaggagcagggggaggccaagctcaacagccagaacctctactgcatcaacgctgatggctcccagcttcctctcttccgcatgaacatcagtcagtgtgaccttcctgagatcagcgtgagccacgtcaacctgaccgtacgagagggtgacaatgctgttatcacttgcaatggctctggatcaccccttcctgatgtggactggatagtcactgggctgcagtccatcaacactcaccagaccaatctgaactggaccaatgttcatgccatcaacttgacgctggtgaatgtgacgagtgaggacaatggcttcaccctgacgtgcattgcagagaacgtggtgggcatgagcaatgccagtgttgccctcactgtctactatcccccacgtgtggtgagcctggaggagcctgagctgcgcctggagcactgcatcgagtttgtggtgcgtggcaaccccccaccaacgctgcactggctgcacaatgggcagcctctgcgggagtccaagatcatccatgtggaatactaccaagagggagagatttccgagggctgcctgctcttcaacaagcccacccactacaacaatggcaactataccctcattgccaaaaacccactgggcacagccaaccagaccatcaatggccacttcctcaaggagccctttccagagagcacggataactttatcttgtttgacgaagtgagtcccacacctcctatcactgtgacccacaaaccagaagaagacacttttggggtatccatagcagttggacttgctgcttttgcctgtgtcctgttggtggttctcttcgtcatgatcaacaaatatggtcgacggtccaaatttggaatgaagggtcccgtggctgtcatcagtggtgaggaggactcagccagcccactgcaccacatcaaccacggcatcaccacgccctcgtcactggatgccgggcccgacactgtggtcattggcatgactcgcatccctgtcattgagaacccccagtacttccgtcagggacacaactgccacaagccggacacgtatgtgcagcacattaagaggagagacatcgtgctgaagcgagaactgggtgagggagcctttggaaaggtcttcctggccgagtgctacaacctcagcccgaccaaggacaagatgcttgtggctgtgaaggccctgaaggatcccaccctggctgcccggaaggatttccagagggaggccgagctgctcaccaacctgcagcatgagcacattgtcaagttctatggagtgtgcggcgatggggaccccctcatcatggtctttgaatacatgaagcatggagacctgaataagttcctcagggcccatgggccagatgcaatgatccttgtggatggacagccacgccaggccaagggtgagctggggctctcccaaatgctccacattgccagtcagatcgcctcgggtatggtgtacctggcctcccagcactttgtgcaccgagacctggccaccaggaactgcctggttggagcgaatctgctagtgaagattggggacttcggcatgtccagagatgtctacagcacggattattacagggtgggaggacacaccatgctccccattcgctggatgcctcctgaaagcatcatgtaccggaagttcactacagagagtgatgtatggagcttcggggtgatcctctgggagatcttcacctatggaaagcagccatggttccaactctcaaacacggaggtcattgagtgcattacccaaggtcgtgttttggagcggccccgagtctgccccaaagaggtgtacgatgtcatgctggggtgctggcagagggaaccacagcagcggttgaacatcaaggagatctacaaaatcctccatgctttggggaaggccaccccaatctacctggacattcttggctagtggtggctggtggtcatgaattcatactctgttgcctcctctctccctgcctcacatctcccttccacctcacaactccttccatccttgactgaagcgaacatcttcatataaactcaagtgcctgctacacatacaacactgaaaaaaggaaaaaaaaagaaagaaaaaaaaaccctgtaaggcagtttggcaaatatatatatatatatatatatttatatatctaactatctatcaatctatatctacagagagttaccttctctagtacacagagaagctgctgatacagaaaaccacaagactttaacaactcagaaactctaaaatattaataatacaaaggaaaattccctttgacttaagctgtggcccatgcttctaatgctacggctctttggagcagaagacctggaccatgcagagagacaatctttgggatgagagctctgggacgggaggagttaaggtggtgctcagtcgctgctgtgtgtgtctgttaccccggaagctcaccacaggcacatgtggggactgcatggctgtgctcagcaaagaaatgatgcctgagcagggtccttgcctccacttcttccccatttcctccacttcaggacaatgttctaatttgtccattctaaaaagtgtaatcttgatgcttttgggaatcaatgatggcacctacgggtaaacacagaacagacaaccccacaacacaaaaccatgacaagagctgacagcatccatcctgggtgtaagcttcttgctggagttgcaaaggatgtgtctttctattctcagaacttaaagaactggactttctggagtaaaagaaccacagaagaaaaaatagctgaaacctgaaccctgccaagacactgccacctgtcttttccatcattgcaaagattcct

SEQ ID NO: 80 - protein, 821 aa, Homo sapiens; identical to SEQ ID NO: 74

SEQ ID NO: 81 - DNA, 109453 bp, Mus musculus
tgcagttctttcagacaggaacaattctgggtcagagtttttgactgtggggtagcaacccatccctccacttgattccctgtctttctactggaggtgggctctacaagttctctctccccactgtagggcattttatctaataacattttaaaataatcatttcctatttctaagtgtgtaggcagtgtcagttaccacctcataaatggttgactatgagggaatctaacacctgtacctcatggctgacactcatgagaactttgacgagtgatacctgtgtcttagcatcagaggtccttcaaggctagagtacacatctcacatctttagtgccctttctgatgcagggctcttgaaagatccaggttgtcagttactttccagtgcaccagtgagggttttgttttgttttttaaaattttttctctttccacctgtactggctagttttgtgtcaacttgacacagctggggttatcacagagaaaggagcttcagttgaggaaatgcctccatgagatccaactctaaggcattttctcaattagtgatcaagggggaaaggccccttgtgggtggtaccatctctgggctggtagtcttgggttctataagagagcaggctgagcaagccaggggaggcaagccagtaaagaacatccctccatggcctctgcatcggctcctgctttctgacctgcttgagttccagtcctacttccttggtgatgaacagcagtatggaagtgtaagccgaataaaccctttcctccccaacttgcttcttggtcatgatgtttgtgcaggaatagaaaccctgactaagacaccacctgaattgtaagtgcttcaataattcctacagtgctatctgtaattccttcagataggaatggtggtcttcctgggaattcgacagagctctgaaacagtacgttgactacatctgtcctcaataaattagtgcgcatcttccatgcctcccaggacagaccagctttcaatttgtatgtaatgggtgcagtaaaaaaaacaaaaaaaccaaaaaacccaaaacaataacaagaaaagaccttctgaaatgactgctacattaaggggaaggtttttactatgaataagagaaagacagagagagaaggagagagagagagagagagagaaagagagagagagagagagagagactgtggagtgtgttttagactctgagggttagctaggtccgggtgatatgatgtctcccaaatgaggcccttgataacctcagagtcagaatgaaaatgtggttgttgggagttgaacctgggtcccctggaagagcagtcaatgctcttaactgcggagccctctctccagccttccctccaaccaaacaagtaattttttatctcttgaactaatatatatataaataaataaatatataaaaataaatatatatatttatttcagtagaccactaatctagacattttaagcaaacacaaagcaaaggcatcttgggcccttgttaggaacttaagtaactattacttaagtaagtaactcaaaagctatttttttttaaaatttttttagatttatttatttattatatgtaagtacactgtagctgtcttcagacactccagaagagggagtcagatcttgttacggatggttgtgagccaccatgtggttgctgggatttgaactccggaccttcggaagagcagtcaggtgctcttacccactgagccatctcaccagccctcaaaagctattctatatgtcgtaaaataacatgatgcctaaaagcaagactctacaggccactgtagagcccagatccaaagcctagaccagaacaggccttgatatgctaatgagctaaccccaagtggtgttgatgaagtgaaccagcctcaagctgtgagccctgatagtacaaagctttcacccaatgaagtgatacacaaataagaacttggggatggtttctaggaccacattgctgtgctctcagacatggtttctccagcctctgtgttgtccatctgctagaagacttgagactctgtgtatggccctgacctcagtgaccattgaacttcctgcactgttgctgggcccacacaggctgacctgttagcactgggcctatgctcccaaggacctcctgagcatccgtcagtgccatcctcccagcccgccacagctgaaggacttcatggtagatgtaggttcagtcggcacgttaccaaatcgtcctcagtcctcatgggagattccccatggggaaacctgcagtagcatttctcacttgatgtccctcacttgatgagatgtctgtttaacttttatgtcagcaagatattataaggagtgtttgtgtgaataaaccaagcatatttgaaaagacaaatcctgggcggacatcctgattgctgggagctttacagcccacaggcagtgctctctgcagctctccttgtgtcaagctcggggaatcagaatctatatgcttctaagctcaggcgtctctctggagagtctttcaggcacccagaacagctcagtggcctctgagtatggcataatcagctctgagcaacctcacccttctgacagctgttatgtttaacatcctagaggaatgaagctagcttgaatggctctccagggcaagtgtctcttgtccaacgaaggcagcttccagaaggacatggaggaggcaacttgtgtctagtctgtcactggggaaaaccctcttaacctctgggctacaggtaataaatagcaagtcaattctctgtccaaccaggaagcaagggtagaaaaattaggccctttgggccactgtcttatctccaaattcctactggatttctttagactggcagggcttactataggtgataaaaaaacaacagacgcttgcaggaaggaagcaggtggggtggggtgactttgactaggggtttggagagggcatgcaacattgcagcctgtttcctccttggaaaacaagaaatgttcattaagtagactctaagttctgagaggaggtttcagccccaggaacaggaatgcatctaagatccaagagatgggttaagctttatggagacacacacacacacacacacacacacacacacacacacacacacacacacacacttgaaacagggtcacatgtattccagctggccttgaacttgctatgacgttaaggaagaccttaaacttcagatcttcctgcctttaacttggagtgctgaggttatagggatgcacaccccctcctcagcccccttgtgtgtagggctcaagccttgagcttcttcaccccaggaaaacatactctcaagtgaactttatctccaacctcgatagataccttgtttccatctttgctttgactgctaggaggctcacggccacaatcctagttgatctttagtagctaagtccttctagcaggtggtgggaagggtgggggtgggcaggcctatgggggtgtttatggggaaggctcctggcatgcctcaagtctttgctctgtctctccagctccgatgtccttgtctgccattatttttctgtttatatgataagtgtttgcttagtgcattgtaggaggttttgaaaatgatgtcaggttgctttggcataagcaatctcacccccatcagggagaggcagtgatgtcacagtcataccccattgtcctcacttcttgatcatcatcttaggaaggtcaagtcccctctttgagcctcttttctttctctgtaagatggttgtactgctgcgccctaagtcctgcctgcccagggcatgtgggactgttccacgagatacagggtgcaggaaggtgatagcatttacaagacttccccagctgccgtttgaggacatgctgggtgagcagaggtggggggtggaacttctgggtaggacaggaatgagtgcatgttggatgtaggctgcagcagcatggtgtgagagatgaaggaagtgtgaagagagtgaggtggataggaggctgtgcaggagctggagaagaaggcaccagctttctatgtgggaccagaatcagaggcgaggactcttagtggtcccttctgcttgggtgagaaaggtccctttgtccctggcccttgagacacagggcagactatatcaaccagagccccttggcagagtccaggctgtttgcctggggatgcactagaagccatggagatcactttgtgaaagagtgcttcctcctgctctgcccctgcttgcttctcctggaggctgacactgtcctattagaaccaccagcatggtggccttcaagtcagtgaagaacatgtgcttgtctaactgtccaccaagataagcttgtgttagtcatttgtgctgtgatttactatatgacaacatgtgcgcgcacgcgcacacacacacacacacacacacacacacacacacacacacacacacacctctgtagctctctggcctggggctgtaatgaggaagcaggaaataaaactgaaatgatccctccactcaaagaactcacccagtgtcagtgagcttagtggaggccatccactgtggtttgtcagtcagcgagcttagcagaggccattctctgtggtttgccccttcactggccacacataagaatcccattatggccctgctgccctttagctcggggacaccaatggcacttttattgactttgttttggcttagtgttgtgaacctgtcactgccccatacacatttaaagctccccttttgttccaagttccttgggggtgacagtgtttgttgtgttctttcaatgccacctgccaaacccactgacaaaggctgtgtgagaacatgtatggtagcagttgttgagcaaatcagtggttctgagccattgcactgagctctgcaggaagcagtaatctggggtagagaggcctggtccaggcttctgggtcccaagggacacaccttagctgatttggtggcccaatatgccaccttggcatagtgggcaacaaattatgagtcctccctctttctctctccttctctccttcctttcttacctctttccctctctctccctcttttccttcctctctatttttccttccccctctctccctctccctctccccctccccctcccccctcccctcccctcctcctcctcctcctcctccttcttcttcttctcttcttctcctccttctccttctcttttccttctctcctcctcctccttcttttcttctctctctctctcttccctctctctctcttcctatcttctttccagacactgtttccatgaagctcaagatgtctttaaacttgctgtgtggttaagaccttgagtttatttatgatctacctacctcaggtgctgaaaggccaggtgtgtgcttccacatttggtttttgatgttctaggactggaatccatggcttcatatatgccagacttcatatatacaaatactctaccagccccagccctgccccctcttttttttttagggctttccttttagatgggatctttggggttgttcaacaggacctactcagctagcagctcacaaggttgcctttgtccttagagaagctgacacaaatgaactctgtacagctagagaagtcacggctgagataaggccctgcctgcccagagcctactagggccctgctggggctggagtctcaggacagctcaggactgggttccctcatgttttccttctgagcagccacagcatttccaacattgctccctgaccctttgtcacatggtttcttgtcttacccttctacctctatggcttcctggacttgaaaggtacaaaccccttatcaaagacgagaaaggtgaatgtgtaggacctccttccagatctcaggaaagggaaggccagtcttctggaagcccgaggacaggaagatggtgattcccatgcactgggagcagccttagatgaagcaaccccacaatgatcctaacccaacattttacccatgtgaggtaaagaggcaccgtcattcacaagccttggataagaagtcatagctgaacagtggtggtgcaggcctttaatcccagcacttgggaggcagaggcaggtggatttctgagttcaagtctagcctggtctatggagtgagttccaggacagcctcggctatatagagaaatcctgtcttgaaaaacagaagaagaagaagaagaagaagaagaagaagaagaagaagaagaagaagaagaagaagaagaagaagaagaagaagaagaagaagaggaagaaggaggggagggggagggggagggggaaggggaggagaagaagaaaagaagtagtcagcctgctgctccaggctgactggacacatggtctctgcttgagacagccatggagttcagtctttatgaagagccactgaggtggccacaagtgtgtttaggaaggtgtggaggtatagaaccaggataggctgtcggaaggaggctggctctcggttgggatatggtcctttagaatggcctatgctactcatctctgacgttcacagatgatatggatgtgctaaaccagagcctggtacttgtccagaggccaggccttgattctgaacctgtatcactcttgcctctttttttgtttaaatatccatgggtttatgatatggaggggagagaaactgaaaatctctttgtttaccaaataaaaattggctctttgtgttgatctcagaagagaaatgtatttgaccatttgcaggtttgtagagtgtagttagaagaaggaaggtcctatggcctgaagcatgggtctcagtaaaaggcttcagctctctgactttctgtccccccacaccccgactttttctttcttgagctttgtccctcagtcatactgccgcaccccagccttgcccacattagagaccatagcctgctggaccgatgcccatcttggcctaggcccctgcttctttttccttggctttggcgtgtatgtggggaagtctccacaccttgttttatttcccctgtacctactcctagcaccagctcctgtctcccagcctcacctgtgttcactatagtttcaaacattctgtttccaccttccagacaaaagccctggaatcccagaacttgggtgggtgcgggccccttatgtgtagcccaatcctagctgccactggctgcttgtcagtgagtgcttcagttcacctttgacccaggacctcctctcctggtcagaactgtaggacagtttttcacaaggtgaaggtagcctgaaagttgcaaaggacttgagagcaaggctgctggagagatgtgggggtccatggaatattgactgtcagtaaagctacagactagatggaccatgaggagaaagaagagcagtggatgggacagggcctgggggacacatgtcctccaaactcctttccttttgagcttcctctcacctaggtgtcatcaatgactgttatcaatgactcaaagcccatttgggggtcattctgggctcttgtatttgccatgcacatatttccctaacataactgcaatctgtggagtttcctatgctcactgactctgcctggtgattggagttaaggctcatgacttgtttgtccgtgtgtccccagatgtaaagcaaatctgacacattgacaatgttctttgtgtgttctggcatgcagacattctctacattgagttaggttctgaactcatgaatgacccgttgaaacatatcacaaggccctatcagacagccttggcttttatactacaagctcttagcagatacatgaagtccagagcccactcatcaaaagccaggggttcaatgcagaaatgctcaaggtagggtggtccatttaagaggaaaatggtcttccttcttttagggcccaagacccatctacgttttggggtagcctctgctgggcttgcagtcaatcttgatgaagattgccacccagcattgccttgccatgttcttcctggtgtacaccataccatccctaccctccaagaattgtgcagctaagttttagacgctaggatagatctgacttggggtacacttgatctcattctaccctatcactgacttctatctttttagatggtggtgggtgctggtggcatctttgtttcctcttcatctttcctttgagttcacagatccaggtagagactgaagggaaaaggggaccctccagctgggcatctttaatgggctccaacatcagtccatctgggccataaactttctgatggaagagatgagctctccttttctgtccaaagaccaatggatgccactgtctaacccaagtggaatacaacaggaatccttaggtgacctgagtagattcatctcgtgctctgtgaccatgcccatgcgtgctctggcttggaggtggtctagtaaattctcctatgactccaacacacctgggaccatatgtccgtgatttggaggggcagttgtgacgccaagcacttagaggtgcctagaccagttctttgtgcagaaactgcctgaggaggtccatggaagtcgccctttatctggataagagttacccttggatgccattcagtttccttgttcttattctttgctccgaaacaaactattaggatatattttagtctttcacacagactcattctaaagccaaaacacacttccattgtcaatgactgacttggtttcctggtgtaccaatagtatctgagcagtgtaattaatgcagttggacgtctgaggatcaagttttacttcaaagtctgccatgggtgatggtgcaatcctgtgaaggaggacctctctgaaagagctgtccccactgtctgaggaccctggtctgcacagaagccaaatctggaatgtagcttgtttttggatgaaattagaggcagagtctcagtccctaaagatgacttcacagcatcccactagaatcaagtgacagagactgtgggttaacagggcaaggtaaaggaggcaaggtactccaaggtcttatgtggcaagaccctactcaccaggccagaaaacagtcaattctgctgagctggctgcttcttaccagctcattccaccacagagactatcttacaaatgtcaagtaaccttctcagagtcttcatcgggtctatcggaatcctggaacgcaaactggagtgtcccaaagagtttgggaacatttacttcataaacccaaggaggagaattagaacctaagacagaaacaaggggcaagttccatggctttcccaaaatctaagcatcataccgtgtgcttgccgaggacaagaaatggaagcaaggtaagatggttggggagtggtttggtttaaggccagggatttctcagctgagatgaagatgttgggggatcatctggtagaagttgggatgggtgcatggtctgagtgaaccagttcttcatgtcttctacttttagtcagtgtgcaagggcattctcagtcctctgagccttggtgataccctcaagagctaactaggaggacagcatgccagtataaaccatcctgaacatatgccttccccttggcaccatgtctcttatttgcccagcagcccacatcctgcttcccataagttgcttggactctccaagataaaaatcaaggccatgttcagggagccactgggagtcttctatgctcatcaagaaggaaattttatcactgaagtcaggccttctacattgggcaacagccagtttgttcctaccacaatcagtcaaacacacctaaccttgttcccacggattagtcaaactgttaacaaagttccccacttccgtcatattgatttatagtagcaatagaagcacaccacccaagagggcacacctctttccacccaggaacttataaatgtcaaggaatttctactcaaatcgagaggaaccggcacaatggggatctccactgttatctttgaaatatgtcttttgtggggtcaaattctgtctacaggtatttcgtctcatttatttatagtcatgaattgtgcttctgcaaatctcagtcctggtgggttggatgaatttgttcatggttgtgtgactgtccgtctcaaggaggctctttgctaataactgtaaatatttgtaagtgtgtggaggcgtgtgctttcctttttgccccatgtctgcctgagagatagaagaggcggcggcagggaagaagccaggcattctgttggtgttctcagggagtcgttcggtgaaggaaatgattgactgaagtccccaggctcaggaaaggcttatgggaattagggagaggccttgctaaatacataggtccggtgctgtgaaactggaaggagatgagcttgtattggtgttctgcatgtgccttcttttccgtatgtctggctctctgaccattatttgctgagcaaagccaggtcaagggaccaacagacaggatggtgttagtgtgccagtcacactgcttgcagctcagtcactccaacactgtgtcaagtgatgatcagggaagacttacctggtcactcctccatatggctgaatgtgtcatctcacagaggacaccctgtgtaacccatctctttctctctggctgtatgtcctccctctgtctgtctctttctgtctctctgtttttctgtttgtccttctctttgctctgcctctctgtatctctgtctctttctgtctgtctctttctctgtctctttgtttctgtctctgcctctctcctctctacctttccctttcctggatatcctatctctcatctctttcacccagttctttttttctttcctccctctttccctccctcctctttcccttcctctttttcttcccttcctcttctctttatttcttcttcacacaccctgttcttttctttctccctttggagcctctatggctaggtttcttaggcaagattatcagatgaattccagaatgctcactctccccaggctgggtgagatgaagactcatttggggcatggctttcacgagaacatcaccccaagaccaaatcctcaggcgtgcactgctgaccaaggggtcctagactgaggcagccaagaactagtcaggctgtctgtcttcttggagagtgtgaaatgggaggcaaggccagctttcagggtgacagacttgctctgtccttgcccagtgacctggaatcaccatagtccttggggggagacagccgtgcccttatccacaaagaaacaaaggcagtagtgctatggggctgagggagtttgtccttttaacatgatgctacatgtgtgcttacatacaaatatgcatgctggccctacatgtgtgcttacatacaggtatgcatgctgtggcttcagcacacagagggggaactgaccctcttccacttgagcttcttctctaattcaagccaggaaacaccccaaagttaggcaccatagttcagatgagggacacaaagactcaggagattggctatatgggagctgggctagaatttgaacctggagtaaggcctgatggcactgaagtgacagctacgtcagattaagccatggctgctccaggcagggagcagagggagctgcatgtctgacctcagtgtcatctttgtacagagtcaggtgcacaggtcatgctgggcaggagagaggctgaggcactgctgttggtcaatggcagagccaaggacactgttgggacagaccctctcctgcagtaaaacccagtttacccctttgcaaatggggtggcatgctcttttctacagagtaagggaatgagacacctcccaccggccaccccgtcggactagcaggtagaataagtcttacgatggtcatgccccatttggagcaattttctaatgttttatccacatgtgacttccttagggtagtttgggtctcggagtatctctaggaagacaggacttgggagcaattcgaacattaaccacatcctcaccattcctgagcaatcatctctccgtttccaaagaaaatgggttctaggaacttccttgcttctacccaaagcatctagcactcaagtcttttgtcaactggtgtgtgacccacagacatccttctgtgtccttccagatctagcccctcatagaatatcagccttgtgtgactcagtgctataccacattgctcatgtgaggacggcaagagggaaggttttcatgttcaataatacaggagcaggcttttttttctttatatttttgattcaccacctgtgtaatttgtgaaggagcccatgggtacgtagggccaactggaatatactaagattattttattgttttgaccatgaaaatggaaccttggtgtttgagtttgggctttgagggacccacacagcaaaggtgtaaaagctatgtctttaggagttggtgaaggtgacttcaggtgttcctggtatgtcgttgcttccaaggaaggtttttgcccggattcctgtacataaaacacagaacctgaatttgcttttatttctttcacagcatctcaaacagctgttcccacagatggtaagtactttgaaaatatggacctgtatcagtgtatgatttcccccaatgtcgtgatagacactgcctcaataaatggtaataaatgacactaggatgaaatatatagtgttccatgtagacggtaatgacaatagaaactcctgccagctagagcataaaggaccctgtgttaagacaattgcagtgttcatttttatgttgctcctgcctcatattacattttatgttagaagcgaatagaatatctaaatgcaggccttggattcggtcctggtgcaagaagttctgactaggagacatgaagcaaactcagggatcagtggttggcagatgatatataagaataacttgccttcttcatacttggaccaactcctgcttgaactaagacgaatcagaatctgatgttaacaagattataggaccatttgcttgccattggtttatttactctattttgagacccacctagcccaggctaacctcagacatgctatgaaggcaatgttacccttgaactcatgatcttcttgcctggagtttccaggttgtaagaatctagaattgtgtcaccatcccccaactcttgtcacatttgaaatgacataaaattcacctccaactccctggcttttatctccttttgcaaaaaaaaattatttatcaagaccttgggtagtgcacatagacaaaactgaaacattgatccccccacccccaactcccaggggaatgagtgcattcgaggctaaccttgtaccctgtatgagactatatctaagaggtggattcaattctaagctgagctttgtcttttttaaggttggtggacccagggagtgtaggggacaaataaccataaggccttcttcttcgctcttgtttctggctttgggctactgatggaataggggttggatctgcttcctgttgctgggatcacacacaggctctaagcaacttggaggagggaaggtctctttggcttacaggtcaccatccatcattgagtgaagccagggcaggacctggaggcaggaactgaagcagaggccatggaggagccctgtttgctggctttctgacacatgcttagctagtgtcttatacagcacaggctcacctgcccaaggacagtgggctgcccttgccctgacaattatccatcaaaccaatccacacagacagggccacaggcaattctgatctgggcaactcccagattgagagtcctttacttgacttagttggagctatgttgacagtggagataacgaggacaaatggccagcattgctgctgctgcttggggagaacccaacaaaattgttgggcacagaagtcaggggtggagtagagaggagagatgtgggtatcaagctgttgggtataccccaccaatccccacccttccccttcactcttctctctgccctcagtcacgtgatgggtgaacttggctttagcctcctgtctgtagggctagtgaaaaacagtcactgtttctttcttccaaaattaaatattgcacataatcaatgctcagatattataggtaatatgtgctattatcaaaataccttcttggcaggaactccagggaaagctttttgaccaactcccagaaaggaacaaaccaaggctggcaattctctagtgggaccaatcagagagtgaccagcagagggtagtaagtttgcgtcctgcagacacagggccttctttgggaacaccttggaaggttcaggtttcctttgccaatccccatagcaccctctgaagatctccaacaacagtaactgtctgatcctcttaccttgtctccacttcctctcactctcagatctcagagttctcacaaccacaaaggagccaccgaagggtacactcagaatgggctcctgctgtcaggatgcagaacctgtttttttcctgctatcacatagctgctgtctgtttcctctcacaacacagcacagatataattgtgagagacataaggccagcactccacacagaagcatgctgcctgaccagtcatgtgcattcttacagtgcgagagtagactggagggctggagagaagactgctgttagatggactccattgtaaccttgaccctgatgaagatggagtggatgcagaagcacccttgtgggtgtatgagtgtgtgtgtgtgtgtgtgtgtgtgtgtgtgtgtgagagagagagagagagagagagagagagagagagacagagagacagagagagagacagagacagagacagagagacagagacagagtctcaccatgtagccctggctggaattcctcatgcagaccatgtagaccttgatttgcataaacctacctgattgtgtcccagtagtgcagggattaaaggtgtgagccatcattcctggactttgagaaagcagtttgggacagggaagtaactaaaatatataggtgttttttcaaaataaaacttaaggagcagccactggtcatgggtgggtcgtcgggacagccctgggcatgacttcagagactatgggcaggtctgtgataagcagcattagataagagctagacagaggcaaagttgagtggagatgtcacagagaggtcacagagcagggcaggttggagaggaaagaggtacagcctagtgggtgagccttagtgagagctgagagtgaaggtggaaagaaacagacatcaaatgtgatgtccaagttccagcacacttgtggctgtgcatggtagcatcaaagatcccaatgaaatactgagtttagagtggttgacatggatatcctggatactgatggagtgatatccagtgtgagtctggagttctacactgggactgtcagggctaaataaggactaaagaggtgaccttgagagacccttgtctaggatgtttccagaggatatggggaagaggatactaggaagacgatgtagaaagtaaccttttggctcctagggtggggaatgacaagtaagacagccctgcaggccaggggaggagagggtacatggtggtgctggcacaggacacagaagccacagagcccagcatgccaagagagcagttcccgctgtgtcaatgcaggtttgtctctgaggctggtgaatggcagtgaccgctgtcagggccgggtggaggtcctgtaccaaggctcctggggcaccgtgtgtgatgacagctgggacacccaggatgcagatgtcgtctgtcaacagctcggctgtggccattctgtgtcagcaccaggaggggcccattttggagagggctcagggaacattctcttgggagctgtgcactgctcaggatgggagtcctacctgtccagctgtcaacatgacgggtggtacaaccatgactgtggccacagggaagacgccggagttgtatgctcaggtagtgttgttgtgacctctagatgttgcactatatgcctaggcaacattgtgattgtgtgtgtgcacacatgtctgcctgtgtgtgcatgtgtgtgtatgcatgtactcacacagcttgagtgtgcttctgctatgagtcataccttatttaatgtcagaggctctatatcgcagtctctgttcatagatgatgacattgagtgctgagaagtcccaaactgggaggtggtgaagacagatttttagcttctgtctcatcagagctcactgacaccatcactcagtgatgactgggaccaagattatccttgaccctgaagaggataaggcgactgctggtccttaccacctaattgtataaagcaaacgcaaagcaatgagtggcccatatgtcctctctattggagattacatgataaacagaaatacaccatcttgagggcgacaaattctccctaatcctaatcctaattgattatatgatgctggtatccattcaaataaaggcagcttttaatctacaaagaaggcacccagggttgcagtccattgtatgtagccaagaagatttctagttcaaccactggtaggcagtttttatatcctggactgtgcgcatgtcacaggaaacaaagagtgaccgagtggatcacagcccacctgagaatggcacttattctcaggaccatggtcctgccagcagccacactgtgagaggctctatctgcccttccagaataatccctggaagtcacctcttttgttagttagagccactttctcaggattgtttcagcaatggcaaatgtttataatgagaggttatgtctgggttcctcaaggtaggaccaacacccagtgaactctttctcattctgcagaagtgtcctatacagctgaacaaagcacagaaggtaagttgtagtaggttgtatccctgtggcctattgtccccagaacccccagactcacctcctatcagaagatgggcagaaggaagagcatgtggagtccttagcaaccagggaaatttcccagtaaggtcaggcctatagcggcgtatatgccatggattatggccctgagttgtgcaggttggggaggatcagccagaggaggcaccttcaagggtcaccaaggacttcttttttgtagggattccattgaccagtctcagtgccccgaggtccccatgtttcatccacaccttggccagtctagggagcagaatttataacttcagtgcctggagaggaaatcaaaactctgcttagccaatgcccttgtcatttcctttcatctaaggccttataaagctactctggatgcctgaatcaccaacaagggacattaaatatccggttccatctctttgagttcctccaatgagtggtgttggtggcacatcagtacagtttagacgctgatggcctgggctttgggaaagaaaatccctttcttctctccttggcattcttttgatcctaggacactgcaagaactgtttccatagcagtgtctctggccagcccagggtttgtagggaatccaattggcccagtgtcaggcatcacttttccttaggaatatgaggtgtcccaaagatgaggctggctttactctcactaaagccatattccttcccaagattccacccagtttatatcaggagctgctgtgtaggggagaggtcaattctttctgtatcctgagacctttgaaggttatgcagagctggttgctgggtgccagtgggttaatgtcttgatatcatcactccaatccccagtaccaagtatactcttgaaggcactgtgtctgagagccagggctcttttaaagtaatttaaacatatgtttgaaatttgtctctcatttaaagaggacagattagagtaatttccaaaacagtaaaaaaaatgagcatgtccacacacacatatacacaaccacacacacatacataacacacacaacagcacatagacaacacacacacacacagctgagagtgtaggatgacatacaatattctaccactcatgatgctgagctagtaggttgttgagtttcagtgtagcctagggtacatgaggcagtcatgtgatccaggacagtaggggacaggcagctcattcaggtttataattttgtattaggcctgaaagcaattctaatgtaaactgtcaaccatgtgtatgtaagcagctgttgagagcctttgccatgcactcttttgacggtaggatcatctttaagcccctttggtctattttagaccaacctgctctgccttctcatttactgctgacaggtatggctcaaggtagagagtaatgtgtgcaggtccagtgtgtgaggagttgggaggggtttgcaatctctctctccttgaaatagtcttgattctacagtacacggccctccaagtacctccaagccataggtacaaggtagagtaagtttcttgtcactattcaaggcagattcaacctatgccaacacagtttgcagaaacttattcacccgggtgaccaacttggtcctcatgtctaggacagaagtagagagcattgtagtgaaggttcacaggcaaagtgagagggtacagatctttacaggtcagtgtggccaggatgcagcagcaggagctgttcatgtcctatattgctttaaagttcatgagtgagctgccaccaagtgtacaagtgagacatgaccaacaatggagaaaccaccatgtctttccaggaacagattctggtttggccgtgaggctggtgaatggaggagacaggtgtcagggtcgagtggagatcctttaccagggttcctggggcactgtgtgtgacgacagctgggacctcaatgatgccaacgtggtgtgcaggcagctgggctgtggcttggccgtgtctgccccgggaaatgccaggtttggacagggctcagggcccattgtcatggatgacgtggcctgtggaggctatgaggactatctgtggagatgttcccaccgaggctggctctctcataactgtggacaccaggaagatgctggagtcatctgttcaggtaagacccagtgatcattacatctgcctgacagcaatgagctcaggtcactatgaatgctgtcagaactccattctggccacttcattggtccttgtaaggactggtgactatccaggacaatgcctttctcagtcattgtcctgcacaaggctctcagtctctagtgagtgtagagtttctgtgagagaggtaagcaatggaaatgcaatgtcaagtcttacccatgagtaaggtcaaaggtcagcatacatgtgctcttgcaaaaggtaatccagctttggtctggagtattggaatcctgtttctatgctgaatttgaactatcagaagggcaaagctgtaccgaatagcaaggtgagcaaattcactcttctttttccatagtgttccccagaatccttcccagaaagtcttgctgaaggactcttctggggaagcttcagtaactccttcagtccctcagggtctgcagagtcctgggttctcacagatcgggttcaatagctcaatcatgataacacactgggaatgttattcatgaatgttggtggtgtggacatggcagttaggtcctatgtagtatgttcatgaggtaaattgacaaatatttggacatggatatagcagagaggattgctagagtcctacagaatcctttaactgtgaaggtggatctttgaatcttcaacaagtcaaggctgactgtgttgttggcccattacccacacagtaacatagaaccctggtttcctgtcatgtctgcaggtggtcatggttttttacttgctattattaaactgcataaaaccgggtccacctggggcatggagtacatggtagaagtacatgagtagctgtattactcatggtctgctttggcaacccccaccttggagcatcagcctcagctacatctgtagaaatgctgagtctgtcttccctgggagtccaggtgaaattcaggtgctttctatcaagtgtccttctatttctcaaagatgtctgtgcctccccttgctcaggtcaatgtcgacagcttggagtcccctcttctcctgttcatttcagggtcatgctttttcttctgacactagggaattattgataagacacacattgctcactccctctagttttcaccaaatatgttacctgggtcatcagctttgctctttgcacattcatggctgacacaacatgtctggtatgttttatacacacatcactgggcatcatagaccccactgctgcatgctactcagaatggatggcctgaggctttgcatggtgctaacctcaattgggcgggctggtacctcagagtaccacactgtgtcctgatgctcttagagtagcttcctctgcatctggacatctgaatgtttcaattcctcatgttctttcctgttttctacattgattatcttactgataaataagtttatcagtatattagtatatgtataacccaggctgctgtccttgagctatgaattccccatcttcatttcccagtgctgggattacttcaatgagccctggtacccagcatacatcctggtttcatttcttcttatacagggtactgcagttcactcagtctaccctagtgtgcttgccataaccatgttccaacaccaccccctatagcctcaggcagctcactgcagatgctatggtgtcctggagcaggtcgcctttgtcctgtccctcaccagactccacttggtttgttctaactgttctttctaaattctaggggcactgtcaccttcagaagtccctacctggtttatacttttaaagacacacacacacacacacacacacacacacacacacacacacacactcagacagaaacagacaaacgatacacacatacatatacttggatggacagagacacacaaacatacatagtgataaatacacagacacagaaacacacacatatagtctcacatgcaaaggaaatgggttccaagaacttctttgcttctacccaaagcatacgacactcaagtcttttatcaactggtgtgtgacccacagacgccctcctgtgtccttccaggcatcccagatctagtccctcatagaatatcagccttgtgtgactcagtgctgttccacattgctcatgtgaatatggcaagagggaaaggttttcatgctcaataatacaggggcaggctgcttttctttaatatttatgatttaccacttatgtaatttgtgaagaagcctatgggtacagagggccaactggaatattacaaagattatcttgctcttttgaccaatgaaaaaggtatttaagttttgtctttggggtgaagcccacaaagaataggtgtagaaactatccctttagaaaggatttttgccaggatccttgtggtcgaaacacacactctgaatttgtttttattcctttcacagattctcaaacaagcagtcccacacctggtaagtacattgaaaatatagacttgtatcagtgtataacttcctcctatattgtgatagaggctggcccactatatagtaataaatgacagtaggatgaaatatatagtgtcccatctagacagtaatgacaatagaaactcctgccagctatagcaaaaaaggccctgtgctaagacagttatagtcttcaattttatgttgccctggtctcaattttcagttgatgttagaatcgagtagaatatctggatgtaggtcttggattcagtccttctgcaagaagctctgactaggagacatgaagaagactcagggatctgtggtcggcagatgatatgtaaggatatcatgccctcttcacacttgggccaactctggcttgtcccaagccgaatcagaatttaatgttagcaaggttgtagggccacttgtttgctattggtttgtttatttacttctttttgagacccacagagcccaggctaacttcagacttgctgatttggcaagggtccccttgaactcctgatcctcttgtctgtagtttccgagttctaggattccaaaatgttgccaccatgtccagctgttttttttttttttttaccacattggacatgatgtgtagttcacctctatgcctagaccttgggcatagccaaactgaaacactgattcccacccccacccccaacctctcagaaggcatggctgtgtagtgcagttcaggctaagtgtatcttgtatgagaccatctctacatggtggatccaattctaaactaagctttttctttattaaggctggtggaatccaggagggacaaataacggtaaggccatctccttcactcttgtttctgtctttgggttactgatagaatggggagagattctgagtcctgttgctgtgatcacacactggccctaagcaacttggaggaggacaggtccgttgggcttacaggtcaccacccatcactgagtgaagccaaggccagttcctgaggttccagctggaggcaggaactgaagcagaggccttggagcagcccagcttactgactttctggctcatgcttagctagcgtcttatacagcgcaggctcacattgcccaaggacaatgggctggatttctctgacagttatcgatcaagaaaatccatacagacagggctatagtcaatcctgttctgggtaactcccagattgagagacctgtacatgacttagctggggttctgttgacaatggagataacgaggacaaatggccagcgctgctgctgctgctgctgctgctgctgtggctcctgctgctgctgttgctgttgctcctgctgctgctggtggtagtattcctgctggtgctagtgatgcatctgctgtctggaggaatccaactgaatcggtggacacagaaatcagggatggagtagagatgagagacatgggtgtcacactgctgggtagaccctaccaagcccctcctttcctcttcattcttctctctgctcttcagttatgtgatggatgaaattaactttagcctcctgtctgtaggactaatgaaaaacagtcactgattcttccttccaaaattaaaaatattgcacatcatcaatgctcagctatcacaggtagtatgtactttaacagaacatacacatgtcggggaatccagaaggaaggtttttgaccaacttctagaaagggccaaaccaaggccggcagttctctagggggaaacaatcgagagtgaccagcagagggcagtaacattgtgtcctgcagacctgtgccttctttgggaacaccttggaagtttcaggtgtcctttgccaatccccatagcaccctctgaagatctgcaacaacagcaactgtctgatcctcttaccttgtctccacttcctctcactctcagaccacagagttctcacaacaacagaggagccactgaagggtacacccaggattggctcctcctgtcaggaggctgaacctgttctttcctgctaccacacagctgctgtctgtttcctctcacaacacagcacagattcatgtgtgagagacttagagccagccctccacacagaagcctgctgcctgcccagtcatgtgcatccttacagtgggagagcaggctggagggctggagagaagactgctgttagacggactccattgtaaccttgaccctgatgaagatggagtggatgcagaagcactgtgtgtgtgtgtatgtgtgagagagagagagacagagacagagacagagagagcatatgtgtgtgtgtgtgtgtgtgtgtgtgtgtgtgtgtgtgcatgtgttcccatatcaattgctggtttaaccagataaacaatgtcacaggaaacagtgtgactgtggtgatcaccacccacctgagaatgacccttaaaaggaacatggccctgccaacagccacacttgactatttattctgtccttccacagtaatctctggaagtcacctcttttgctagttggatccactatctcaggactgttttattgataacaaatgtttataatgagaggttctgcttgaactacagagatatccaaatgacttttgaatactttgtgcccacattggggctgttggtgaaccggatagttttttggaatgaatagacaaagaaggagagtgaggccagaagatgctcatggtgacatgtcagtagcaagttaaagaaggatcagtgtcagatcccacaatgcatttcagcatttctagtgatgaaaggcctttagcacgggagactgcagctcctgcctctgggttcctcaagagaagaccaacacccaatgaactcttcctttctcattttgcagatgtgttctatccaactgaacaaaccacagcaggtaagttgttctatgttgtatccctgcggcctattgtccccagaacccataagttcacctctgacccagaagatgggcagaaggaagagcatgtggagtccttagctcccagttaaatttcccagtaaggtcaagcctatagcggcatatataccatggattatggctctgagttgtggaggttggggaggatcagccagaggaggcaccttcaagggtcaccaaggaggtcttgtttgtagggattccattgaccagtctcagtgcccaaggtccccatgtttcatccacaccttggccagtgtagggagcagaattactgacttcagtgcctggagaggaagtcaaaactgcttagctaatgccctggtcatttcctttcgtctaagcccctataaaactactgtggatgtctcaggccaaaaccttgaacatgaaatatcctgttccatctctgagttcctccaatgagcggtgttggtggcacatcagtacagtttagactctgaaggcctgggctttgggaaagaaaagccctttcttttctccttggcattttttgatcctaggacacagcaagaactgtttccatagcagtgcctctggccagcccagggtttgtagggaatccaattggcccagtgtcaggcatcacttttcctcaggcatgtgaggtgtcccaaggatgaggctggctttactctcactaaagtcatattccttcccaatattccactctgtttatatcaggagctgctgtgtgggtagaggtcagttctttctgtatcctgagacctttgaaggttacgcagaagctggttgcttggtgccagttgaataataccttcatatcttcactccaatccctagcaccaagtctactcttgaaggcactctgtccaagagctagggctcttttaaagtaacttaaccatatgtttgaagtttctgtctcatttaaaagtggcagattagattcatttcaaaaccagtaaaaaaacaatgagaaaggtctcacacacacatgcacatacacacacacacacacacacacactgaatcacacacatactctattgtactactcaggatgctgagttagtatgatcttgagtttcactctagctttaggtacatctagacatacagacctaaaataaaaaaacaacattcacatacaaaattgaggcaaacagtcattccacacatctgctagtgcataatatattgatcttccagccagtgtaatttaaaaagaattaattagatgtgtacgtgtgagaaaaagttttgtacttgttcccaagatctcagtgcaagtccaatgtaggcaagttagagctagggtctatgggatatccctttctataaaaatagactttagacttggaggactgaagactacatagatttctcactagtgtcaagtcaaacagcattgcccagaacagaccctgaatcacatcccatcagcaggttgactgcacttgcatgtcttggtttttctccatggagacttaacactatgtttctcatttttcttcctcatctgtatatgtacatacagagcagacaaccattcctgattatacaccaataggtaagaaaagattgtataaatctcgcactgtaggtcacaatgctgattgtattcacagcatcgacttccttgtaacacttaaggggatagggtggtgggtgtgtgctgtgaagacttagagaagctgtggatgcctcctgatcctgaggacgtccctcctgtcaaccctgtgtctgtatttctctgcctgtggagggggtcagtcagtctgctgtcgcttgacctttccctctccctgtgtgtagaagtcagtattggagtgggttccaaaactcccctgtctctacatttagtatgatgtcagaagagactctggggttagagtgattaatataagacaaccttccagagaggttgggtgacaaaatgagactgatgacctcttatgagaggccattctgattcacttcaagtgggtgcccagtcgaggaatatgtcttagtgcaaaccctctacagatgtttgtcgtgtttaaacatgctgggttgaactttgtcattaatgaaaagttcacatcagtggtcttagtgaccagcagtgacaaagcttggggaccttatttcaaacagagaggaaggtcttggagtgtgtcatgtggtcctagggcagtgtagaccagcacctttttcagattaataattttatattgggcctgatagcatttccatgtaaactctccatcttgtgtgtgtaagcatctgttgagagccttttccagggacccatgatcttctgttgtgggaggaagctatcgttctgcccctttggtctctcatagagactacctgctctaccttctcttttactgctctttttctctgttcaggatagagatgaatgtgcgcatgtgcagtgtgtgtgtgtgtgaggagttgggagggctctgcatcctctctctccttgatcctacagtgcatggtactgcaaggcctaatgaacaaggaagcgtaggtagacaaggtatcttgtcatcatccagggcagattcaacccatgccaacacagtgtgtagaaacctaggcatcctggtgaccaacttggtcctcatgtctaggacagaagtagtgacattgtagtgagggcacaggggccattgtcaaagtgagagggtacaggtctttttttttttattgggtatttatttcatttacatttccaatgctatcccaaaagtccaccacgtgctcccccctccactcccacttcttggtcctggcgttcccctgtactgaggcatataaactttgcacaaccaatgggcctctctttccactgatggccgactaggccatcttgtgattcatatgcagctagagacatgagctccggggggtgggggggaggtactggttagttcataatgttgttccacctatagggttgcagatccctttagctccttgggtactttctctagctcctccattgggggccttgtgatccatccaatagctggctgtgagcatccacttctgtgtttgctaggccctggcatagtctcacaagggacagctatatctgggttctttcagcaaaaccttgctagtgtatgcaatgggggaggggtacaggtctttacaagacagtgtggtcaggatgcagcagcaggaggtgttcatatcccatattgcttttaagttcatgagtcagtgtcccacaaagtgtacaaggtccatcatccacacgggaccaacaatggagaaaccaccatgtctttccaggaacagattctggtttggccgtgaggctggtgaacggaggagacaggtgtcagggtcgagtggagatcctttaccagggttcctggggcactgtgtgtgatgacagctgggacgtcagtgatgccaacgtggtgtgcagacagctgggctgtggctgggccgtgtctgccccaggaaatgcctactttggacagggccaagggcccattgtcctggatgacgtggcctgtggaggctatgagaactatctgtggagctgctctcaccaaggctggctctctcataactgtggacaccaggaagatgctggagtcatctgttcaggtaagacccagtgatcattacatctgcctgacagcaatgagctcaggtcactatgaatgctgttagaactccattctggcctattcatcattggtccttgtaaggattggtgactatccaggataatgcccttctcagtcattgtcctgcacaaggctctcagtctctagtgagtgtagagtatatgtgagagaggtaagcaatggaaatgcaatgtcaagtcctacccatgtgaaaggtcaaaggtcagcatacatgtgctcttgcaaggggtaatccagctttggtctggagtattggaatcctgtttctatgttgaatttggactatcagaaggacaaagctgtacagcatagcgagctgagcaaattcactgttctttttccagtgtttcacagaatccttctcagaaagtcctgcagaaggactcttctggggaagcttcagtaactccttcagttcctcaggctctgcatagttctgggttctcacagattctggttcaatacctcagtcatgataacacactagtaatattactcatgaacgttggggtgtggaaatggcagggaggtcctatgtagtatgtttatgagataaatggacaagaaatatttgtgcatggatgtagcagggatgattgctagagtcctacagaatcctttaaccatgggggtggatctttgaatcttcaacaagtcaaggatgaatgtgcttttggcccactacccacacagtaacatagaaccctggtttcctgtcatgtctgcagggggtcatgactttcttacttgctattagtcccacctggggcacggagtacatggtagaagttcatgagtaactgtattactcatggtccactctggcagcacccaccctggaacttcagcctcagctacatctgtagaaatgctgagtctgtcttccctgtgtgtccaggtgaacttcaggtgctttctatcaagtgtcctattatttctcacagatgtctgtgcctccctcagcttgggtcactgtcaacagcttggagtcccctcttcacctgttcattgtagagtcatgctttttcttctgacactagggaattattataagacacacactcctcacccctctgagttttcaccaaattcattccctgggtcatggactttcttctttgcacattcatggctgacacgccctgtctagaaggttttatgcacacagcactgggcatcatagaccccactgctgcatgctactcaaaatggatggcctgaggctgcatggttctaaccccacgttgacaggctggcacctcagagccccacactttctcctggtgctcttagagtatcttcctctgtatctggacatctgaacatttcatttcctacatgttctttactattttctacgttgattatcttactgataagtttgtatgtgtatgtgtatgtgtatgtgtatatgtatatgctaacccaggctgctgactttgatctactatttctccagcttcatttccaaatgttggaattaccactgtgagatctggtgcacagcatgcatcctggtttcatttttcctctttattgttatacagggtactgtagttctcttggtctacaataatgtgcttgccacattccccattccaacagcctcctttgtagacacagtcaggtcactgcagatgccataatgtcctggagtatatctactttgtcttgtccttaaccagccaccacttggtttgttctaactgttctttctaaagattaaggacatgtgcccttcagaagtccctccctgattaatacattttatgacacaacatacacacacacacattgacactcagacattaacacatataatccatatatacatacaaacatatttgcatggacagacacacgaacatacaaagagttacatacatggatacaaaaaccatagacatatattctcacatgcaaatatgcacatcgtagacagatacagcacagaaacacattgttatacacaacccctcccccacaaaggcacagagacacataaaatcccagaagtacacacagagacagatgtggacactgacacacaggcacacacatgtacattctattggttgtccatgcatacttacccataacatctccattagcacttgtcccttgttcagagctctctgttgaaccttcaggggcctagatatgctggattctctgcagggctgggagcactcattgctcctttcgttcctagcttggtacatgtaccaagagcctaacagggtgcctgactcaggagagtgtactgcagctcgcaggatggagggtggaactgtgagcatccaccctcatggctcctgagagccttcctgctgattccacagattatgcatatacaccaagacatattcatgcacacatgctacaccagcaacattaaccacatcctcaccattcctgagcaattacctcacagtaaccaaggaaatgggttccaagaacttctctgcttcttcttaaacctctgacgctcaagttttttatcaacttgtgtttgacccacagacaccctctgtcatccagtcatcccagatctggtccctcatagaatatcagccttgtgtgacttagtgctatatcacatcactcaagtgaggacagcaagagggaaaggttttaatattcaataatataggggcaggctattttccttcatatttttgatttatcacctgtgtagtttgtgaaggagcccatgctacaaagggccccgattggaatatttttctaagaacatcttgttcttttgacaaatcaaaaaggaacctagaaagttgagtttggagtttggggtggggcccaataagagagttgtaaaagctaccacttcagaaaggatttttgccaggattcttgtggtgaaacacacacactgaatttgcttttttctttgacagcttctcaatcaagcagtcccacacctggtaagtatattgaaaatatggacctgtatcagtgtataacttccccctatgttgtgagatgctgacacagtacatgtcaatgaattacactaggctgaaatatatagtgtctcatccagatagtaatgacaatagaaactcctgccagctataacatacagggaagcaattacagtcttcaattttgtgttactccagtctcaaatttcattatctgaagaagcaaatagaatatctgaatgtaggtcttggattcagtcctgctggaagaaattctgacaaggagacatgaagcagactcagggatctgtggttggcagatgatatgtaatgataacatgccctcttcacacttgggccaatcccagcttgtcccaagcctaaccagaatttaatgttagcaaggttacaggcccacttgtttgctattggtttgttcatttatttatgcattttttttgagatccatctagccaaggctaaccttggacttgctgtttttggcaacggtatccttgaactcctggtcttcctgtctgtaatttccaggttctaggattgcaagacgtccaatttgtttgtttgtttgtttgtttttaaatctcatcagacatgatgtgtatttcacacccagctcagatgttttttatcttttcttacaaaaaaaaatcatgtttatcaagaccttgggcagtgcacatacccaaagttgaaacactgatcccaccccaatttctcagaaggcatggctgtgcagtgaagttgaggctaactttgcaccctgtatgagaacatctctccacagtggatccaattctaatcttagctttttctttattaaggttggtggaatccaggagggacaaataatggtaaggccttcttctttgctctcgtctatggcgttgggctattaatgaaattggggttggatctgtttcctgttgctgtgatcacacactggccctaagcaacctggaggaagacaagtctatttggcttgcaggtcaccatccatcattgagtgaaaccaggacaggacctgtaggcaggaacttaagcagaggccatggaggatccctgttacctggctttctgactcatgtttagctagtgtttttacacagcacgggctcacctgcctaaagatatggggctcaacttgtcctgaccattatcaatcaaagaagtccatacagacagctccataggcaattctgatgagggcgactcccagattgtgagtcctgtacatacttagctggagttctgttgacagtggagataacgaggacaactggccagcattgctgctgctgctgctgtagctgctgctgtaggtgctgctgctgttgctcctgctgctcctgctgctcctgctgctcctgctgctatctggtggaatttaatgggattgttgggcacaaaagtcagggatggagtaggatgagagacatgggtgtcacactgctgggcagaccctaccaatctccacccttcatcttcattcttctctctgccctcagtcatgtgatagatgaagttagtttcagcctcctgtcagagggctagtagaatacagtcattgaatcttcctcccaaaattaaaaatattgcacatcattaatgctcacctattacaggtagtatgtgctatcatcaggatatgttcctggcagggaatccaggggaagcttttgactatattccagaaaggccaaaccaaggcaggtagttctccaggatgatcattcagagagtggccagcagagggcagtaagattgtttcctgcagacccagagctttctttgggaatgccttggaaggctcagttggcctttgcaaatcctcatagcaccctctgaagatcaccaacaacagcaactgtcttagcccctccctcaccttgcatccacttcctctcactctcagaccacagagttctcacaacaacagaggagccactgaagggtacacccaggattggctcctcctgtcaggaggctgaacctgttctttcctgctatcacacagctgctgtctgtttcctctcacaacacagcacagattcatgtgtgagagacttagggccagcactccacacagaagcctgctgcctgcccagtcatgtgcatccttacagtgggagagcaggctggagggctggagagaagactgctgttggttggactccattgtacccttgaccttgataaagatgggttggatgcagaagcaccttgtgtgtgtgtgtgtgtggtatgtgagtgtgagtgtgtgtgtgtgtgtattcccatgtagattgccagcttaaccattgataggtaggatgtactgttaacatgtcacagaaaacagtgtgattgtgatgatcacaccccaccggacaataggagaaggatcatggttctgccaatagacacactgtgactgtgtttattctgtccttctggaataatcgtgggaatttgtttcttttgcttgtcagagccactctctcagaaccgttttagtgatggcagaggttctgtttgaacaacagaaacatcctaataacttttggatactttgtgtctacaatggggccattggtgaaccgttctcttattttggggggtggtagtggtgaaatagaagcaaagatgaaggagagtgaggccaagagatgctcatgacatgtcagtagccagttaaagaaggatcagtgtcagatcccacactgcatttcagcatttctagtgatgaaaggcctttagcacgggagactgcagctcctgcccctgggttcctcaagagaagaccaacacccaatgaactcttcctttctcattttgcagatgtgttctacccaactgaacaaaccactgcaggtaagttgtgctatgttgtatccctgtggcctattgtccccagaatccccaggctcatctcctatcagaaaatgggcagaaggaagagcatgtggagtcctcagctcccagggaaatttcccagtaaggtcaggcctatagcggcgtatatgccatggattatggccctgagttgtgcaggttggggaggatcagtagaggaggcaccttcaagggtcaccaaggacttcttttttatagggattccattgaccattctcagtttcctgaggtccccatgtttcacccacaccttggccagtccagagagcaagccttgggcttcagtttctggagaggatatcaaaactctgcttagccaatgtcttgtcatttccctttttctgtggcctcataaagctattgtggatgcctgaatccccaacctgggacatgaaagattctgttttatctctctgagttcctctaatgagggttgtttgtggcacaccagtgtagtttagactctgatggcctggggtttgggaaagaaaatctttcttttttccttgaaatttttatcctagaacacagcaaggactgtttccatagtggtgcctctggtcagcacagagtttgcagggaatccaattgttccagtgtcaggcatcactttcccttatgcatgtgaggagtcccaaggttgaggctggctttactctcactaaagccatattccatcccaagattccacccagattatatcaggagctgctgtgtggggagaggtcaattctttctgtatcctgagacctttgaaggttatgcagaggctggttgcttggtgccagtgggttaatgtcttgatatcatcactccaattcccagcaccaagtctactcttgaaggcactgtgtctgagagccagggctcttttaaagtaatttaaacatatgttttaggtttgtgtgtcatttaaaaaggacagattagagtaatttcaaaacagtaaaaaaaaacaatgagcaggtccacacacacatatacacaaccacacacacatacataacacacacaactgcacatagataacacatacacacacagctgtgagtgtaggaagacatacaatattctaccactcatgatgctgagctagtaggttgttgagtttcagtctagcctagggtacatgaggcagtcatgtgatccaggacagtaggggacagtcagctcattcaggtttataattttgtattaggcctgaaagcaattctaatgtaaactgtcaaccatgtgtatgtaagcagctgttgagagcctttgccatgcactcttttgacggtaggatcatctttaagcccctttggtctattttagaccaaccagctctgccttctcatttactgctgacaggtatggatcaaggtagagagtaatgtgtgcaggtccagtgtgtgaggagttgggaggagtttgcaaccactctctccttgaaatagtcttgattctacagtacacggccctccaagccattggtacaaggtagagtaagtttcttgtcaccattcaaggcagattcaaactatgccaacacagtttgcagaaacctattcacccaggtgaccaacttggtcctcatgtctaggacagaagtagagagcattgtagtgagggttcacaggcaaagtgagagggtacagatctttacaggacagtgtggccaggatgcagcagcaggagctgttcatgtcccatattgctttaaagttcataagtgagcagcctacaaagtgtacaagtgagacatgaccaacaatggagaaaccaccatgtctttccaggaacagattctggtttggctgtgaggctggtgaacggaggagacaggtgtcagggtcgagtggagatcctttaccagggttcctggggcactgtatgtgacgacagctgggacaccaatgatgccaacgtggtgtgcaggcagctgggctgtggctgggccgtgtctgccccaggaaatgcctactttggaccgggctctggatctattgttctggatgacgtggcctgtacaggacacgaggactatctgtggagatgttcccaccgaggctggctctctcataactgtggacaccatgaggatgctggagtcatctgttcaggtaagacccagtgatcattacatctgcctgacagcaatgagctcaggtcactatgaatgctgtcagaactccaccctggcctattcattggtccttgtaaggtttggtgaatatcccagacaatgcccctcttagccatggtcctccacaaggctcttagtctctagtgagtctagactttatgtgagagagagaaggcatggaaatgtagtgtcaagtcccacacttgagaaaggaccaggatcagcatacatgtgctcttgcaagaaatcaaccagccttggtctggagtattggaatcctgtttctatgttgaatttggactatcagaagggcaaagctgtacagcatagtgagctgagcatattcactgttctttttccagtgtttcacagaatccttctcagaaagtcttgcagaaggactcttctgggcaagcttcagtaactttcttcagtccctcaggctctgcagagttctgggttctcacagatcaggttcaatagctcaatggtgataaaacagtggaaatgttactcatgaatataggggtgtgggcatggcagggaggtcctatgcattatgttcatgagataaatggacaggaaatatttgggcatggatgtagcatggaggattgctagagtcctacagaatcctttaaccatgaggatggatctttgaatcttcaacaagtcaagacagagtgtgttattggcccattacccacacagtaacatagaaccctggtttcctgtcatgtctgcaggtggtcatgattttttacttgctattattaaactgcataaaaccgggtcccacctggggcaaggagtacatggcagaaattcgtgagtaactgtattattcatggtctgctctggcagcaccagccctggaacatcagcctcagctgcatctgtagaaacgctgagtctgtcttctcttgatgtccaggtgaacttctagggactttctatgcactctccttttatttctcacagatgtctgtgcctccccagctcaggtcaatgtcaacagcttggattcccctcttctcctattcattgtagagtcatgctttttattctggtactaaggcattactgataagacatacactcctcaaccactctgaattttcatcaaattcatacactgggttatggactttcctctttgcacattaacggctggtccggcctgtctagtaggttttatgcacacagcactgggcatcatagaacccactgctgcatgctagtcaaaatggatggcctgaggcttgcatggtgctaacccaagtgggcaggctggcacctcagagagccacactgtctcctggtgctctttgtgtatcttcctctgcattgagacatctgaatgttttagttcctacacgttctttcctgttttctacattgattatcttactgatatataaatgtatatgtatacatgtaagtatatgtttatgtataacataaaccaggctgctcactttgacctagtaattctccagcctcatttccaaatgctgggatttctactctaatcctcagtgcccagcatacattttggttacagttcttctccttattttacaggatattttagttcactcagtctacaatactttgcttgccacattccccattccaatagcgccctctgtacacgcagtctgctcactgctgatactatgatgtcctggagcaggtctactttgtcctgtgtttaaccagccaccatttggtttgttctaactgttctctaaagatcaaggacactgtgccttttagaggtccctccctgatttacaccttttaagacatacaaacacatgcacacaattacacataaacacacacacacacattgacactcagacattaacacatataatccatatatacatacatacacatttgcatggacagacacacaaacatacaaagagttacatacatggaccaaaaaccatagtcatatatatctcacatgcaaatatgtacatcatagacagatacaacacagatacacattgttatacaaactccccacacacagagacacagagacatacacaatcccagaacacacagagacagatgtggacactgacacacagacacagacatgtacattctatgtcattgagtgtccgtgtatattctcccacaacacctccagtagcacttgtcccttgttcaaaactctctgttgaaccttcaggggcctagatatgctggattctctgcagggctggaagctctcattgctcctttcgttcctagcttgggacatgtaccaagagcctaacagggtgcctgactcaggagagtgtactgcagctcacaggatggagggtggaactgtgaccatcctccctcatggctcctgggagccttcctgctgattccacagattatgcatattcataaagacatatttatgcacacatgatacaccagcaacattaaccacacctcaccattcctgagagatcatctcttagtttccaaggaaatgggttacagagactgctttgcttctacccaaagcatctgacactcaagtctttatcagttggtgtgtgacccatagacacctttctgtgtcctgccagtcatcccagatctagtccctcatcgattatcagccttgtgtgactcagtggtatatcacatcgctcacgtgaggacggcaagagggaaagattttcatgctcagtaatacagagtcaggctgttttccttcatcgttttgattcaccccctgtgtaattggtgtagacgcccatgatacaaatgacctggactagaatatttctaagacgatcttgctcttttgaccaatcaaaaaggaacctagaaagttgagtttggtctttggggtggggcccacataggagagttgtaaaagctaccacttcagaaaggatttttgccaggattcttgtggatgaaatgcacactctgaatttgtttttatttttttgatagcttctcaatcaagcagtcccacacctggtaagtacattgcaaatatggacctgtatcagtgtataacttccccctatgttgtgattgatcctgacacactccatgctaataaatgacactcggctggaattcatagtgtcccatctagacagtaacgacaacagaaactcctgccagcgctagtataaagcgtcctgtggtaagacaattacagtcttcaattttatgttttcctgcctcaaatttcagttgatgttagaatcaaatagaatatctgaatgcaggtctttgattcagtccttccgcaagtagctctaactgtgagacatgaatcagactcagggatctgtgattggtaggtgatatgtaaggttatcatgccctcttcacacattggccaacgcctgcttgtcccaagactaatcaggatctaatattcacaaggttacagggccacttggttgctattggttggtttatgtactatttcttgagtctgacctcgctcaggctaaacttggccttgctgtttttggcaagggtccccctgaactcctgatcatcttttctgtagtttcctttgtgtaatttatttatttattagatattttctatatatacatttcaaatgctatcccaaaagttccctataccctccctccaccttgctcccctactcacccacacctgcttcatggccctggcattcccctgtactggggcatataaagtttgcaataccaaggggcctcccttcccaatgatggttgactaggccatcttctgctacatatgcagctttttctgtagtttccaggttctaggattccaagattttgctaccatgtccagctgttttaatcacattggacatgaggtgtattttacctctatcccagatgttttttttttctcttcttacaaaacaataaatttgctgctgctggtggtggtggtggtggtagtgatcttgctggttctcccgctgctgctgctgtctggtggaatccagtggaatcataaggcacagaaatcatggttgaggtagagatgagagacatgggtgtcacactgctgggcagacctgaccaatccccagacttccccttcattcttctctctgccctcagtcatgtgatgggtgaaataagcttcagcctcctgtcagaaggcagcctccagtcagccttcctgctagtggaagacagtcacttactaatccttccaaaattaaaaatattgcatatcatgaatgctcagctatcacaggtagtatgtacttttaacagaacacatacatgtcggggaatccagaggaagattttgaccaacttctagaaaggaacaaaccaagccttgcagttctctagggggaaccaatcagagagtgaccagcagagggcagtaagtttgtgtcctgcagacccagagccttctttgggaacaccttggaaggatcaggtggcctttgccaatcctcatagcaccctgtgaagatgtccaacaacagcaactgtgttcccatgtgaattgctggtttaaccattgatacatagagtttactgtgcacaagtcatagggaacatagtgtgactgtggagatccccgccctcctgagaatggcccttaaaaggaacatggccctgccggcagccacattgtgactgtgtttattctgacctcccacagtaatcactggaagtcgcttctcttgctagttggaggcagtttctcaggaggactcttttacctatggtaaatgttcacaatgagagcttctgtttgaactacagaattctccatgtgacttttggatactctgtgctgttggtgaaccagatagtttttcagatggaatagatacagagatgaagaagagtgaggccaagagatgctcatgacatgtcaggagccagttaaagaaggatcagtgtcagatcccacaatgcatttcagcatttctagtgatgaaagtctttagcacgggagactgcagctcctgcttctaggttctctaagagaagaccaacacccaatgaactcttcctttctcattttgcagatgtgttctacccaactgaccaaaccacagcaggtaagttgtgctatgttgtatccctgtggcctattgtccccagagcccataagcttacctctgacccagaagacgggcagaaggaagagcatgtgaagtcctcagctcccagggaaatttcccaataaggtcaggcctatattggaatatatgccatggattagggccccgaattgtggtgcttggtgaggatcagccataggaggcaccttcaagggtcactaaggaggtcttgttactagaggttctattgaccattctcagtgccctgaggttccgatgttttaccctgtaccttggcgaactcagggatcagagtctctgacttcagtccttggagaggaaataaaaactccgcttagctaatgcccttgtcttttcctttcctctaaggccttataaagctactctggattcctgaatccccaacctgggacattaaagatcctttctatctctctgagttcctccaatgagcggtgttggtggcacatcagtatagtttagactctgatggcctaggctttgggaaagaaaatctctttcttttttccttggcattttttgatcctaggacacagcaagaactgtttccatagcagtgcctctggccagcccagggtttgtagggaatccaattggctcagtgtcaggcatcactttttcttatgcatgtgaggagtcccaaggatgaggctggctttactctcactaaagccatattccatcccaagattctacctagtttatatcaggagctgctgtgtggggagaggtcaattctttctgtatcctgagacctttgagggttacgcagagctggttgcttggtgccagtggattaatgtcttgatatcatcactccaatccccagcaccaagtctactcttgaaggcattgtgtctgagagccagggctcttttagtaatttaaacatatgtttgaaatttgtctcacatttaaatgggacatattagaatcatttcctaaacaggaaaaaaaagagcatggtcaagcacacacaaacacagccacacacacatacacagctcaaccatacacacacacaacacacacaaccacacaaatacacaatacacatactcgcacacacctcctcatgtaagcacacatacagtattctacctctcatgatgctgagctagtaggatcttgagtttcagtctagcctaaggtgcatccagaggtactgaaccaaacaggctttccacacatatgctagtgaatattatattggtctaccagccagtgtaattctaaaagaagaattaattacatgtgtttgtgtgagaaacatttttgcactggttccctagagctcagtgcaagtcctacattggcaagttagagctagggtctatggcttaacactttctataaaaaaagaggttgagacttggagaactcaactttctctaaaagtagacttggagacttggaggactgaagactacacagatttctcactagtgtcaagtcaaacagcattgcccagaacagaccctgaatcacatcccatcagcaggttgactacacttgcatgtcttggtttttctcaatggagacttaacaccatgtttctcatttttcttcctcatctgtatatggacatacagagcagacaaccgttcctgattatacaccaataggtaagaaaagattgtatagatctcgcactgtaggtcacaatgctgattgtattcacagcatcgacttccttgtaacacttaagggcatagggtggtgggcgtgtgctgtgaagacttagaggagtggggatgcctcctgaccctgaggacgtccctcctgtcaaccctgtcactgtctgtatttctctgcctgtggaggggatcagtcagcctgctgtcccttgacctttccctctccctgtgtgtagaagtcagtatttgtgtgggttccaaaactccccggtctctacatttagtattatgtcagaagagactctggggttagagtgcttaatataagacaaccttccagagacttttggtgacaaaatgagactgatgacttttttgcgaggccattctgattcacttcaagtgggtgcccaattgagaaagctgtgtcttagtgcacactgtgtgcagatatttgtcctgttaaaactgttgggttgaactttgactttaatgaaaagttcacaccagggtcctagtgaccagcagtgacaaagcttggggtcctctagtgtggtctcattccagacagagagtgaggtggtggtggctgtcatgtcacccgagccattgggtccgagcagctccttcaggtttataattttatattgggtctgaaaggagttcttatataaaaatgaaactggtgtttgtgtgtgtgtgtgtgtgtgtgtgtgtgtgtgtgtgtgtgtgtgtgtgtgtgtcagcagctgttgagagcctttttccgggacccatgaacttctgttgtggcaggaagctatcctttgcccctttggtgtctcatataccaccttgctatgcatcgcctttactgctggcagatatggggcatggtggaggtgaatgtgtgcatgtacagtgtgtgtgtgtgaggagttgggagggctctgcatcctctctctccttgaaacccacttaatcctacagtgcatggtactccaaggcataatggcaaggtagagtaggtagacaaggtatcttgtcaccatccagggcagattcaacccatgccaacacagtgtgtagaaacataggcatcctggtgaccaacttggtcctcatgtctagaaaagatgtagtgacattgtagtgagggcacaggggccattgttaaagtgagagggtacagatctttacaggtcagtgtggccaggatgcagcagcaggagctgttcatgtcccgtattgctttaaagttcatgagtgagctgccaccaagtgtacaagtgagacatgaccaacaatggagaaaccaccatgtctttccaggaacagattctggtttggccgtgaggctggtgaacggaggagacaggtgtcagggtcgagtggagatcctttaccagggttcctggggcactgtgtgtgacgacagctgggacctcaatgatgccaacgtggtgtgcaggcagctgggctgtggcttggccgtgtctgccccaggaagtgccaggtttggacagggcacagggcccattgtcatggatgacgtggcctgtggaggctatgaggactatctgtggagatgttcccaccgaggctggctctctcataactgtggacaccatgaggatgctggagtcatctgttcaggtaagacccagtgatcattacatctgcttggctgcaatgagctcaggtcactatgaatgctgtcagaactccatcctggcctcttcattggtccttgtaaggattggtgaatattccggacaatgcccttctcagtcatggtcctgcccaaggctctcagtctctagtgaggcttgagtttatgtgagagagggaagccatagaaatgcagtgtcaagtcccacacttgagaaaggaccagggtcagcatacatgtgctcttgcaagaagaaaaccagccttggtttggagtattggaatcctgtttctatgttgaatttggactatcagaagggcgaagctgtatggcatagcgctctgagcaaattcagtgttctttttcaatgttccccagaatccttcccagaaagtcctgcagaaggactcttctgggcaagcttcagtaactccttcagtccctcaggctctgcagagttctgggttttcactgatcgggttcaatagctcaatggtgataaaacagtgggaatgttactcatgaatggagatcctgtgtagtatgttcatgaggtaaatggacaaaaaatatttgtgcatggatgtagcatggagaattttagagtcctacagaatcctttaaccatgagggtggatctttgaatcttcaagaagtcaagcctgagtgtgcttttggcccaatacccacacagtaacatagaaccctggtttcctgtcttgtatccaggctctcataattttcttacttgctattagtaaactgcctcaaaccaggtcccacctggggcacggagtacatggcagaaattcatgagtaactgtattattcatggtctgctctggcagcaccagccctggaacatcagcctcagctgcatctgtagaaacgctgagtctgtcttcccttgatgtccaggtgaactgctagggactttctgtccactgtccttctatttctcacagatgtctgtgcctcccgcagctcaggtcaatgtccacagcttggagtcccctcttctcctattcattatagagtcatgctttttcttctgacactagggaattattgataagacatacattcctcacccctcagatttttcaccaaattcattcgctgggtcatggactttcctctttcacattcatggctgacaagacctgtctggtatgttttatgctcacagcactgggcatcatagaccccactgctgcatgctactcaaaatgcatggcctgaggcttgcatggtgctaacccaagttggcaggctggcacctcagagtgccacaatgtctactggtgctctttgtgtatcttcctctgcatcgagacatctgaatgtttcagttcctccatgttctttcctgttttctacattgattatcttactgatatataagtgtacatgtatacatgtaagtatatgtttatgtataacataaaccaggctgctcacttttacctagtaattctccagcttcatttccaaatgctgggatttctactccaatcctcagtgcccagcatacactctggttacagttcttctccttatcttacaggatattttagttcactcagtctacaatactttgcttgccacattccccattccaatagcgccctctgtagacacagtctgctcactgcagatgctgtgatgtcctggagcaggtctactttgtcctgtgtttaaccagccaccatttgttttgttctaactgtctctaaagatcaaggacactgtgccttttagaggtccctccctgatttacaccttttaagacatacaaacacatgcacacacttacacataaacacacacacacattgacactcagacattaacacatataatccatatatatgtacatacacatttgcatggacagacacacaaacatacatagagttacatacatggaccaaaaaccatagtcatatatatctcacatgcaaatatgtacatcatagacagatacaacacagatacacattgttatacatgctctccacacagagagacacacacaatcccagaagttcacacagagcaagatgtggatactgatacacagacacacacatatacattctttgtcattgagtgtccatgtatattctcccacaacacctccagtagcacttgtcccttgttcaaagctctctgttgatgccttcaggagtctagatatgctggactctctacagggctgggagcactcattgctcctttcgttcctagcttgggacatgtatcaagagcctaacagggtgcctgactcaggagagtggagagtgtactgcagctcacaggatggaggatggaactgtgagcatccaccctcatggctcctgagagccttcctgctgatttcacagattatgcatatacaccaagacatattcacacacacatgctacaccagcaacattaaccacattcttcccattcctgagagatcatctcttagtttccaaaggaaatgggttccaagaacttctttgcttctacccaaagcatctgacactcaagtctttatcagttggtgtgtgacccatagacacctttctgtgtcctgccagtcatcccagatctagtccctcatcgattatcagccttgtgtgactcagtggtatatcacatcgctcatgtgaggacagcaagagggaaagattttcgaaagtttttcatgctcagtaatacagagtcaggctgttttccttcatcgttttgattcaccccctgtgtaattggtttagacgcccatgatacaaaggacctggactagaatatttctaagactaacttgctcttttgaccaatcaaaaaggaacctagaaagttgagtttggtctttggggtggggcccacataggagagttgtaaaagctaccacttcagaaaggatttttgccaggattcttgtggatgaaatgcacactctgaatttgtttttatttctttgacagcttctcaatcaagcagtcccacacctggtaagtacattgcaaatatggacctgtatcattgtataacttccccctatgttgtgattgatcctgacacactccatgctaataaatgacactcggctgaaattcatagtgtgccatctagacagtaacgacaacagaaactcctgccagcgctagtataaagcgtcctgtggtaagacaattacagtcttcaattttatgttttcctgcctcaaatttcagttgatgttagaatcgaatagaatatctgaatgcaggtctttgattcagtccttccgcaagtagctctaactgtgagacatgaatcagactcaggatctgtgattggcagatgatatgtaaggttatcatgccctcttcacacattggccaacgcctgcttgtcccaagactaatcaggatccaatattcacaaggttacagggccacttgtttgctattggttgatttatgtactatttcttgagtctgacctcgctcaggctaaccttggccttgctgtttttggcaagggtccccctgaactcctgatcatcttttctgtagtttcctttgtgtaatttatttatttattagatattttctttatatacatttcaaatgctatccctccaccctgctcccctacccacccactcctgcttcatggccctggcattcccctgtattggggcatataaagtttgcaataccaaggggcctcccttcccaatgattgttgactaggccatcttctgctacatatgcagctttttctgtagtccaggttctaggattccaagattttgctaccatgtccagctgttttaatcacattggacatgaggtgtattttacctccagcccagatgtttttttttttttttctcttcttacaaaacaataaatttgctgctggtggtggtggtggtagtgatcttgctggttctccagctgctgctgctgtctgatggaatccagtggaatcataaggcacagaaatcatggttgaggtagagatgagagacatgggtgtcacactgctgggcagacctgaccaatccctacccttccctgtcattcttctctctgccctcagtcatgtgatgggtgaaattagattcagactcctgtcagaagggctagtggaagacagtcactgactgtttgaactacagaattctccatgtgacttttggatactctgtgctgttggtgaaccagatagttttttagatggaatagatacagagatgaagaagagtgaggccaagagatgctcatgacatgtcagtagccagttaaagaaggatcagtgtcagatcccacaatgcatttcagcatttctagtgatgaaaggcttttagcacgggagactgcagctcctgcttctaggttctccaagagaagaccaacacccaatgaactcttcctttcttattttgcagatgtgttctacccaactgaccaaaccacagcaggtaagttgtatccctgtggcctattgtccccagaacccataagttcacctctgacccagaagatgggaggaaggcagagcatgtggagtccttagctcccagggaaatgtccccataaggtcaggcctatatgggtatatagaccatggattatggtcctgaattgtggtgactggggaggatcagacaaaggaggcaccttcaagggtcaccaaggaggtcttgttactagaggttctattgaccattctcagtgccctgaggttccgatgttttatcctacaccttggccaacccagggagcagagtctctgacttcagtccttggagaggaaatcaaaactctccttaaccgatgcccttgtcatttcctttcgtctaaggccttaaaaagctactctggatgcctgaatccccaatctgggacattaaagatcctgtttcatctttctgagttcctccaatgagcagtgttggtggcacatcagtacagtttagactcttatggcctgggctttgggaaagaaaagccatttcttttctcctgggcattttttgatcctaggacacagcaagaactgtttccatagcagtgcctctggccagcccagggtttgtagggaatccaattggcccagtgtcaggcatcacttttccttaggaatatgaggtatcccaaggatgaggctggctttactctcactaaagccatattccatcccaagattccacccagtttatatcaggagctgctgtgtgggggagaggtcaattctttctgtatcctgagacctttgaaggttacgcagagctgtttgcttggtgccagtgggttaatgtcttgatatcatcactccaatccccagtaccaagtgtattcttgaaggcactgtgtccaagagctagggctcttttaaagtaatttaaacatatgcttgaagtttgtctctcatttaaatgggacatattagaataatttcctaaacaggaaaaaatgagagcatggtcaagcacacacaaacacagccacacccacatacacagcacaacgatacatacacacaacacacacaaccacacatacacaacacacatactcacacacccctatgcatgtaagcacacatacagtattctaccactcatgatgatgagctaataggaacttgactttcagtctatcctaaggtgcatccagaggtactgaaccaaacaggctttccacacatatgctagtgaatattatattggtctaccagccagtgtaattctaaaagaagaattaattacatgtgtttgtgtgagaaacatttttgcactgattccctagagctcagtgcaagtcctacgttggcaagttagagctagggtgtatggtttaacactttctataaaaaaaagaggttgagacttggagaactcaactttctctaaaagtagacctggagacttggagaactgaagactacatagatttctcactagtgtcaagtcaaacagcattgcccagaacagaccctgaatcacatcccatcagcaggttgactgcacttgcatgtcttggtttttctccatggagacttaacactatgtttctcatttttcttcctcatctgtatatggacatacagagcagacaaccgttcctgattatacaacaataggtaagaaaagattgtataaatctcgcactgtaggtcacaatgctgattgtattcacagcattgacttccttgtaacacttaagggcatagggtggtgggtgtgtgctgtgaagacttagagaagttgggatgcctcctgatcctgaggacgtccctcctttcaaccctgtcactgtctgtatttctctgcctgtggaggggatcagtcagcctgctgtcccttgacctttccctctccctgtgtgtggaagtcagtattggtgtgggttccaaaactccccggtctctacatttagtattatgtcagaagagactctggggttagagtgattaatataagacaaccttccagagaggttgggtgacaaaatgagactgatgacttttaggcgaggccattctgattcacttcaattggttgcccagttgagaaagctgtgtcttagtgcatgctgggtgcagacatttgtcgtgtttaaacatgctgggttgaaccttgactttaatgaaaaaattcacatcagtggtcttagtgaccagcagtgacaaagcttggggtcctctattatggtctcattccagacagagtgtgaggtggtggtggcagtcatgtcacccgagacattggggtcccagcagctccttcagatttataattttatgttgggtctgaaaggagttatgatacaaaactgaaactggtgtttgtgtgtgtgtgtgtgtgtgtgtgtgtgtgtgtgtgtgtgtaagcagctgttgaaagcctttttccgggacccatgaacttctgttgtggcaggaagctatcctctgcccctttggtgtctcatataccaacttgctatacatcgcctttactgctggcagatatggggcatggtggaggtgaatgtgtgcatgtgcagtgtgtgtgtgaggagttgggagggctctgcatcctctctctccttgaaacccacttaatcctacagtgcatggtactccaaggcataatggcaaggtagattaggtagacaagttatcttgtcaccagctagggcagattcaacccatgccaacacagtgtgtagaaacataggcatcctggtgaccaacttggtcctcatgtctagaaaagatgtagtgacattttagtgagggttcacagtcaaagtgagagggtacagatttttacaggacagtgtgtccaggatgcagcagcaggagttattcatatcccatattgttcatgagtgagtggcccacaaagtgtataagcttcatcacccacaatgaaccaacaatggagaaaccaccatgtctttccaggaacagaaaacagtttggccgtgaggctggagaatggaggagacaggtgtcagggtcgtgtggagatcctttaccagggttcctggggcactgtgtgtgacgacagctgggacctcaatgatgccaatgtggtgtgcaggcagctgggctgtggcttggccgtgtctgccccaggaagtgccaggtttggacagggcacagggcccattgtcatggatgacgtggcctgtggaggctatgaggactatctttggagatgttcccaccgaggctggctctctcataactgtggacaccatgaggatgctggagtcatctgttcaggtaagacccagtaatcattacatctgcttggctgcaatgagcttaggtcactatgaatgctgtcagaactccatcctggcctcttcattggtccttgtaaggtttggtgaatatcccggacaatgcccttctcagtcatggtcctgcccaaggctctcagtctctagtgaggcttgagtttatgggagagagggaagccatggaaatgcagtgtcaagtcccacacttgagaaaggaccagggtctgcatacatgtgctcttgcaagaagtaaaccagccttggtttggagtattggaatcctgtttctatgttgaatttggactatcagaagggcaaagctgtatggcatagcacactgagcaaattcactgttttttttccacattgttccccatctcagaaagtcctgcagaaggactcttctgggcaagcttcagtaactccttcagtccctcaggctctgcagagttctgggttttcacagatcgggttcaatagctcaatggtgataaaacagtgggaatgttactcatgaatggagatcctatgtagtatgttcatgagataaatggacaagaaatatttgtgcctggagaaatttagagtcctacagaatactttaaccatgacggtggatctttgattcttgaagaagtcaagcctgagtgtgctttaggcccaatacccacacagtaacatagaaccctggtttcctgtcatgtatccaggctctcacaattttcttacttgctattagtaaactgcctcaaaccaggtcccacctggggcacggagtacatggtagaaattcatgagtaactgcaatattcatggtctgctctggcagcaccagccctggaacatcagcctcagctgcatctgtagaaacgctgagtctgtcttccctggatgtccaggtgaactcctagggactttctgtccactgtccttctatttctcacagatgtctgtgcctcccccagctcaggtcaatgtcaacagcttggagtcccctcttctactattcattgtatagtcatgctttttattctgacacgagggaattatcgataagacacacactcctcacccctctgagttttcaccaaattcatacgctgggtcatggactttcctctttgcacattcatggctgacacgacttgtctggtatgttttatgctcacagcactgggcatcatagaccccactgctgcatgctagtcaaaatggatggcctgaggcttgcatggtgctaaccccaagtgggcaggctggcacctcagagtgccacactgtcacctggtgctctttgtgtatcttcctctgcatcgagacatctgaatgtttttagttcctccatgttttttcctgttttctacattgattatcttactgatatataagtgtacatgtatacatgtaagtatatgtttatgtataacataaaccaggctgctcactttgacctagtctctccagcttcatttccaaatgctgggatttctactcaaatcctcagtgtccagcatacactctggttacagttcttctccttattttacaggatactgcagttcactcaggctacaatactttgcttgccacattccccattccaatagcgccctctgtagacacagtctgctaactgcagatggtataatgtcctggagcaggtctactttgtcctggtttaaccagccaccatttggtttgttctaattgttctctaaagatcaaggacactgtgccttttagaggtccctccctgatttacaccttttaaaacatacaaacacatgcacacacttacacataaacacacacacacattgacactcagacattaacacatataatccgtatatacgtacatatacatttgcatggacagacacacaaacatacatagagttacatacatggaccaaaaaccatagtcatatatatctcacatgcatatatgtacatcatagacagatacaacacagatacacattgttatacacgctctccacacacagagacacacacaatcccagaagttcacacagagacagatgtggacactgacacacagacacacacatgtacattctatgtcattgagtgtccatgtatattctcccacaacacctccagtagcacttgtcccttgttcaaagctctctgttgatgccttcaggagtctaggtatgctgaactctctacagggctgggagcacacattgctccttttgttcctagcttgggacatgtaccaagagcctaacagggtgcctgtctcaggagagtgtactgcagctcacaggatggaggatggaactgtgagcatccaccctcatggctcctgagagccttcctgctgatttcacagattatgcatatacatcaagacatattcacacacacatgctacaccagcaacattaaccacacctcgccatccctgagagatcatctcttagtttccaaaggaaatgggttgcaggaacttctttgcttctacccaaagaatctgacactcaagtcttcatcagttggtgtgtgacccatagacaccttcctgtgtccttccagtcatcccagatctagtccctcatcgattatcagccttgtgtgactcagtggtatatcacattgctcacgtgaggacggcagagggaaagattttcatgctcagtaatacagagtcaggctgttttccttcatcgttttgattcaccccctgtgtgattggtttagacgcccatgatacaaaggacctggactagaatatttctaagactatcttgctcttttgaccaatcaaaaaggaacctagaaagttgagtttggtctttggggtggggcccacataggagagttgtaaaagctaccacttcagaaaggatttttgccaggattcttgtggatgaaatgcacactctgaatttgtttttatttctttgacagcttctcaatcaagcagtcccacacctggtaagtacattgcaaatatggacctgtatcattgtataacttccccctatgttgtgagtgattgtgacacactccatgctaataaatgacactaggctgaaattcatagtgtgccatctagacagtaacgacaacagaaactcctgccagcgctagtataaagcgtcctgtggtaagacaattacagtcttcaattttatgttttcctgcctcaaatttctgttcatgttagaagcgaatagaatatctgaatgcaggtctttgattcagtccttccgcaagtagctctaactatgagacatgaatcagactcaggatctgtgattggtaggtgatatgtaaggttatcatgccctcttcacacattggccaacgcctgcttgtcccaagactaatcaggatccaatattcacaaggttacagggccacttgtttgctattggttggtttatgtactatttcttgagcctcacctccctcaggctaaccttggccttgctgtttttggaaaaggtccccctgaactcctgatcatcttttctgtagtttcctttgtgtaatttatttatttattagatattttctttatatacatttcaaatgctatcgcgaaatttccctataccctccctccaccctgctcccctacccacccactcctgcttcttggccctggcattcccctgtactggggcatataaagtttgcaataccaaggggcctcccttcccaatgatggttgactaggccatcttctgctacacatgcagcttttcctgtagtttccaggttctaggattccaagattttgctaccatgtccagctgttttaatcacattggacatgaggtgaattttacctccatcccagattttttttctcttcttacaaaacaataaatttgctgctgctggtgatggtggtagtgatcttgctggttctccagctgctgctgctgtctggtggaatccagtgggatcataaggcacagaaatcatggatggagtagagatgagagacactggtgtcacactgctgggcagaccttaccaatccccacccttccgtgtcattcttctctttgccctcagtcatgtgatgggtgaaattagattcagcctcatgtcagaagggctagtggaatacagtcactgactactccttccaaaattaaaaatattgcacatcatcaatgctcagctattacaggtagtatgtagttttaacagaacatatatgtgttggagatgcaagaggaagatttttgaccaacttctagaaagggccaaaccaaggcttgcagttctctagggggaaccaatcagagagtgaccagcagagggcagtaagtttgtgtcctccagacccagagccttctttggaacaccttggaaggctcaggtggcctttcctatcgtcattgaccctgtgaagatgtccaacaacagcaactgtgttcccatgtgaattgctggtttagccattgatacatagagtttactgtgcgcaagttacagggaacatagtgtgactgtggagatccccacccacctgagaatggcccttaaaaggaacatggccctgccggcagccacattgtgactgtgtttattctgacctcccacagtaatcactggaagtcgcttctcttgctagttggaggcagtttctcaggaagactgttttacctatggtaaaggttcacaatgagagcttctgtttgaactacagaattctccatgtgacttttggatactctgtgctgttggtgaaccagatagttttccagatggaatagatacagagatgaagaagagtgaggccaagagatgctcatgacatgtcagtagacagttaaagaaggatcagtgtcagatcccacaatgcatttcagcatttctagtgatgaaagtctttagcacgggagactgcatctcctgcttctaggttctccaagagaagaccaacacccaatgaactcttcctatctcattttgcagatgtgttctacccaactgaccaaaccacagtaggtaagttgtgctatgttgtatccctgtggcctattgtccccagagcccataagcttacctctgacccagaagacgggcagaaggaagagcatgtgaagtcctcagctcccagggaaatttcccaataaggtcaggcctatattggaatatatgccatggattagggccccgaattgtggtgcttggtgaggatcagccataggaggcaccttcaagggttactaaggaggtcttgttactagaggttctattgaccattctcagtgccctgaggttccgatgttttaccctgtactttggtgaacccagggagcagagtctctgacttcagtccttggagaggaaataaaaactccgcttagctaatgcccttgtcttttcctttcctctaaggccttataaagccactctggattcctgaatccccaacctgggacattaaagatcctttctatctctctgagttcctcctatgagcggtgttggtggcacatcagtatagtttagactctgatggcctgggctttgggagagaaaatctctttcttttttccttggcgttttttgatcctaggacacagcaagaactgtttccatagcagtgcctctggccagcccagggtttgtagggaatccaattggctcagtgtcaggcatcacttttccttatgcatgtgaggagtcccaaggatgaggctggctttactctcactaaagccatattccatcccaagattccacccagtttatatcaggagctgctgtgtggggagaggtcaattctttctgtatcctgagacctttgagggttacgcagagctggttgcttggtgccagtgggttaatgtcttgatatcatcactccaatccccagcaccaagtctactcttgaaggcattgtgtctgaaagccagggctcttttaaagtaatttaaacatatgtttgagatttgtgtctcatttaaatgggacgtattagaatcatttctgaaacagtaaaaaaaaagagcatggttatgcacacacaaacacagacacacacacacacatacaaccaaacacaaccacacatacaacacacacaaccacacatacaagacacacatactcccacacacttatgcctgtaaacacacatacaatattctaccactcatgatgctgagctagtaggatcttgagtttcagtctagcctagggtatatccaaagataccttacccaaaaaagcattcatatacaaagataaagcaaaacaggctttccaccacatatgctagtgaatattatattgggttaccagccagtgtaattaaaaaagaagaatttaattagatgtgtaagtgtgagaaacatttttgtactggttccctagagctcagtgcaagtcctgtgtaggcaagttagagctagggtgtatgggatatccctttctataaaaatagactttagacttggaggactgaagactacatagatttctcactagtgtcaagtcaaacagcattgcccagaacagaccctgaatcacatcccatcagcaggttgactgcacttgcatgtcttggtttttttccatggagacttaacaccatgtttctcatttttcttcctcatctgtatatggacatacagagcagacaaccgttcctgattatacaccaataggtaagaaaaattgtataaatctcgcactgtaggtcacaatgctgattgtattcacagcatcgacttccttgtaacacttaagggcatagggtggtgggtgtgtgctgtgaagacttagaggagttggggatgcctcctgatcctgaggacttccctcctgtcaaccctgtcactgtctgtatttctctgcctgtggaggggatcagtcagcctgctgtcgcttgacctttccctctccctgtgtgtggaagtcagtattggtgtgggttccaaaactccccggtctctacatttagtattatgtcagaagagactctggggttagagtgattaatataagacaaccttccagagacgttgggtgacaaaatgagactgatgacctcttatgagatgccattctgattcacttcaaatgggtgcccagttgtggaagctgtgtcttagtgctcactggtgcagatatttgtcgtgtttaaacatgttgggttgaaccttgactttaatgagaaattcacatcagtggtcttagtgaccagcagtgacaaagcttggggtcctctagtgtggtctcattgcagacagagagtgaggtggtagaggcattcatgtgacctgggacagcggggggggggggaggggaaccagcagctccctcaggtttataattctgcattgagcctgaatgcagttctgatataaactctccatcttgtatatgtaagcagttgtgagagcctttgcaagggaccatgaacttttgttgttgcatgaagctatcattctgcccctttggtttttcatagactaacctactccgccttctcctttactgctggcaggtgtggtaaggatggaggtgaatgtgcgcatgtgcaatgtgtgtgtgaggagtcgagagggctctgcatccccttctcctcaaaacacacttgattctacagtgcaggacactccaaggccttaggttcaaggtagagtaggtatcttgtcaccatccagggcagattcaacccatgccaacacagtgtgtagaaacctaggcatcctggtgaccaacttggtcctcatgtctaggacagaagtagtgacattgtagtgagggttcacagtcaaagtgagagggtacagatctttacaggacagtgtggccaggatgcagcagcaggaggtgttcatatcccatattgttcatgagtgagtggcccacaaagtgtacaaagctccatcacccacaatgaaccaacaatgcagaaaccaccatttcttcccaggaacagaaaacagtttggccgtgaggctggagaatggaggagacaggtgtcagggtcgagtggagatcctttaccagggatcctggggcactgtgtgtgacgacagctgggacaccaaggatgccaacgtggtgtgcagacagctgggctgtggctgggccgtgtctgccccaggaaatgcctactttggaccgggctctgggtctattgttctggatgacgtggcctgtacaggacacgaggactatctgtggagctgctctcaccgaggctggctctctcataactgtggacaccatgaggatgctggagtcatctgttcaggtataacccaaaagccatcagatattgtcttcaagactgtgcttttagatgtcactgaattctgttctctgtactctatttgggcttcatcaatagtgggactccttgtgcatttttgttgagtttttctcactcagagaactgtccaaaactttcacagctgtcttggaactctagagttccttggtgcagagctaggtccccagtttgaagaaacactggtgtcttcacatgctcactcttgtaagctttcccatagtatctgaaagttcttaggtactggttttaagatttagcatccagcaactcatatataaaaactataatccattattttacccgaggaacatccatttgactctacttctgtggtcccttacatcagtcatagagatagagcctatgcaggacacatgtgttgcagctcaccactttcttttgtttcatagtcatttgcgattagccataatcatcgtatgttagcacagtagctaacctaaagtgaatggctcatttactagtcaaggtagaaatctggatgacagagtaaggtataggcttcgcaggatggtgatatactttgtgctcatgaaccagccatattggagcagtgaagcaaggaagaccacatgttttcaacagcatcctcctaatatgagggtagtccgtgggtctccagcagctcatcactgagactaattttggatgattacctccatgcttatgcaaagaagtttgtagcctgttctagtggtagccattactttcttactccagataatgacttattggtactcaggtcccggctttggctgtggggtgcagtgtggatttcagtgagtgttatctaggtttctgggtactctggttacaatagaacatcagctctttgtgtaaaaacaccaactctgtcccccatgttagtctatgtggggtcttgttctcagtgtctaatctatcttctttatcacagatgcccaaatccagagcacaaccaggccaggtgagtcccagcagctttctatggaagatctctgttcttgggaatcccattttgggatacatactcttctctcgccactttggtattcagggggcactttcttatcccaaacccaagtttgcatcaaatatgttggtaggtagtggttgagacacttgcaactgaaataaaaacccacacatgcaaggatctttggcccttttatattcaagatctgtctgcaaatcgatgtggacattctttgaacttctgaaaccatcagcattatccaagtcactcccttctatttctgcaaagcccgtatttattactgcatggtcacctccccaccaacccgtatgtactgcatagttgcctccctatgctatgtgagatggatcaatgtggggaattgcagctggtatccagttgagctgaggtccgaaccccgatggtcataattcacctacatgacatggtcctggatctccggcccctgcctaaggtattacctcccacagcccccacaagagaagcatggtcaatagtcacataagaaaaggcccaagcttctgaccttcaggctaaactcctccccagttacctagcaacagtgaagaccataaaaagaggtgaccagccctcacctcactctcttactcctttgttcctttacctctcacttctcttacttctctcctcttccctttctctttgtcttctcttctctctcctttctctttgtcttcttctttcctctcctctctccctctttctccctctttctctctagccttcccccctctctccctctccccctctctcttctaccttctctatttcccctgaatttctataattaagctcttaaaccatagatagtctctgctccttcaagttctgctgcacactctggtcagtgttgggaacctcttcccctattccctctctcctacaaccctggtggctttatcaaagtagctcgggggggggggtgtccccaggcagggctgccccttggcttccccctgaagagtgggatagaggaatgcccacccagggatgagtggatagggtaggtagcagccctctcatgcctgactgaccagagaatagggaaactctggcaggacatgggcctcttttcccttcccccacttcccccagtccctcccctggttccccctttattttgttcccaacagatcaagaggcaaggaatgttttgtgattccagttgtcaggaaagacaattcttctatttactacactctattgcctttggcctctttctccactctttatctatctaaatctgggacatggcgtcacatgtacctgtcccatatttgggtccccaaatggacagacagagtttcttagacaaaagaatgtctcatagagaggtgggaaaacatccttatgtcctttgggctttgttctttgcatgaatatctgggttggacccttgtgcataagtcacaagtgctgctcttgaatggattctgcattgtgtggagaacattttgtgtgtgtgtgtgtgtccatttgtcttctaatcttacattctgttgccattttcagatctgtggcctactactactaccccagaaactacaacaggtaatgagtcttcttactgtgggctggctacctgtacattacaggttgaaaccttgactggctaataagagattaagatgaaggagtttcttgccttgcttaggatcctttgtgtttagtcatatagaaaggagtttcacaagctgctgataggttgttggtagagatccctattctgttcacagccacaccaacaccgacagagtgggtaggactctttcatatttgttctgccccagaaccttcagcattctccataaagtaccaagacagtatctgctgagcccacttcaccttctgctcgttttaggagaatcacagacttgcagcacgtagtcaattttgctaaacttaacttttctgtgaaatcatttgctatggtggtcctttcctatgacattttcctggaaagcatcatccttgcaagagtcatgtgacacggggccgcagagactgttcttgtcatgctcctaaagtctagatggcatgattcttttaccaaccaaccgttattcaggacaatgctatcattgccctagggcccagggtcacctcactggcactatgatggacacatgagagcatggtctgtgccaccacgtgcccttgagaaaagactctctgcttctcaggcacagtgcttctgtgtccaatgtttccatcttgctagcacagcgatcttgactacactttgatgtatagaccttccttctaatctagctttgttttctctctagaattgttgactacaactccttattttggtaagtttgggatgagaccaaagcatagctttcagcatttcaaccaagaggatggggaaagacaggaattctggaatcttcttgacgtctttgctggagcacagctcagaaagacaaggagaaggaatggaattagaaagagggcctgtcttccctgtgtacacccacagtgatccactctgtccacaaaatccatctcctacatactccattccagaattaacgaataggtttggaaagacctctcagaatgcaatcatggagttggactcatgagtgggacacaaaatcttcaatatgagccctcagtggacatttcctaacccattcagaacatcatggcattgctagaacagcaaggtttgggatgttgtaaatcagaatagcagaaatacgtacagagtctagagattctctctgttcatcagagagagtgataccatatttgcaaacacaggcacacttgaaataacccctgggataggtgccaattacacctggatacattgtatccaggtagcagagaatctgtaccactgggctaagagattggtacccacaatcatctgccagacaatgggtcaaagagactcaatgaacgattttccccacaatcatagaggacaccttactgtggctttgatggaactttcctaaggacggccattttccatccatccatccactgaaaaacctgcacctactcccacaaagaaaagccatgaggaggggatccagcatgttctcagaatatgaccagggctaggaactgcttgtgtcaattcccgtctctggttctgcattagagaaccctaagcacaaattccctcactgggccttgatataggtgtatgtttgcacagcttttcaagtactggggtggagtctgtgctcatggctataaatccctccagatctgtgcctcatgggcagcatgggaagagatatcctaagagacctgaatgctctattgtaagggcttggtttggacatggggtagtcatccataattcactgggcagacacaaactacaggatccatcctgtcaacaaatgcatcttcttgtgaggtgggagcagaatgtgagtacttaatgaccccatgagtagtatcttcctggcagtgagtatggccacacccttgctctgaggcagcagatgagtacaactcagactgttatgctcagcatcatgcacaaaggaccaggacgggtaacttctcttcaagactctgacatgacttctttttctcacagttccttcaaccatagctggtaaatcttgactcccttcaactcttctaatcctatccatacctactctggtcacagccatggccagcagctccagagtggctggaactaaagtaatctgtctgcccaaggaccttcccctctctctatagtacaaaggcagcatctcttgtgacagcctcattctctgcttaattcagtgggatatgagagttgcagcacttaatccatttggctaactgtcacttcctgtgaaacattttcccccagatgccctttcctatgttattcattctgaaagcattgtatcttgcaagattcacgagatattgggcaacagagactgttcctgccatgttgctaaggtatagacggcatgattcttttcccaagcaactgtcattcaggacaaagttgcagtgtccatgaggtcagggccacatcattgttaatatgaagtacacatgagagctcagtcagggacaccgcatgatctcaaggaaaggactttgttactctcagccacagtgcttctgtgtccacggtttcccacttctaaccataagtgcctggacagaatcctggtgcacaaaactttctctaatctagctttgttttcctctgcagattggtggacaactacttctggtaagtctgggaagaggccaaacttctctttcaagcacttcatctaagagttggaaagagttgggagttctaggatcttcttgtaatctgtgctggagcacagctcacaaacaagagaaacaaaagcactggaaagagggcctatctttcctgtgtctatctccagtgaagattttctgttccctagaaagactgacactcttatcagcaaagatatgcacacttgaaataacccctgggataggtgttaattatacctagaccccttgtgtccaggtagcagagaatctgcaccacttgtctaagagattggtacctacagtcacctgccagccagagagtcaaagaagttcaaggaaagcttttcctatgagcacaggagacagaagactgtggctttggtagcactttctatttttcatcctcccatccactgaactatttgaacctactcccacaaaggaaagacacaaggaaagaatcctgcatgtcctcagaatgtcaccaaggctaggttacctcctatctgttcctcccttggaattttggtaaatcctgactcttgcccctggttgtaacctgtgcagtatgatccagtgttcatcagcatttccacacttttctgtttgcagactacagctgtggaggtctcctgacccaaccctctgggcaattttccagcccatactacccttcaaactatccaaacaatgccagatgttcgtggaaaattgtgctccccaacatgaaccgcgtgacagtggtcttcacagatgtgcagtaagtgtgtgtgtgtgtgtgtgtgtgcagaggagatgttatagagaatagtggggtgctttgaaagttatgggatgatagtcatgttggcttttgcaatatgggttccatttttgatgtacaacaagagtctcccagggaggatgtaatgggtgcaaaagcacattgaaaatactctgtcttttagtcccagcttgtcatgaatttgcactatggccatgtggagccatgttctaaatcctcagatagaagaaaggggctggaatgcctgtttgcctcaccttgttgatcagcaagtgagcagagaatggcaacacacttggagaccttactcagtgggatggaaaggtggtggcctagggagtgacagtcttgggtgcacattaggacagtgctgctaatgagggtacctatttggtgcaaaatttccccacagctccttctcagtccatgaggcaccaggagcaggtcagtgcatttccagagtagtgagtaaggtcccagcacttattaactaagctgtgttcccaggcctcctcttggtgtctatagtggttttgcaagtctctgctgtagagctatgtatacatagtttcagtgtccttcttaggacgattcaagaggcacctgaggccatttggtcctatgcaggaggctcctcagtatgttcttgtcaggacactactgacagttagcggcacacagtagtgacattttatgaacccaccttactctccaaccttccctgctcctcctggtaatatagaattttgtcatagctcctttgtagtgtttctatgtgaacatggatttcagtattgctctcagaacatgagaaacttgagggtcagagagttccagggacttatcttgtggtgtttttaattttgttagatttttatttaatgtgtgtgggtgtatttttgtgtagatgtatgtctctggattgcatgtttgcctggtccccacacaggtgagaagaaggtgtttaattccctggatagtgaggtaatgacagtagtgagctctgttgtaggtgctgggaatcaaacctttagttctctagaacaacaggcagtgcacagaaccactgagccatctttctaccacttgccttgagtgtatgtctcccttttttatattcactagagatatttgttttatcccaaagataattgaggatttttgaaggaactaattagtgtgtcctcaggtgagcttcctgtgttgatgtaaaggctttcaaggagaggtattatggattacatatctgtgagcctcaaaggtagaattttacaagggatgctgggcatgggaagatagatgaattacctttggattccaggtagccatctactcttcaaatgatgtagttagtcactgttatcaggacaatggctccacagatgtgaaccccacatcacattccagacacagaaaagggtccttttccttttgtgtcctcaggcttgaaggaggctgcaactatgactatatcctggtttatgatggccctgaatacaattcttctctcattgctcgggtttgtgatggttccaatggctctttcacctcaaccggaaacttcatgtccgtagtcttcatcacagatggcagtgtgacaaggagagggttccaggctcactactactctacagtcagcacaagtaagttcccttgtgagaatgaatgtgcatgtgggattggggatgtcaaaagggactatctgagcctaagatttctgaatttgtgacaagggtaatagagtggtgccgtgggtcccatgcttgctgagagggactgtggccataagtcttggttctgacttggggaaagagaggctttggccagcactgactgatgggatgtacaatggctttcccgtcatcattagacactaaaagtccaaggtgattattcaacagatagtgagaagtcagtgccaggcatggaagatgccagcatggttggacctttatgacctttccaaagtgtgggacactggttaggtctttggatcaagcacattttgcttccatctgaaagagaataaaatatttgatatgaagattggcagaagacagactcagaggttgagttcttagtcagagacaccatgtagacctcagaatgtaatggagaaggactgaggactgatgtccaaggtcttttgttcagcaaggagcataagggtggactttgtcctgagctaaagacctgactggatgctgctgctactcttggctgtggagttgctttactgcacgtgaaaatgattactatgaaaatattttgctttggtcaattcctgtctcccattccccatcagagaagaacttagcacaagttcattctttgggccttgatgtccatgtgtgcctctgcatagcctttcaggtactgaggtagagtctgtgctcatggctggaaatccatctacatctgtgcctcatggcaagagtagctgaagatgtccttagaggccttaatggtcaaatgtgaggacttgctctttgcttgttgtagtcattcacccataaatccctggggagacacaaagtacaggatcttacctctcaacaaatgcagatacaaatgtctacatgcagtcagaatagactactgattcttaatgactccatcagaaggatcctcttgtattgtatatggttacacacttgcaatgaggcagcaggtgagtacaactcactctggcgtgctcagcatcatgcacaaaggaccatgacagacaacttctcttcaaggttctgtcaaggatttttttctcacagctcctccagtgccaatcccaaccgtagctggtgagtcagaacctccttcaactcctctctatcctctccacacctattatcaccacagtcatggccattagctccagagtaggtggaattccattattctagctaccctaggatcttcccatctctccataaagatcaaaagcagcatgtgttgtgacaacctcactgtctgtttgacctagtggcatatgagatttgaagcacttaatccatttgtctaactgtcacttcctgtgaaatgatttcctcctgataccctttcctatgtaattctttctgaaagcatggtatcttgccaaagccatgagatattgggcaacagaaactgttcttgtcaggatcctaaggaaaggatggcttgattcttttcccaagcaactttcattctggaaaaagttgcagtgtctctgaggtcagggccacatcatttttaatatgaagtacatatgagacctcagtcagggccaccatatagtctcaaagaaagaactttgttactctcagccacagtccttctgtgtccactgtttcccacttcccaccatgtgtgactcgagagaatcttggtgcacagaactttgtgtaatctagctttgttttcctctgcatattgatggacaactctttctcattgcatgtctgggaagaggctaaacttctcttttagcatttcaactaagagttggagagagttgggagtgctaggatcttcttgtaatctgtgctggagcactggtcatgaagacaagaggaaacaaggcactgggaagagggcctatcttccctgtgcccatctgcagtgacccactgtccaccctattccatctcctattcatttgatcagagatttaatgagtaggtttggaaacagcccacaggaggatctcttgtgtttgggattccatatcttcaataggaacctttagtagagaatgtctatccgattcagaatgccatgaataccagaagaaataggctttggatggtctaagtcagaatagcagagcagtgcttcttgtagatttgctgttctctagaaaaagtgacactcttaacaggaaaggtatgcacactttacataatcctgggataggtgttgagattggcacctacattcatctgccagccagggagttaaagaaattcctggtaaggttttcaccatgagcacaggggacagaagactgcagatgtgatagaactgtccattgttgatccacccatccagggaaccacatgaacctactcccaacaaaagcaggggtcctgcatgacctcagaatatgaccaaggctagctcatctcctgtctgtttcctcccttggaattttggtcaaacctgactcttggccctggtagttgtctgtgcagtgtgatccagggttcatcagcatttccacacttttctgtttgcagactacagctgtggaggtctcctgacccaaccctctggacaattttccagcccatactacccttcaaactatcctaacaatgccagatgttcctgggaaatattggtccccaacatgaaccgtgtgacagtggtcttcacagatgtgcagtaagtgtgtgtgtgtgtgccgaggagatgtgatagagaatagtggggtgctttgaaagtcatgggatgagagtagagttggcacttacaatacaggttccatttttgatgtggagtaagagtctcccagggaggatgtaatggctgctaaagcaaaggaattttaaaatacactgtcttaaagtcccaggttgatatgaatttgccatatagccatgggttgccatgttctgaatagtcagccagaaggaaggggctgtaaagcctgtttgttgatcagcaagtgagcagagaatgggaacacacttggtgtcctgacgcagtgagatggaagggtggtggtctagggagtgacctagggtcttgggtacacattaggacagtgctgctaatgagggtacctatttggtgcaaagttttccccatagtcccttcacaatccatgaggcaccaggagcaggtcagtgcatttccagagaagtgactaaggtcccagcactcattgactaagctgtgttccctggccctctcttgttgtctacagtggttttgcaagtctctgctgtacaactacctatacatagtctcagtgtccttgttaggacaattcaagagtgcacctgaggccatctctttctatgcaggaggctcttcattctgttcttgtcaggacaccactgacagtcaccagtacaaagtagtgacattttatgaagtcacgtcccacttcaaccttccctgctcctcctgttaacatagtattttgtcatggcttctttgtagtgtttctatgtgaacatggaattcagtgttgctctcagtatttgagaatgttgagggtcagagagttcaagtgacttgtcttgtggccatcttttattttgttaaatttttatttaatgtgtttgagtgtattttgtgtagatgtatgtctctggattgcatgtttgcctggtccccacacaggtgagaagaaggtgtttaatttccttgatagggaggtaatgacagtagtgagctttgttgtaggtgctgagaatagaaccactagtcctctagaacaacaggcagtgcacagaaccactgagccatctttctaccacttgccttgagtgtgcttcttccctttttatatttactagtgctatttattttattccaaagttaattggggagtttgtgaggaaaccaattaaaacatcctcgggtgaccttcccttgttgatgtaaaggctttcaaggaaaggtattatgcaatccatatctgtgagcccaaagatagaaatttacaagagatgctgggcacgggaaggtagatgaattacctttgattacagaaaggcatctagtcttcaaatgatgtagttagtcactgttatcaggacaatagccccttagatgtgtgacctcacatcacattccagacaccgaaaaggggattatttcttctttgtcttcaggcttgaaggaggctgcaactatgactatatcctggtttatgatggccctcagtacaattcgtctctcattgctcgggtgtgtgatgggtccaatggatctttcacctcaaccggaaacttcatgtccgtagtcttcatcacagatggcagtgtgacaaggagagggttccaggctcactactactctacagtcagcacaagtaagttcccttgtgggaatgaatgtccatgtgggattggggatgtcaaaagggactatctgagcctcaacttttctgacaatggcaatagagtgctactctgggtcccatgcttgctgagaaagattgtggcccatagtcttggttctgacttggggaaagggtggccagtacttactgatgggatgtacaatggatttcctgtcatcatcagacactatatgtcaaaggtgatttttcacaggtagagagaaattcagtgccaggcatggaagatgccatcatgcttggacctttgtgactttccaaagtgtgggacactggtcatgccttttcaccaagcacatttggtttctatctgaaggagaataaagtagtagatatgaagatggacagaacacaggctcagaggttgagttattagtaaaagttgcccgtagaccacacagtgtaatggagaaggactgaggactgatgtccaaggtcttttgttcagcaaggagcataagggtggacattttcctgagctaagacctgacttgctgctgctgctcctcttggctgtggagttgctttattgcacgtggaaacgattactggacaaaacattctgcttgtatcaattcctgtctcttgttccccattaaaaaatgcttagcacaagttcattccctgggccttgatgtcagtgtgtgcctctgcaaagcctttcaggtactgaggaagagactttgctcatggctgtaaatccatctgcatctgtgcctcatggccagtgtgctgaagatgtcttagagacatgaatagtcaaatgtaaggacttgcttttacttgtggtagtcattcacccataattcactgggcagacacaaactacaggatccaacctctcaacaaatacagacacaaacctctttatgtggtggggatagagtatggatccttaatgaccccatgggaaccctctttgtgcattgtatatggtcacacactttcaatgcggcagcaggtgaatacaactcagactgttatgctcagcatcatgcacaaaggaccatgacaggcaacttctcttcaaggttctgacatgaattttctttctcacagctcctccagtgccaatcccaaccacagatggtgagtcctaacctccttcaactcctctctatcttctatacacctattatggctacagtcatggccttcagctccagagtgggtgggactccagtatactgtgtgccctagaatcttcccttctcttcatatagtacaaaggcagtatgctttgtgacaacctcactgtctgtttgactcagtgggatatgagatttgcagcacttaatccatttggctaactgtttcttcctgtgaaacattttcccccagatgcccttccctatgttattttttctgaaagcattttattttgcaagattcatgagatactgggcaacagaaactgttcttgtcaggttgctaaggtatagacggcatgattcttttcccaagcaaccgtcattcaggacaaagtagcagtgtccctgaggtcagggccacatcattgttcatatgacttacacaggagagctcagtcagggacaaaacatgctctcgaggaaagtactttgaagtctcagcaacagtacctctgtgtatatggtttcccacttccaaccatgggtgccttgacagaatcttggtgcagaaaactttttctaatctagctttgttttcctctgcatattggtggacaagtacttcttctggtaagtctggggagaagtcaaacttctccttcaagcacttcaagtaagagatggagggatttcagtgttctaggatcttcttgtaatctgtgctggagcacagctcataaagagaagaaacaaaggcattgaaaagaggacctatctttcctgtgtccatctctagtgatccactcagtccacccatttctatttcctatttattagaccagaggtttaattagtagtatgagtagttttggaaagagctcacaggaggacctcatggggttgggattccaagtcttcaatatgaacttttagcggctactgctatcccatttcaataccatggcataccagaagacataggccttggttgctctgagtcagaagagcagagcagtgcttcttgtagattttctcttcttgaggaagagtgatactaatatcagcaggatatgcacacttgacataactcctgggatagaggttaactatacctagaccctttgtgtccaggtagcatagaatctgcaccagtagtctaagagattggaacctacagtccttcatattcaaggaaatgttttcctatgagcacaggggacaaagactggggaattgatggaactttccatttttgatccacccatccacggaaccacctgaacctaaccccacaaaggaaagacacaaggaaggcatcctccatgtcctcagaatgtcaccaaggctaggttatctcctgtctgttcctcccttggaattatggtcaaacctgactattgcccctggttgtaagctgtgcattatgatccagcattatgtagttcatcagcatttccacacttttctgtttgcagactacagctgtggaggtctcctgaccctaccctctggacaattttctagcccacactatccttcaaactatcctaacaatgccagatgttcctgggaaatattggtccccaacatgaaccgtgtgacagtggccttcacagatgtgcagtaagtgtgtgtgtgtgcagaggagatgtgttagagaatagtggggtgctttgaaagtcatgggatgaaagtagaatcggcagttacaatacaggttccatttttggtgtggaacaagatgtaatgggtgctaaagcacaagaattaaaaaatactctgtcttatagccccagattgtcatgaatttgcactatggtcatggggtgccatgttctgaatcctcagccagaaggaaggggctggaatgcctgtttgcctcaccttgttgatcagcaagtgaacagagaatgacaacacactggagcccttactcagtgggatggaagggcggtggcctatggagtgacctagcatcttggctgcacattagggcagtgctgctaatgagggtacatatttggggtaaagctttccccagagttccttctcagtccatgaggcaccagaagcaggtcagtgcatttccagagaagtgactaaggtcacagcactcattgagtaagctgtgtccccaggtgctctcttagtgtctatagagcttttacaagtctctgctgtacaactacatatacatcgtttcagtgtccttcttaggacaattcaggagtgcacctgaggccatctggtcctatgcaggaggcttcttagtctgttcttgtcaggacaccagtaacagttaccagcacacagtagtgacattttatgaagtcacgtccctctccaaccttccctgctcctcctggtaatatagtattttgtcatgttttctttgtagtgtttctatgtgaacatggaattcagttttgctctcagtatgtgagaaacttgagggttagagtgttccagtgactggtcttgtggcgatttttttattttgttacatttttatttaatgtgtttgagtgtattttgtgtagatgtatgtctctggattgcatgtttgcctggtccccacacaggtgaggagaaggtgtttaattccctggatagtgaggtaatcacagtactgagctttgacgtaggtgctgggaatcaaaccttagttctcttgaataacaggcagtgcacagaaccactgagccatctttctaccacttgccttgagtgtatgtctccttttttatattcactagagatgtttattttttcccaaagataattgaggacttttgaaggaactaattagtatgtccttaggtgagattcctgtgttgatgtaaaggctttcaaggagaggtattatggattgcatatctgtgagccacaaaggtagaattttacaagggatgctgggcatgggaagatagatgaattacctttggattccaggtagccatctactcttcaaatgatgtagttagtcactgttatcaggacaatggctccacagatgtgaaccccacatcacattccagacacagaaaagggtccttttccttttgtgtcctcaggcttgaaggaggctgcaactatgactatatcctggtttatgatggccctgaatacaattcttctctcattgctcgggtttgtgatggttccaatggctctttcacctcaaccggaaacttcatgtccgtagtcttcatcacagatggcagtgtgacaaggagagggttccaggctcactactactctacagtcagcacaagtaagttcccttgtgagaatgaatgtccatgtgggatcagggatgtcacaagggactatctgagcctaagatttctgagtttgtgacaagggtaatagagtggtaccctgggtcccatgcttgctgagagggactgtggccataagtcttggttctgacttggggaaagagaggcttcggccagcaccgactgatgggatgtacaatggctttcctgtcatcattagacactaaaagacaaagctgattattcaagagatagtgagaagtcagtgccaggcatagtagctgccagcatggttggacttttatgacctttccaaagttgggacactgattatttctttggatcaagcacattttgcttccatctgatggattataaattattagatatgaagatggacagatacagactcagaggttgagttcttagtcagagacaccatgtagacctcagaatgtaatggagaaggactgaggactgatatccaaggtcttttttttatttttagcaaggagtacaagggtggacattgtcctgagctaaagacctgactggatgctgctgctactcttggctgtggagttgctttattgcacgtgaaaatgattacttaacaaaatattttgcttgggtcaattcctgtctttcattgcccatcagagaagaacttagtacaagttcattgtctgggccttgatgtcgatgtgtgcctctgcatagcctttcaggcactcaggtagagtctgtgctcatggctggaaatccatcgacatctgtgcctcatggcaagagtagctgaagatgtccttagaggcctgaatggtcaaatgtgaggacttgctctttacttgtggtagtcattcacccataattcactggggagacacaaagtacagtatcctacctctcgcaaatgcagacacaaatgtctacatgcagtggaatagaatactgattcttaatgatctatgggaagcatcttcttgtattgtatatggttacacacttgcaatgaggcagcaggtgagtataactcactctggcgtgctcagcatcatgcacaaaggaccatgatagacaacttctcttcaagattctatcaaggatttttctcacagatcctccagtgccaatctcaaccatagctggtgagtcagaacctccttcaactcctctctatcttctccacacctattatcaccacagtcatggccttcagctccagagtagctgggattccattattctagctaccctaggatcttcccatctctccataaagatcaaaggcagcatgtgttgtgacaacctcactgtttgacctagtggcatatgagttttgaagcacttaatccatttggctaactgtcacttcctgtcaaatgatttcctcctgatgccctttcctatgtaattctttctgaaagcatggtatcttgccaaagccatgagatattgggcaacagaaactgttcttgtcaggattcaaaggaaaagatggcttgattcttttcccaagcaactttcattcaggaaaaagttgtagtttcccgaggtcagggccacatcattgttaatatgaagtacacatgagacctcagtcagggccaccatatggtctcaaagaaagaactttgttactctcagccacagtccttctgtgtccatgttttcccacttcccaccatgggtgcttcgagagaatcttggtgcacagacctttgtataatctagctttgttttcctctgcatattggtggacaactctttctcattgcatgtctgggaagaggctaaacttctctttcagcatttcaactaagagttggagagagttgggagtgctaggatcttcttgtaatctgtgctggagcactggtcatgaagataagaggaaacaaggcactggaaagagggcctatcttccctgtgcccatctgcagtgatccactgtccaccctattccatctcctattgatttgatcagagatttaatgagtaggtttggaaacagcccacaggaggatctcttgtgtttgggattccatatcttcaataggaacctttagtagagaatgtctatccgattcagaatgccatgaataccagaagaaataggctttggatggtctaagtcagaatagcagagcagtgcttcttgtagatttgctgttctctagaaaaagtgacactcttaacaggaaagatatgcacactttatataatccctgggataggtgttatatccagtcactctgtgtccaggtagcagagaatctgcaccactactctaagagattggcacctacattcatctgccagccagggagttaaagaaattcctggtaaggttttcaccatgagcacaggggacagaagactgcagatgtgatagaactgtccattgttgatccacccatccagggaactacatgaacctactcccaacaaaagcaggggtcctgcatgacctcagaatatgaccaaggctagctcatctcctgtctgtttcctccttttgaattttggtcaaacctgattcttggccctggtagttgtctgtgcagtgtgatcctgggttcatcagcatttcatacttttctgtttgcagactacagctgtggaggtctcctgacccaaccctctggacaattttccagcccacactacccttcaaactatcctaacaatgtcagatgttcctgggaaatattggtccccagcatgaaccgtgtgacagtggccttcacagatgtgcagtaagtgtgtgtgtgtgccgaggagatgtgatagagaatagtggggtgctttgaaatcatcggatgagagtcaagtcggcatttataatacatgttccatttttgatgtggaataagagtctcccaggaggatataatgggcactcaagcacaggattttgaaaatactccgtcttaaagtcccagattgacatgaatttcctatatatccatggggtgccatgttctgaatcctcagctagaaggtaggagttgtaaagcctatttgttgatcagcaagtgtccagagaatgcgaacacatttggagcccttactcagtgggatgaaatggtggtggcctagcgagtgacttagggtcttgggtgcacattaggacagtgctgttaatgagggtacctatttggtgtcaagttttccccatagctccttctcagaccatgaggcaccaggagcaggtcagtgcatttccagagtagtgagtaaggtcccagcactgattaactaagctatgttccctggccctctcttggtgtctatagatgttttgcaagtctctgctgtacaactacctatacatagtctcagtgtccttgttaggacaatttaacagtgcacctgaggccatctggtcctatgcaggaggctcctcagtctgttcttgtcagcacaccactgacagttagcagcacacagtagtgacattttatgatgtcacctccctctccaaccttccctgctcctgctagtaatatagtattttgtcatggcttctttgtagtgtttctcagtgaaaatggtatacagtgttgctctcagtatgtgagaaacatgatggtcagagagttccagtgacttatattgtggtgttttttattttgttagatttttatttttttgtgtgtgactgctttttgtgtagatgtatgtctctggattgcatgtttgcttggtcaccacacagatgataagaaggtgctcaattccctgcatagggaggttattacagtagtgagctttgttgtaggtgctgggaatggaatctttagtcctctagaacacctggcaatgcacataaccactgagccatctttctaccacttgcttgagtgtacttcttccctttttatattcactagagatgtttattttatccctaagataattggggactttgtgaaggaaccaattaaaatgtcttcaggtgactttcctgtgttgatgtaaaggctttcaaggagaggtattgtgcaatccatatctgtgagccccaaaggtagaaatttacaagagatgctgggtatgggaaggtagatgaatttcctttggattccagaaagccatctactcttcaaatgatgtagtttgtcactgttaccaggacaatgcctcctgaaatatgagcccttacaccacactccagacatagaaatggggactgtttcttctgtgtcctcaggcttgaaggaggctgcagctttgactatatcctggtttacgatggccctgaatataattcttctctcattgctccggtgtgtgatgggttcaatggatctttcacctcaaccggaaacttcatgtccgtagtcttcatcacggatggcagtgtgacaaggagagggtttcaggcttactactactccacagtcagcacaagtaagtttccttgtgagaatgaatgtccatgtgggatcgggattgccacaagctaccatttgagactcaacatttctgagtttctttcaagggcaatagaatggtggtaccctgggttccatgcttgctgagagggtttgtggccagtaagtcttggttctgatttggggaaagagaggcttgggccagcagctgatgggatgtacaatggctttactttcgtcatcagagactaagaaagcaaaggtgattgattggtccacacagagtgaaaagttaggaccatgattggtcaatgacactgtgcttggacctttgtgacctttctacagtgtcggactctgcctatgcctttggaccaagcatatcctttatctgtctgcaggaggataggttatgggatatgaagatggacagatcacagactcagaggttgagttcttagagatgtcatgtagacctcagagtgtctatggagaaggactgaggactgatgtcccaggtctcttgttcagcaaggagcaaaagggtagtcaatgtccttagctaaagacctgacttgatgctgctggtagtcttagctgtggagttgctttataactcttaaaaatgatcatttggcaaaacattttccttttgtctattcttgtctctggttccccatcagagaaccgaaacacaagttccctttctgggccttgatgtagatgtgtgtctctgcctagcctttcaggtgtagggtctatgttcatggctatacatccttccagatttgttcctcatggccagtgtgtgggagaatgtcccaagagagctgggacattgatttggatttgggttagttacccgtaattcactgggtagacacaaactacaggatccatcctgtcaagatatgcagacaaacatctccctgtgaagtgggagcaggatatgggtccttagtcactccatgggtagcatcttcctggcattgtgtatggtcacacacttgctctgaggcagcagatgattacaactcagtctggtgtgctaagcatcatgcacaaaggaccaggccaggcatcttcccttcaagactctgacatggattctttttctcacaggtcctccatcattcccaaacataactggtgagtcctgacctcctgtaactcctctctatcctcttcatccctattctggacacagccacagccaacagctccagagtgctgggactccagtcttctgtctgccccaggaccttcaacactctccatatagtacaaaggcagcatgtattgagtcagcaccatcctctgcttgactcagtgtcatctgagaggtgcagcacttaatccattttgctaaacttcactccctgtgagaattgctatggcggtcctttcctattctgtttgtctagaaagcgttgtcttttgcaatcgttatatgacatagggacggagggtactgctctttctagattcctaaggtatagatgccataattcttttatcagttatgtcattcatgacaaaatacctcattgaccacttgatggaaacacctgagcacggttaggaccaacccttgctgtcaagttacggacagtcttttattcagcttcagtgcttctgtgtccaatgttatctgctcttaaccagagtcccttaacagacctcgatgcacaaggcttttttctaatctgttttaattcccacccccccaaccccccagattgttagcctacaatatatccttcttatgctaggtctgttttcagtatgtcaaccaagagtttagaaagagacaaaatattctgggatcttcttgaagcctgtgctggagcacagctcagaaagacaaggagaaagaaagaaattagaaagagggcctatctttcttgtgtatatctgcagtgatctagtctgtccacaaaaatctatcttttatttacttcatcccaggactaataaacagatttgacctgagtccttgtgaggctggactcatgatcaggacttgaggtctttaatgtgggcctttgctggacacttcctgttccagtcagaaccctgtggcattgccagaatacataagccctggacgctgtcatttggaacagcagaaatattgtagtacatagtgcttcctgtagattttctctgttctccagagagagtgacacccatatcagcaaacacgtgtgctcctgagatagcccctgagataggtttgatagcccctgaagattctttgtgcccagggtgcagaaactttgcaccagaaatctaagggattggtatctacaatcacctacccactgaggagtcagagactcaaggaaagcctttcaccacaagtacaggggacacctgactatggcattggtggaacttacctaatgactaccactttatctcaggaaatgattcttcattggcgctgaggctggtaaatggatcaaaccggtgtgagggccgagtggagatcttgtacagaggctcttggggcaccgtgtgtgatgacagctggggcatcagtgacgccaatgtggtctgcagacagctcggttgtggctctgctctgtctgcaccaggaaatgcttggttcggtcagggctcagggctcattgtcctggatgatgtgtcttgctcggggtatgagtctcacctgtggaactgtcatcatcctggctggcttgtccataactgtcgccattctgaggatgcaggagtcatctgtgcacgtgagttgggtggaaccctctactgtcttcttccagtatgaacgttcttcttatccttggatctcacccctcagtgcatctgtctctcttataaactgaaactgcctcatttctttaccagtagtgatttttcacctccttcaacaaggttggttgtggaaattgtcactggaaacccacacctaggctttggtagaagaatcaagaagaaaatcacaggcttcagtgctttttctaccatggttgagttctatgggaacagggggaactgtagtttatagactggaatatactgtatcaatgagcatacaccacttcaaagtgttttcaggggaagtgtggtttcctcagaccatagcagttcccaaggtttctgaatgaggcctattggttggcactgtgaatatgagtatgtacagagaaatttttaggatagagatgggtatctatatcctacaaaagaacaccttcaatttttctaactcaagtctatttgattgggattaatccaacactgaaaactctacgctaactttaacccaacagaaaatctaacccaaaccctatcctgaacactaaccctaacccaaaccctaatccccaaaccctaaccctaactccctaactctaaccctaatccaatataaccctaacactattccaatcctaacattaacactaacactaatctaaccctaatcctaaaccaaatcctaaccccctaagcctaacccaaccctaatcctaaccataaccctaacccaaccctaacactaacccaaaccctaaccccctaaccaatcctaaaccaaatcctaaccccctaagcctaacccaaccctaatcctaaccataactctaacccaaccctaacactaacccaaaccctaacccaaccctaaccctaattcaaaccctaaccccctaacccaaaccctaacccaaccctaaccccctaacccaaactctaacccaaccctaaccacctaacccaaaccctaacccaaccctaaccccttaaccaaactctaacccaaccctaaccacctaacccaaaccttaacccaatcctaaccctaacccaactctaaccctaaccctgaggcctagatggttccatgtaaaaatttgtcctggacaaggccaattaacatctgaatcactgggcagttatgaaatacaaagttcagtctattaccttgtccagacacatttgtcaccttcttccagaaggtggaatactagttgagcctcacaaaaaaaaatcttcctatgagtatagatggctatcaatttctacttggtggtggggggtgagcagggcttaattcaaagtctgcccagtgtcacccgctcaggttccagattagtcaccttctgatctaacatggcttctttttcttacagtccctgaggtgacttctcccagtccaggtgagtccaggtgtcctttaattcccatgtgtccctcttttctttgcgctgctcacaataccaggcagtagctacagagtaggtagggatcaaagaaatattgctgccccagaaccttctgtgttttccttagagtagaaaagtaccttccgaggagctcgcatcaccctctggcctgacccagtggaataagaatgttacagtaattaatctatgttattaagcagtactttcctgagctattgggatctattctggtcaaagcattgtcttatccatgcattgtgtgttagggggcacctgagagttctcatgacaacatttaggagagagttaaagttgccagcaggtctggccaccttactatccccaaggtgggcatccctgagtgtggtctagggtattcctggctctgtataaaacgagtccctgcctcccagccatagtgacttcctggctcctgcaccccatgtcccagccacactgggcttcacccttgattcatgaaatctcattctaatccagctttgtttccctttctaggttggtggactacaagtccttcctatggtaagtattttatttcttatctgtggtgggtcaaaaatgagagggaagagagagagacacacaggcacacagacacatagacagacacacagagaatatgtagagggagggacaggcattacagccaaggtatatgtttctaggggatgtccccagtgacctattttattcaaccaggccccattacccaatgattattctatattatcaaacaattaatctataaatctgctcaaagctctcagcatacagtcacaggattggatttatgagttggcctccacgtctttaataatgacattattagtatatgtttcaaatctaacccataatactatgtctctgcaagagggtaacagcatttgactccgtgaactggataggtagaaatagctatgtagtcatgttccttgctctagatgtctgaattcatcagagagattcaacacccctccagcaaactcaaagatctttgggaaaaaacccaaggtgggggctaggaattcctttgcatccagagtccatggacacagatacaagtggcctatttctcaccattgtctgccagtcagtgagagcaagagtttactggcttaaccaatgaactccaggttcagtgaaagatcccatttcaaaacacatatctgtgttatccccaactactgatgaacattatgtcacacacacatactcacactcatacatatactcacacacactcacatacactatcacacacacactcatattcacacattcacacacatatattcacacacacagagtgtgtatatgtgtgtgtgtgtgtgtgtgtgtgtgtgtgtgtgtgtgtgtgagagagagagagagagagagagagagagagagagagagagctctaggcttcaacgagcgagccagggccaggctaacttttattgggttccttaagcatttctccccatgccaggcaggtgtgcagtgtgttctggggttcatccacgtttcccctctttcttgacagtaaactatacttgtggaggtttcctgacccaaccctctgggcaattttctagcccattctaccctgggaattatcctaataatgccagatgtctgtggaacatcgaggtcccaaacaactaccgtgtgactgtggtcttcagagatttgcagtaagtgtgggtgcatagcagatgttagccaatgtggggtgcctttgaaattcctgggggtgatagacaagttggcatttacaatagaggttacatgtttgaagtgggataagagtcgcccatggaaggcggtgaatctgtgcaagatcacatcagaaaatactctggcttaaagtcccagggtgtcatgaatttgctctatggccttggggtgccactttcctaagcctcagtcagaagaaggggctagaatgcctgctctcctcatatcctcatcttgttgatcaggagttcaccagagcatttgaaaatacttagagtaagccgattgtggtggtgcacgcctttaatcccagcacttgggaggcagaggcaggcggatttctgagttcgaggccagcctggtttactacagagtgagttccaggacatccagggctatagagagaaaccctgtcttgaaaaaccaaaaaaaaaagaaagagagaaagaaaatacttagagtattctcagcaggagggagggaggatctgtgacttgggtaatgacagtcttgggagcacaatataaaagtgtgcctgtcctgtgcggacctttcctcatcgatcccttcctttctgtgagtccccaggaaccagggtgctagtatcaactgctgcatttggcaccatccatatgcttacaaaggaaaatgttcttgagcagggcgacatctacaagagctcactaatatacacaacattccgggaggcgagtggcccagatggccaagaaaccatgccagttttctctagcaccccaagagcagtgtccactgcttgtgaccttttatgaactatgttttccccatgcagtgctccgtgtgatactatcagcaccctcttcggtatacatagcgcacagtgtctatcttagtggctgagagatctgagcattacagaggtccagggtttatttctttctctgttcacccccaccactctgatgtcattggcacttgttttattctggaagggacctggaagcactttgaaggaacaaatcaagatttctcttgtgaccttcctgtgttgatttaaagggcagtcagggagagagattatagatctcttacatgtggccttagagggcagtacgaagacaagccatggcagtcttggcaagatgaattcccctgggtttaagaaaatcctctttcccttcaaataatgaacctggttagggtctccatggcaaaggctcctgaggcctgagcactcatcaattgctccttttgtctctccaggctggaaaggggctgcagctatgattatatagagatttttgatggcccccaccacagttcacctctcatcgcccgggtttgtgatgggtccctgggctctttcacctcaacatccaacttcatgtcaattcgcttcatcactgatcacagtattactgcgagagggttccaggctcactactactccgactttgacaataacaccaccagtaagtttccttgttagaacaatggcttattaggactgcaggtgccactgagagcctactgctcctgtattttcttggggacataaaatattagatttctctgtaacataaaatattagaacaaccatggcccctatgattgagttcatgcactgtcaattgagagagactgtgtggtgagtcttggggctctggatgtctaaaagagtgccaagggccagcattggctgatgagagttgtcctggccttactgtggttggcaaagaatataaaggtataagatgatgttctcaatagacagtgagaaggcagtgccagaaggaattgtgggtgacaccaggcttgaaactttaggaccctcccagagtaggagtcactggccatgtcctgagacctaatacatttggcttctgtctgaagatgggtaaagctggacatcttaacagaggtggactactgcaacagaggctctatggatccagtttgagatgctatatgaacctatatctacattggtgaagggctgagcctggagagaaccatggtctctagccggtcagcatcagaggcatcaattttctccttagctaaagtacattacctaatgctatcattactatcttattgtacagttgctctccttcatgggagaatgctaacttggcaacaaatgttttggatatttaaaaatcttatcagatccacatcagaaaatcctatacctctaagtgccctcattgggcattcctgagatgaggttgagtgtagccatagggtaccctcggagccatagtgactctgttttgagcatgagtgttatgtgtgaaccatgtgagtcagccatcctgatctgcgtttctttagctggggaaagaccctcatgagggttgtgggtttcgaatcctgactctgtctgctctgatcttgcccttcagatctcctttgtcagtcaaatcacatgcaagccagcgtgagcaggagctaccttcagtccatgggctattctgccagggatcttgtcattcctggttggaactccagctaccactgtcagccccagataacacagagggaggtcatattcacaattccctacacaggctgtggcacaatcaaacaggtaagcctggcacggcccactctatttcccactgagcatgctttctttagtcaaaaatgtgtgtgtgtgtgtgtgtgtgtgtgtgtgtgtgtgtgtgtgtgttttagcatgcctctgcatgcatatggaggtcaaaaagcaacctatgggagttggggttttccttctaccatgtggatcgtgggactagaactcagattgttaggcttggcagcaagttcctttacccactgagccatcttagcagccctgagcatgacttatcacagtgatggctgccacgcttctagaaccctggagatctacaagttatggctgggatgtaatcagaacatcagaatggagactgaagcctctggtacagtagctatagctacttctaaataggaggaatgcagaggaagaaaatggggaattccagtagtgtccagcagagggagcactcagcaggcagccgctcacacagctcccagaagcttgagagttttcagaagaagaatttttcttatggtttcatttgggatgtgtcaaagaagcagaggcccctaaaccaaagatacaaatacactttacatagctaaggtctacaacagccatcagctgttaaatgcgttgttatgcctttgaggaagccagtgccctgctgagactcacactcacttagttgccacagttgccatttcttgagtgatcaacaggagtggtggtggtggggcaatgctttgacatcatactatgacattgtcgtctacaaaattcataatggagtactgaatattgacttacaaaagcatgtaccctgcttggcattttgagtagtgtggcccatgggccatcatggtttagacaggactagtagagtggtcacccatcttgatttgcttgagacttggtgattttaacatagactgccctgttgtcatcctgtcagtggaaggcactgtgctgagtccatgttctacttccaaaatgttattttattattttatgttttgaagcaaagtttctccatgcagttcttgatggttatgtagaccagatttggctttgaactcacaaagatctgcctacctttgtctcttgaatcctgggattaaagactcacaataccatgtctggctatgcccaaattcttaacaagtactcttgtattgtcagtcccactttagaagtgaggaaattgaatgaagagagatcaggcccattgaccaaagccatgtagaccaataggatagggctgacaccacaagtcaagactctcagaaacatcctgctaagaaaaagaagccaaacacagaagagttagacaaaaattctatgtatatcactattagatagaaatgtgccattcatgctaaatttagcaaaagagaatgactgtgcaataggaaaaagggtttcatgggtggcctgcttctaggttagcaggatggagatggttgggcaatggaaaagtggtgtgtcttactatggtggtatgtacaggacagacaagttcagatgcctgtaatgcagcagatacgtgataagcatttgccatatgccaggaactgtgtggagggctacagggcattccttcccgttcctctgacacacagtacacactgagagaggaactgggcactcagccaataaggcgggccttgggtcatccctatgactgtgatccagatctcctggtgagactctaaacacccaggagttccttcagaacttagtgggtgagatgagctactcacagagaagaatgcgtatcagccaggcactgtgtgaagggctacggattccttccgcttcctctgacacacagctgggtttgttattttgctctttaagttaaacatgtcacctccagcctttggtgagtcggccactgaaggtgattactgctccttttttcaaatgtgcagcccggagaatcaagcatctcagaagcttgctggtggcacttcatagatcactgagggcatctaaccagcgtgccagccctgcctgttctaactggaatgagcctgggtagcacttgctgcattcttgtctccccacttatgaaacagctgcagaacctatcaaactgagtgcttcagaggcagggctaattttatttacctttgccatccttggtgttctggtacagaacccaagactttatgatagtatcaacaactattatgtatggcagggcactgaacggagacttctacatgacttataaaagtctcaggaagccttttatcctcccttaatcacaggagataaaaaaaatcttagagaaactgagccaagtatccagggacacatactcaggaactgtggagtcagtgtgctctgtagcaggctatttatggcttcgtcaggctgccacacactgggaaggtgatgtgttggctggtgtcacagaatggatgagctttctcacagtgaaaggcatgccaggacactgagaacccaggtctctcagtagattcacacataggactttctgtcacattggttgtgtttctacctaggcagatgcctaagaagaattttaatctagagtcataatggccccttccagtcaagaaataagttttcattctgtgcttactgtttagagaagattcagaactgagctctgtcacagagagacatatatggacttcatgtgtaaactcatgttaaatataatttgagagacatatgtggtttgtaacaccattggtaccaaaatatgaatggttaaaaactttgaagaattcacagaagaaatacagtatgcttcccctgagaacttggaaagcaaaagttctgtctgttggttcttctccagacctgggtctggagtgcaggctctgatgccctctgtcgatcaggctggccatgccctaggctctggtcagtctgtggagggaacgatcaggctagagaagataaaggaagagtcaacaaagttacccccaaagctcttgtcttatgtttagattacattacatgcagagtagagttctcaacaatagacaagaagtagaaaggtctttatcctggaaaaaaattaattatatgtaagttgcatgagtgcactggcaacaaatggggccttgtccaggtcccaaccaattagaacagagcttcaccattcacagctggcatgactagagtggaaaacactctcttcatctgtctctgtttcccccctcccccatgtgtgtctatctgtctgtctctgatctgtcctgccctgccatacctttttttttccactatgaagagtacaattgctttaaattctggatagtgtccacgccacccttctattattctgctcttacaacatacagggctctaagcataagggactgggagaagtgggtcacagcactcaggctgtgaagagccccactggtgcacttgtgcttacctctctggagccagagtcccgacatggtgcttccaggaattactgttcacgtgtgtcctcttggccactgggctatacctccctgccacaccctttgtttatcgtagtactccccagacgctcccttcattcatgtcaactgcttcacagactcctacagatgctactgatgctgctgttataccaagaaaaaaaagagaaagagacattgttggacaccaccctttccttgagatgctcacaggccccaggcataaggctatcagcaaggctcagaaggtggcagatacagtaaatggcgcaagacaccagcctccttaggagtttgccacccagtggaagtcacagtggtgaatcattccataacacaatgacataaggcaggcatgggctcagggttgctatgacctcattcagatgttcacagaggctctggggaagtctcaaccccaggggtcaagacctgcttcagttataactgcaaactccatggcttgaaaattccaccgtgccaatcaccacactgagaaagtcaccagtcactcaaaatagaaagcatcctatgctggtactaccaggcccctctcataagtatgagaccaagattttgagaatgaataagctcagaatatgctgctctgagtcctgaaccatggagtctgagcttggtcagatacacttcaggtcaggggccatccagaaaccctagatttgtcacaagcaaaagcaacaagtgtggattatcatggcctctaccaccatgtgccagagaatgtgggagagtcggggagagtttgctggctaagctgatgctattaccattctaggtaatagcagccacagtgcagacaggtgccttctctgtaggattctgcaggagtctgactgtgtcatctccctctctctaaccagcatccctgctgactctatctgctttcacctactaggctgacaacgagaccatcaactactccaacttcctcagagcggttgtttcaaacggcatcatcaaaaggagaaaggacctgaatatccacgtcagctgcaagatgctgcagaacacctgggtcaacaccatgtacatcaccaacaacacagtggagatccaggaagttcagtatggcaatttcgacgtaaacatttccttctacacatcctcctccttcttgtttccagtgaccagcagcccatactacgtggatctggaccagaatttgtaccttcaggccgaaatcctccattctgacgcctccttggctctgtttgtggacacctgtgtggcttcgccacatcccaatgacttctcatctttgacatatgatctcatccggagtgggtaaggacttctgtgtgggatagatgccaacttttgctttataactcacacattagtagccaaaaagctcagggaatgaagatttttggctaactgaacttcccacaggtttgggtttagagacttttctccgtatggcttttgcctttgtggaaccctcacactgtcccctgagtcacatttctgactatggggatgggtaactaggcaccatttcttgttaacatgtgggacgagaggaacgacttatcaacggtcattcaactagtcggctttaaactggggttagatcttcagtcatcaaactctagtcttagggttaatcactgatttgagagcagatccaaactaaaatatctaaatctctgggtcagtttctgcaccccaagttaactggagatagtggcaagaagtaggtgtttggaagtttaaatgagaaagatcactttattctcaccagatgggttactgcagcaaaggtacacatgagcctcacatcctccatccattagaaatgcaagttgtggctcaggacatgttgaggttgaaccactggagaccaggttggctgccctgatctcctcggctctaccctccctggaggaggctctttggggaggtgtgatgctcctacactcttggaggaggcctgacatcctgggtgtacaagcccagttcccagtgtgtaatctctgctggtgggcatggtacttcttggcttctagtatggcccttggcacctcagtacccatcgcctcccatgggactgctgatagtaattatggcagtaggcttgaatctcacaccagcctgagacaccaaagaagacagcctcacctcctaggaactatttgaatatgaatatcagttcagcaaacagactgaaaatcatcttgtccaatctgtctagttgatcctacttgagtctgcccagttggaggcagcaaacaggagaaaacttacctaggcccttcttgctctaagttgtaactgtcttagttaaggttatactgctgtgaacagacaccatgaccaaggcaactcttataaggagaacgtttaattggggctggcttacaggttcagaggttcagtccattatcattaaggggagcacagcagcatctagacaggtatggtacaggcattgctgagagttctacaccttcatctgaaggctgctagttattatgaagacttcagctaggaatagggtcttaaagcccatgcccacagtgacacacctactccaacaaggccacacctccaaatagtgccactccctgggccatcacaacaaccaagtagtttctctgaatggatatggaatgactgaagtggatgcaaaccagtgagcaattagtttttctctgctaaaggttctttctctactctggcaacattttgccatatctgtggccatgacatttgtaatgccaactgagcctagagcatagggactcactagctatggctggttagttccctcaccccagccctcatcctcatctccacccctactcccactccagatctttcaaatgccccagctctgaacaaacctccggctagcctttcacttggcatgctaatagggctgcagtaaagaaaaggagtctaggtatttcagggcagttgagttgatggtagaaacaggaaggaagctctgggagggaggaggaagaaggaaggttgacatgggactaaccctctgggagagccaggctgctctggaacagtccacctaggaagcacttcttttctgaagtcccaggcccattctgctcctctttcagcacatccccttcagccttgctattataagcctcacatggtttgacccctggagacagcctcatttgcttccacagtggaattccttaagtagattggccgggtggttttctttcattaccagcaggtgccggagggaagaggaagcactggatgctggagtagggtctttgagagaactcaccatcgtggagatgtggttacataagggcaggcctggtgagaggctcagcagagaggccctaggagtcaggggacagggaacacagaagatgttcagcttatatctgaatgtcaagcctagtgacaaggcctagtgacaaggaaagggaagaagaggccatctcctttcctttcctatctctggcttgctcttggattccaaaattgagtttccttctctacttccctggttgctccggcccactaaacttatcctcatggctggtgatttgcgctgtcaacatgctggtgaggcacaagagccgctgggacttatgtgcacacctcacaatgagtgtgtggaggcactgaaggctcaggcagccaaggtgacagtggaatgcaggggaattaaggtgggtccatgcttccacaagctaacaacttcctctccttacttccagatgcgtacgggatgatacctaccaatcctactcctcgccctcaccacgcgtctcccgctttaaattcagttctttccacttcctgaaccgcttcccctcagtgtacctgcagtgtaaactggtagtatgtcgagcgtatgatacctcctcacggtgctacagaggctgcgtagtgagatctaagagggatgtaggctcctaccaagaaaaggtggatgttgtcctgggacccatccagttgcaatcccccagcaaagaaaagaggagcctcggtaggtggttacgctcaaatccttccttccactggggcccatgattctagggagaagggggaatttgggatgctttttgtttatgttatgggccaacccaaactgcacacaagttgatgaattaggcctggttactgccttcccccaagacttaaggtcacatgtaggtgataggcaaaagatttgtgacctggaaggcttgattctctgggtttggagctcccagaatcctcagttataagctgagagggttaatgtctcttaggactgtcaagggcttgctaaagcaatgctcgttaaactgccatggtccttctctggtgcaagtccctggatgtttgatgaatgttctatagtttttgttgttaacataattgatggtaatattatgcctcaccacaatggtgacaggtgttttgaattaaccaatggatgggatgtggaaatgcaggcagcatggattggttttgactgctggaggttgggggttctagcacaaaaggggccattttgcttcccacctagacagggtggtaggtataataatttctgctgtgttgttttgttgctgtttgttttgttgtgggtattgactagaaaatgtccacagtgggactcctaggacttctgacctaggctggggccagatctacctatcttctaggtagggagatacaatggccagggtgacaggggcagagtggatttgttatattgctacaaacctacctctagaaaggggcaacagcaccaccccgtgggagccatctgtgatagctctctgtcttcatgccccatcctagccccaccccacacctggtcccagactcttctccattcattcattaactatttaccagaagcccattgtgtggcaggaaacacacaaacaggcacagtcagagcagacttgtatgcagtgcctctgatggggatggggctatgtagaataggacagtgggcaaatcgaggagccaggtggtgcctgtttctttttatacccaaagtcaccacagtggctcaggtcctggatttctttggcctgggactcttatcaccatttcccaactggcttaaacgccacaactctctcccttctcactcattttcagacccagaattgtcctcccaaagccaaggcccgagttcccactaaaaccccccctaactctcttggttgggaagacaacgggggtaagtctctctagaccaacactcagctgctacctgggatactggcagtctcagtttccccttctcctatctctttatccctccccactggaaagtcctgacaagggctaccctgttccttgtctcctcaaggtgcctttttctgactgtgtccttttcccaccccatcatcttgctctctgttcttcttcctcagacttggcagtggaggatgtgaagaagccagcaagctcccaggccgtctaccctactgcagccatctttggcggagtcttcctggccatggtcctggctgtggcagccttcacattgggaaggaggacacacattgaccgtggccaacctccaagtactaagttgtgaagtgaaacaacccagacattggctccacaagcacagattcccagaaaagatggaagacatgagagcctgacgcttggcacccagatacatggtgactaggattcccttagcacaaatgcttagccaagaacaatgagatggcaaagaagaaaggtgggggccaagttttcccaggatctacagactgaaggctaggaagaatgtcataggagaatgagaccagtgtctacaatcacaggcaactgtgagctgagcactggtggcagccatgctttctctcgctagactttcccttttccccatgtatagccaactttctccatctgtagtgtcgatgtcagctttttcttacaatactgcaatactgaatataaataatctttctcatggcaagtgtctgcgtggtcattgtctgtataggcttaccaacatactggattccctcaagtcaggcagacagcttcggtgacatggccacagaaatgataaaagggcaagggacttgctctgtggcttccagaaccttcaagagaatgatcaactatattcctccaagactcttcatctttccatttgtgtcacacagagatgttcagagctatgggctgggaagggccaggggagggtacccatgcctaggacaggaatcctgtttgcatgaaatctccaaggagaagaaatatgacagatgatcgtagaagataaagaaatgtagccaggtacccaggctggcaggccccagcttctaggtactgtgctggctatgccaacacagatcccaacaggtagctgctaggatgatcctaactatgaacatgttgctagagttaggtgagactccttgggaccaagggcaggagaagttcagctgccagcactgacgagagatgactgagagctgcccatcaccagccttgatgagatttcagctcctatgagagagctcatgggatagcacacacacacacacacacacacacacacacacacacacacacacaccctttcagcatgcagtggagcaaaaggccaggggcatagcttctggctttcattacccatattcatgtcccaggctggggacatcggggagaatcctgagggatcactctgtgtggggtagcctggaaaacaacagtagtagagtgaaatgtagacccagcctgtggctagatctgaacatatgtggacctgcttagagatctgtggctctatgttgggcaacaccctcaaatgtatgacagacacacagtgggtaaaaaaacaggactcagcaaatttgttttgagctgtgtcttgcttgccttccaattccttccaagcagaaaaggctcccgatcacactcttgccatcccagtggtggagacaagagggcactacagctcaacattagtgccttgttgttactgtacctcccttcctttctccctcccttgcttccttcttccttcctatatgaattgtgtacatatagatacttctctctgagagagaaagagagagagagagagagacagagaaagaaagagagagagacagagagacagagagagacagagagacagagagacaaagacagagacagacagagacagacacagagagagacacagagacacagagagacacacagacacagagacagataggagagagacagagagacagagggtgacagtgagaaagaggcactttgggtgtcttccttgagagctagctctccaatttacacaggtaggatctcacgctgaacccggagccaatcagttctgcgggtctagaacaccagtcttcaccttctcaagtgctggtttcagagacagctaccatgttccccttctttctccctttaaccatacaactattctgtgaatcttgacccacccagacttcacaagtggacagactccaggagggaagccaggtcattcttacttcatcaaggaagtttacagatctcaagtttccagactctggggcatctacaaggttccagcacatccccctctggtacaatggacacaccttaatgtgttcctcctcttcctcctccacacactcagagtcacacattccttccaagaagagaagatcttggtcggccccagcactgggtcacattgagtacagagtcggtggacacccctgaggtccctagagcactctccacgggatcttaggacctctggtgagtggaacacaacttctgccaggaggcaggttcgagcaccagatatctgggcaccttccctgcaagaggagagcctgcctgcaggagtgctctgaccactgaaattcaggagagagctagtctccctgaatagagagataacagaatcccaagaggaaaaagctctaaccagagacaactataacaactgacaccagagattaccagatggcgagaggcaaacataagaatcttactaacagaagccaagaccactcatcatcatcagaacacagcactcccacctcacccagtcctgggcaccctaacacacccgaaaagctagacccggatttaaaagcttatctcatgatgatggtaaaggacatcaagaaggactttcataactcacttaaagaaatacaggagaactctgctaaagagttacaagtccttaaagaaaaacaggaaaacacaaccaaacaggtagaagcccttaaagaaaaacaagaaaacacaaccaaacaggtgatggaaatgaacaaaaccatactagacctaagaagcgaagtagacacaataaagaaaacccaaaatgaggcaacactagagatagaaaccctaggaaagaaacctggaaccatagatgcaagcatcagcaacagaatacaagagatggaagagagaatctcaggtgcagaagattccatagagaacatcggcacaacaatcaaagaaagtggaaaatgcaaaaagatcctaactcaaaacatccaggaaatccaggacacaatgagaagaccaaacctacggataataggagtagatgagaatgaagattttcaacttaaagggccagcaaatatcttcaacaaaataatagaagaaaacttcccaaacttaaagaaagagatgcccatgaacatacaagaagcctacagaactccaaatagactggaccagaaaagaaattcctcccgacacataataatcagaacgacaaatgcactaaataaagatagaatattaaaagcagtaagggaaaaaagtcaagtaacatataaaggcaggcctatcagaattacaccagacttttcaccagagactatgaaagccagaagatcctggacagatgatatacagacactaagagaacacaaatgccagcccaggctactatacccagccaaactctcaattaccatatatggaggaaaccaaagtattccacaacaaaaccaaattcacatattatctttccacgaatgtagcccttcaaaggataataacagaaaaaaaaatacaaggacggaaaccacgccctagaaaaaacaagaaagtaatccttcaacaaaccaaaaagaagacagccacaaaaagagattgccaactctaacaacaaaaataataggaagcaacaattacttttccttaatatctcttaatatcaatggactcaattccccattaaaaagacataaactggggctacacaaacaggacccaacattttgctgcttacaggaaacccatctcagggaaaaagacagacactacctcagagtgaaaggctggaaagcaattttccaagcaaatgttctgaagaaacaagctggagtagccattctaatatggaataaaatcaacttccaacccaaagttatcaaaaaagacaaggagagacacttcatactcatcaaaggtaaaatcctccatgaggaactctcaattctgaatatctatgctccaaatgcaagggcagccacattcattaaaaaaactttagtaaagctcaaagcacacattgtacctcacacaataatagtgggagacttcaacacaccactttcatcaatggacagatcgtggagacagaaactaaacagggacacagtgaaactaacagaagttatgaaacaaatggacctgatagatatctacagaacattttatcctaaaacaaaaggatataccttcttctcagcacctcatggtaccttctccaaaactgaccatataattggtcacaaaacaggcttcaacagatacaaaaatattgaaattgtcctatgcatcctatcagatcatcatggactaaggctgatcttcaataacaacataaataatagaaagccaaaattcacatggaaactgaacaactcccttctcagtgataccttggtcaaggaaggaataaagaaaaaaattaaagacattttagagtttaatgaaaatgaagccacaacgtacccaaacttatgggacacatgaaagcatttctaagagggaaactcatagctctgagtgcctccaaaaagaaactagagagagcacacactagcagcttgacaacacacctaaaagctctagatcaaaaggaagcaaattcacccaagaggagtagacggcaggaaataatcaaactcaggggcgaaatcaaccaagtggaaacaagaagaactattcaaagagtcaaccaaatgaggagctggttctttgagaaaatcaagaagatagataaacccttagccagactcactagagggcacagggacagcatcctaactaacaaaatcagaaatgaaaatggagacataacaacagatcctggagaaatccaaaacaccatcagatccttctacaaaaggctatactcagcaaaactggaaaacctggatgaaatggacaaatttctagacagataccaggtaccaaagttaaatgaggatcaagttaatgatctaaactgccccatatcccctaaagaaatagaagcagtcattaatagtctcccagccaaaaaaagcccaggaccagatggatttagtgcagagttctatcagaccttcaaagaagatctaattccagttctgcacaaactattccagaaaatagaagcagaaggtactctacccaattcattctatgaagccacaattactctgatacctaaaccacaaaaagacccaacaaagataaagaacttcagaccaatttcccttatgaatatcgatgcaaaaatactcaataaaattcttgctaactgaatccaagaacacattaaaacaattatccatcctgaccaagtaggttttattccagggatgcagggatggtttaatatacagaaatccatcaacgtaatccattatataagcaaactaaaagacaaaaaccacatgatcatctcgttagatgaggacaaagcatttgacaaattccaacacccattcaagataaaagtcttggaaagatcaggaattcaaggcccatacctaaatatgataaaagcaatctacagcaaaccagtagccaacatcaaagtaaatggtgagaagctggaagcaatcccactaaaatcagggactagacaaggctgtccactttctccctacctattcaacgttgtacttgaagtcctagccagagcaatttgacaacaaaaggagatcaaggggatacaaattggaaaggaagaagtcaaaatatcactttttgcagatgatatgatagtatatatacatgaccctaataattccaccagagaactcctaagcctgataaacagcttcaatgaagtagctggatataaaattaactcaaacaagtcaatggcctttctgtacacaaaggataaacaggctgagaaagaaattagggaaacaacacccttctcaatagtcacaaataatataacataccttggagtgactctaactaaggaagtgaaagatctgtatgatgaaaagaacttcaagtctctgaagaaagaaattaaagaagatctcagaagatggaaagatctcccatactcatggattggcaggatcaatatagtaaaaatggctatcttgctaaaagcaatctacagattcaatgcaatctccatcaaaattccaactcaattcttcaacgaattagaaagagcaatctgcaaattcatctggaataacaaaaaacctaggatagcaaatactcttctcaaggataaaagaacctctggtggaatcaccatgcttgacctaaagctgtactacagagcaattgtgattaaaaactgcatggtactggtatagcgacgtcaagtagaccagtggaatagcattgaagacccagaaatgaacccacacacctatggtcacttgatctttgacaaggaagctaaaaccatccagtggaaaaaagacagcattttcaacaaatggtgctggtacaactggtggttaacatgtagaaaaatgagaattgatcctttcccatctctttgtactaaggtcaaatctaagtggattaaggaactccacataaaaccagagacagtaaaacttatagaggagaaagtggggaaaagcctcgaagatatgggtacaggggaaaaattcctgactagaacagcaatggcttgtgctgtaagatcgagaattgacaaatgggacctcataaaattgcaaagcttctgtaaggcaaaggacatcgtcaataagacaaaaaggccaccaacagactgggaaaggatctttacctatcctaaatcagataggggactaatatctaatatatataaacaactgaagaaggtggacttcagaaaatcagataaccccattaaaaaatgggtctcagagctaaacaaagaattctcacctgaggaataccaaatggctgagaaccacctgaaaaaatgttcagcatccttaatcatcagggaaatgcaaagaaaaacagccctgagattccatctcacatcagtcagaatggctaagatcaaaaattcagatgacagcagatgctggcaaggatgtggagaaagaggaacactcctccattgctggtgggattgcaagcttgtacaaccactctggaaatcagtctggcagttcctcagaaaattggacatagtattaccgaaggatcccgcaatacctctcctgggcatatatccagaagatgtcccaactggtaagaaagacacatgctccactatgttcatagcatccttatttataatagccagaagctggaaagagcccagatgcccctcaacagaggaatggatacaaaaaatgtggtacatttacacaatagagtactactcagctattaaaaagaatgaatttatgaaattcctaggcaaatggatggacccggagggcatcatcctgagtgaggtaacccaatcacaaaagaactcacatgatatgtactcactgataagtggatattagcccagaaagttagaatacccaagatacaagatacaaagcacatgaaactcaagaagaatgaagaccaaagtgtggacactttgccccttcttagaattgggaacaaaacacccatggaaggagttacagagacaaagtttggagctgagacaaaaggatggcctatctagagactgccatacccggggatccatcccataatcagcccccaaacgctgacaccattgcatacactagcaagattttgctgaaaggacccagatatagctgtctcttgtgagaatatgccggggcctagcaaacacagaagtggatgctcacagtcagctattggatgggtcacagggcccccaatggaggagctagagaaagtacccaaggagctaaagggatctgcaaccctataggtgcaacaacaatatgaactaaccagtaccccctggagcttgtgtctctagctgcatatgtatcagaagatggcctagccggccatcagtggaaagagaggaccattcgtgcaaactttatatgcctcagtacagggaatgccagggccaagaagtgggagtgggtgggtaggaaagtgcggggggaggttatgggggacttttgggatagcattggaagtgtaaatgaggaaaataaaaaaagagaagatctctcccctctctttgccaccaggaatcaagggctgtgccccctgttgtggcccagtcatcaatcacctgtatgagaacctcttccttcctctgagttctattagagggggcagccactctgcatcatgggccagaaccttctgggctgtttttttgttttgttttgttttgttttgttttgttttttgttgttgttgttgtttttgttttgttttgttttgttttgttttttttgtcagctggatttatgccacagttgtcttggaagaaggaaactcaattgagaaaatgcctgtgtctgatacaaagcattttctttactgattattgatctgggagggcccaggctattgtaggcagtgccactcctgggcaggtagtcctgggctgtataagaaagcaggctaagcaagccatggggagcaagccagtaagtagtgttccttcaaggcttctgctttgattcctgtctgcaggatcctgcctcagttttcctagatggtaggctctaccctgtgagccaaataaactgtctcctcctcaagttgcttttggtttatcacagcaatagagaagcaaaccaaaacactccttttagatcccttgccatattatccgtttctttgtaagtccatgatgttaataattttctcaatgaatctcttattcaaaatgacagtctaccttggtgtcccctgagcctcaaacctgaggcatttcagttactattcttgtccctgtgacatgtgctgacggacaagggacttactttgttcaccacttcaggggactcagttcatcatggtgtggagacacagaaagaggagtgacacagtacacactggtggcttccagaccaggaagcagagaacagacccaggagaggggctagccatatctttcaagcgtctgctggcgagttctatatcaacataacacaagcacacgtcacccgggaggagtgagccttgattgagaacatgcctccataaagatcaggctgtcagccagcctggaaggcattttcttaagtagtgattgatgtggtgggagggtcccgcgggtcccgccccgcccattgtgcccttccgccccgcccattgtgggtgggactacgcctgggccagtggtccaggcttttataagaaagcaggctgagcatgtcacaaggagcaatccaataagtgagtacctctctatggcctcagcatcagctcctgccccaggttcctgccctgtttgagttcctgtcttgacttcggttgatagtaaacagtgtcgcagaagcataagccacacgaaccctttcattcctagcctgctttggccatggtgtttcatcagagcaataataaacctaactaggacaaagggcatgcccctgttcccagtaacctcactccctccagcctggacctataacaccctcaggtggggcccacgtgagtctgagggggaacaaacacttcagactcagtttgtaagaggtaccacattgttttatgggaggaaagaagagctaggaatctcctattctaccatcttgcttgtaattgtcccctactcttaagtgataaattcttcagcagaaatataggtgggatttgtgttaaccttgagatctctatattctcacactcacacacatgcaggatcattggagacagaaaggacagtgtggaaatcagattgacttttttttttccacactgagagaaataattcctgaggttgtgacatttacctttggatagctctgagcgaggtcctcattaagacaggactgtaagcggctaatgcttttccgtgcattaggggcctttagataccatcagggctcttaagaacaggacagctttatagctcttgaaaggcaatatctctcctctttgaaagcatttcaggttcaaagaggggaaatttcccctctaggcagggaagggtacctcacactctccacagaatatcaaaaataactgaaacaacctttaataggcagtgagttggattgttagaagctgtgacagaaaaggctttctcagtaatagctgatttaaaagctaaaagcggtgtccctcaccaggaagagaaattaccaaatgataagtaacaggcttatttgaagtgggaggaccatcgagggatgcatgtggatttatacacacatgttacatcatgcgctcttcatgtcgaaattaccatagagtactaagaggaaatagaaggacaacaaggacatcgattaatcttcgtggggatatggacattttccctgaggactaagtctttagaacttccaggtcgacatcacttgggtctctgagtttgtgcccaag

SEQ ID NO: 82 - DNA, 6208 bp, Mus musculus
ccggcacaatggggatctccactgttatctttgaaatatgtcttttgtggggtcaaattctgtctacagcatctcaaacagctgttcccacagatggaacagattctggtttggccgtgaggctggtgaatggaggagacaggtgtcagggtcgagtggagatcctttaccagggttcctggggcactgtgtgtgacgacagctgggacctcaatgatgccaacgtggtgtgcaggcagctgggctgtggcttggccgtgtctgccccgggaaatgccaggtttggacagggctcagggcccattgtcatggatgacgtggcctgtggaggctatgaggactatctgtggagatgttcccaccgaggctggctctctcataactgtggacaccaggaagatgctggagtcatctgttcagattctcaaacaagcagtcccacacctggctggtggaatccaggagggacaaataacgatgtgttctatccaactgaacaaaccacagcagagcagacaaccattcctgattatacaccaataggaacagattctggtttggccgtgaggctggtgaacggaggagacaggtgtcagggtcgagtggagatcctttaccagggttcctggggcactgtgtgtgatgacagctgggacgtcagtgatgccaacgtggtgtgcagacagctgggctgtggctgggccgtgtctgccccaggaaatgcctactttggacagggccaagggcccattgtcctggatgacgtggcctgtggaggctatgagaactatctgtggagctgctctcaccaaggctggctctctcataactgtggacaccaggaagatgctggagtcatctgttcagcttctcaatcaagcagtcccacacctggttggtggaatccaggagggacaaataatgatgtgttctacccaactgaacaaaccactgcaggaacagattctggtttggctgtgaggctggtgaacggaggagacaggtgtcagggtcgagtggagatcctttaccagggttcctggggcactgtatgtgacgacagctgggacaccaatgatgccaacgtggtgtgcaggcagctgggctgtggctgggccgtgtctgccccaggaaatgcctactttggaccgggctctggatctattgttctggatgacgtggcctgtacaggacacgaggactatctgtggagatgttcccaccgaggctggctctctcataactgtggacaccatgaggatgctggagtcatctgttcagcttctcaatcaagcagtcccacacctgatgtgttctacccaactgaccaaaccacagcagagcagacaaccgttcctgattatacaccaataggaacagattctggtttggccgtgaggctggtgaacggaggagacaggtgtcagggtcgagtggagatcctttaccagggttcctggggcactgtgtgtgacgacagctgggacctcaatgatgccaacgtggtgtgcaggcagctgggctgtggcttggccgtgtctgccccaggaagtgccaggtttggacagggcacagggcccattgtcatggatgacgtggcctgtggaggctatgaggactatctgtggagatgttcccaccgaggctggctctctcataactgtggacaccatgaggatgctggagtcatctgttcagcttctcaatcaagcagtcccacacctgatgtgttctacccaactgaccaaaccacagcaggaacagaaaacagtttggccgtgaggctggagaatggaggagacaggtgtcagggtcgtgtggagatcctttaccagggttcctggggcactgtgtgtgacgacagctgggacctcaatgatgccaatgtggtgtgcaggcagctgggctgtggcttggccgtgtctgccccaggaagtgccaggtttggacagggcacagggcccattgtcatggatgacgtggcctgtggaggctatgaggactatctttggagatgttcccaccgaggctggctctctcataactgtggacaccatgaggatgctggagtcatctgttcagcttctcaatcaagcagtcccacacctgatgtgttctacccaactgaccaaaccacagtagagcagacaaccgttcctgattatacaccaataggaacagaaaacagtttggccgtgaggctggagaatggaggagacaggtgtcagggtcgagtggagatcctttaccagggatcctggggcactgtgtgtgacgacagctgggacaccaaggatgccaacgtggtgtgcagacagctgggctgtggctgggccgtgtctgccccaggaaatgcctactttggaccgggctctgggtctattgttctggatgacgtggcctgtacaggacacgaggactatctgtggagctgctctcaccgaggctggctctctcataactgtggacaccatgaggatgctggagtcatctgttcagatgcccaaatccagagcacaaccaggccagatctgtggcctactactactaccccagaaactacaacagaattgttgactacaactccttattttgattggtggacaactacttctgactacagctgtggaggtctcctgacccaaccctctgggcaattttccagcccatactacccttcaaactatccaaacaatgccagatgttcgtggaaaattgtgctccccaacatgaaccgcgtgacagtggtcttcacagatgtgcagcttgaaggaggctgcaactatgactatatcctggtttatgatggccctgaatacaattcttctctcattgctcgggtttgtgatggttccaatggctctttcacctcaaccggaaacttcatgtccgtagtcttcatcacagatggcagtgtgacaaggagagggttccaggctcactactactctacagtcagcacaaactacagctgtggaggtctcctgacccaaccctctggacaattttccagcccatactacccttcaaactatcctaacaatgccagatgttcctgggaaatattggtccccaacatgaaccgtgtgacagtggtcttcacagatgtgcagcttgaaggaggctgcaactatgactatatcctggtttatgatggccctcagtacaattcgtctctcattgctcgggtgtgtgatgggtccaatggatctttcacctcaaccggaaacttcatgtccgtagtcttcatcacagatggcagtgtgacaaggagagggttccaggctcactactactctacagtcagcacaactcctccagtgccaatcccaaccacagatgactacagctgtggaggtctcctgaccctaccctctggacaattttctagcccacactatccttcaaactatcctaacaatgccagatgttcctgggaaatattggtccccaacatgaaccgtgtgacagtggccttcacagatgtgcagcttgaaggaggctgcaactatgactatatcctggtttatgatggccctgaatacaattcttctctcattgctcgggtttgtgatggttccaatggctctttcacctcaaccggaaacttcatgtccgtagtcttcatcacagatggcagtgtgacaaggagagggttccaggctcactactactctacagtcagcacaaactacagctgtggaggtctcctgacccaaccctctggacaattttccagcccacactacccttcaaactatcctaacaatgtcagatgttcctgggaaatattggtccccagcatgaaccgtgtgacagtggccttcacagatgtgcagcttgaaggaggctgcagctttgactatatcctggtttacgatggccctgaatataattcttctctcattgctccggtgtgtgatgggttcaatggatctttcacctcaaccggaaacttcatgtccgtagtcttcatcacggatggcagtgtgacaaggagagggtttcaggcttactactactccacagtcagcacaattacctaatgactaccactttatctcaggaaatgattcttcattggcgctgaggctggtaaatggatcaaaccggtgtgagggccgagtggagatcttgtacagaggctcttggggcaccgtgtgtgatgacagctggggcatcagtgacgccaatgtggtctgcagacagctcggttgtggctctgctctgtctgcaccaggaaatgcttggttcggtcagggctcagggctcattgtcctggatgatgtgtcttgctcggggtatgagtctcacctgtggaactgtcatcatcctggctggcttgtccataactgtcgccattctgaggatgcaggagtcatctgtgcactccctgaggtgacttctcccagtccaggttggtggactacaagtccttcctatgtaaactatacttgtggaggtttcctgacccaaccctctgggcaattttctagcccattctaccctgggaattatcctaataatgccagatgtctgtggaacatcgaggtcccaaacaactaccgtgtgactgtggtcttcagagatttgcagctggaaaggggctgcagctatgattatatagagatttttgatggcccccaccacagttcacctctcatcgcccgggtttgtgatgggtccctgggctctttcacctcaacatccaacttcatgtcaattcgcttcatcactgatcacagtattactgcgagagggttccaggctcactactactccgactttgacaataacaccaccaatctcctttgtcagtcaaatcacatgcaagccagcgtgagcaggagctaccttcagtccatgggctattctgccagggatcttgtcattcctggttggaactccagctaccactgtcagccccagataacacagagggaggtcatattcacaattccctacacaggctgtggcacaatcaaacaggctgacaacgagaccatcaactactccaacttcctcagagcggttgtttcaaacggcatcatcaaaaggagaaaggacctgaatatccacgtcagctgcaagatgctgcagaacacctgggtcaacaccatgtacatcaccaacaacacagtggagatccaggaagttcagtatggcaatttcgacgtaaacatttccttctacacatcctcctccttcttgtttccagtgaccagcagcccatactacgtggatctggaccagaatttgtaccttcaggccgaaatcctccattctgacgcctccttggctctgtttgtggacacctgtgtggcttcgccacatcccaatgacttctcatctttgacatatgatctcatccggagtggatgcgtacgggatgatacctaccaatcctactcctcgccctcaccacgcgtctcccgctttaaattcagttctttccacttcctgaaccgcttcccctcagtgtacctgcagtgtaaactggtagtatgtcgagcgtatgatacctcctcacggtgctacagaggctgcgtagtgagatctaagagggatgtaggctcctaccaagaaaaggtggatgttgtcctgggacccatccagttgcaatcccccagcaaagaaaagaggagcctcgacttggcagtggaggatgtgaagaagccagcaagctcccaggccgtctaccctactgcagccatctttggcggagtcttcctggccatggtcctggctgtggcagccttcacattgggaaggaggacacacattgaccgtggccaacctccaagtactaagttgtgaagtgaaacaacccagacattggctccacaagcacagattcccagaaaagatggaagacatgagagcctgacgcttggcacccagatacatggtgactaggattcccttagcacaaatgcttagccaagaacaatgagatggcaaagaagaaaggtgggggccaagttttcccaggatctacagactgaaggctaggaagaatgtcataggagaatgagaccagtgtctacaatcacaggcaactgtgagctgagcactggtggcagccatgctttctctcgctagactttcccttttccccatgtatagccaactttctccatctgtagtgtcgatgtcagctttttcttacaatactgcaatactgaatataaataatctttctcatggc

SEQ ID NO: 83 - protein, 1345 aa, Mus musculus
GTMGISTVIFEICLLWGQILSTASQTAVPTDGTDSGLAVRLVNGGDRCQGRVEILYQGSWGTVCDDSWDLNDANVVCRQLGCGLAVSAPGNARFGQGSGPIVMDDVACGGYEDYLWRCSHRGWLSHNCGHQEDAGVICSDSQTSSPTPGWWNPGGTNNDVFYPTEQTTAEQTTIPDYTPIGTDSGLAVRLVNGGDRCQGRVEILYQGSWGTVCDDSWDVSDANVVCRQLGCGWAVSAPGNAYFGQGQGPIVLDDVACGGYENYLWSCSHQGWLSHNCGHQEDAGVICSASQSSSPTPGWWNPGGTNNDVFYPTEQTTAGTDSGLAVRLVNGGDRCQGRVEILYQGSWGTVCDDSWDTNDANVVCRQLGCGWAVSAPGNAYFGPGSGSIVLDDVACTGHEDYLWRCSHRGWLSHNCGHHEDAGVICSASQSSSPTPDVFYPTDQTTAEQTTVPDYTPIGTDSGLAVRLVNGGDRCQGRVEILYQGSWGTVCDDSWDLNDANVVCRQLGCGLAVSAPGSARFGQGTGPIVMDDVACGGYEDYLWRCSHRGWLSHNCGHHEDAGVICSASQSSSPTPDVFYPTDQTTAGTENSLAVRLENGGDRCQGRVEILYQGSWGTVCDDSWDLNDANVVCRQLGCGLAVSAPGSARFGQGTGPIVMDDVACGGYEDYLWRCSHRGWLSHNCGHHEDAGVICSASQSSSPTPDVFYPTDQTTVEQTTVPDYTPIGTENSLAVRLENGGDRCQGRVEILYQGSWGTVCDDSWDTKDANVVCRQLGCGWAVSAPGNAYFGPGSGSIVLDDVACTGHEDYLWSCSHRGWLSHNCGHHEDAGVICSDAQIQSTWDLWPTTTTPETTTELLTTTPYFDWWTTTSDYSCGGLLTQPSGQFSSPYYPSNYPNNARCSWKIVLPNMNRVTVVFTDVQLEGGCNYDYILVYDGPEYNSSLIARVCDGSNGSFTSTGNFMSVVFITDGSVTRRGFQAHYYSTVSTNYSCGGLLTQPSGQFSSPYYPSNYPNNARCSWEILVPNMNRVTVVFTDVQLEGGCNYDYILVYDGPQYNSSLIARVCDGSNGSFTSTGNFMSVVFITDGSVTRRGFQAHYYSTVSTTPPVPIPTTDDYSCGGLLTLPSGQFSSPHYPSNYPNNARCSWEILVPNMNRVTVAFTDVQLEGGCNYDYILVYDGPEYNSSLIARVCDGSNGSFTSTGNFMSVVFITDGSVTRRGFQAHYYSTVSTNYSCGGLLTQPSGQFSSPHYPSNYPNNVRCSWEILVPSMNRVTVAFTDVQLEGGCSFDYILVYDGPEYNSSLIAPVCDGFNGSFTSTGNFMSVVFITDGSVTRRGFQAYYYSTVSTIT

SEQ ID NO: 84 - DNA, 260803 bp, Homo sapiens
  misc_feature (1)...(260803): n = A,T,C or G
atacaaacatgtgcccctgtacatgtacacacacacacccatgcccacgcacacatatgtgcacacccatgcacccatacctatgcgcatacgcacctgcccacactcaagcacttgcacacacagcacacatgcacacacacacacaggcactggctcctgggcctggtgctatgacgaggaagaaggaaatataaatggaatatttcccactcaaggaactagctgagtgccagtgatagcttcatggaggccatccatcgcggtttccctcctcactggtcaggcatagggaccccattgtggccatgcccccctttagctttggtgacaccagtgactcttttgtcctttggtttggctgagtgttgtgtgcttgtcattgccctatacgtgtttaaaactcttcctttgttccaatttccttagagtatttgttgtggtttttaatactacctgccaagctctcaaccacggctgacttggtagttgttgacaagtgagcagtggatttgggcctctgccttaaactctatgtgaaccagctcactgggacagagggcatggccagggcttcagggcccccagggccttacctgccactgagctcactttgggactacagtaggctcttcagccaacatgggcaacagatccttgcccccctccttttttaagactttccttccgggtgatgggtgtcctctgagccactcaacttggcccactttgcttgcagtcccgagccatgaccaccatcctcagtgtaggaataataggctggcagagacaacgtctccatgactggagcgtgggtggcttgggctgataccctgcccagaggccctaccagggccctactgggctcctgctcagaaccgggctcctgtgtatcttccctccaatcctggggcacggtgagttgtgaaggcacagtaccgtttgtcaccagcgtcccctgcctcctgttgctcatgctgccttccttttctgcccccgtgtggtttcactgacttgaaaggcccatgcttctggctgaaggtgagaaagagaggtggatagagcatgccgggccccgaggagaaggcaggctgcctgggctgtaggtcagagggcaggaggactgtaagcagggcccagatgtgcacagaggatgactttagaggaggtgaccacataatatcccaacccaacccacttgcttggttaaggggaagggggctgaagcaatcactgccctgggataagaagcaagaggggcgcctgtagtcccagctgctcaggaggctgaggcaggagaatgacatgaacccgggaggcggagcttgcagtgaaccaagatcgtgccactgcactccagcctgggtgacacagcgagactccatctcaaaaaaaaaaaaaaaaaaaaaaaaaaaagaagcaggacgggggccaggcgtggtggttcacacctgtaaccccagcactttgggaggccgatcacctgaggttgggagttcaaggccagcctgaccaacatggagaaacctcgtctctactaaaaatacaaaattagccaggagtggtggtgcatacctgtaatcccaactacttgggaggctgaggcaggagaactgctcgaacctgggaggtggaagttgcggcgagccaagatcacgccattgcactccagcctgggtaacaagagcaaaattccgtctcaaaaaaaaaaaaaaaaaaaaagtaaaaaggaagaaagaaaaaaagaaaaaagaaaaaaaaagcagccggactgggacctgtggccctagctagaggctgtgccatggagctcggtcttcatgtggaacacactggggttgccactgaagggtttatttcacaggacaatatgggatttgccttgtgatttttagggatctctccagcttctgtgcccaggggccttgtggtctttattccactttggctccttagccccatggccacaccctgaccatagcagcttccaggactgtggtctgatgtgccagtctccactcagcccagggccccagcgctcccttccctgatggcagccacatggctggtgatagagccgcatcccatttccctggtacctcatacaaccattccccagccccgatatcacacccatgaccctctgtttgcccgccttccagaccctcacccctggaaccacctggggctgttttcttcaccctaacccatggggccgagtgcagctgccaaagaccccacagtcgagtgggtgtggactcctcttatgtgtggcccaaccccagctgctgctgggctcttgttagtccttctgtgtaccttaggtcagggccctgtcctactctctccagggctaaatgccctcagtgtgcaggttaagctttcatttaggtggagatgaccagtgagtagttggaggatggacaggaagcaggcactgggtggagagggccagggtcagtgggagtagctggagcccatcaggggtgggagggagaagagggctgcagcagagcctggaatgcactcactgtccccagagcccacccctcccgctgggttacctgtctcatatggtggcatccacacttggcaatgaatccaatcagacctgggagtcatttgggctccttggtcccctttgtccccactcccctgatatccattcagcccccagctcatgtttctcactgtagttcccatcatctctgaaatatcttccttccccatggccgctgggtctgcttcatccctggagcgcagggtccatgacttattcacctgcgtgtgccttgatggggagctggcctggcaaacagaccagtgttccttacaagtttgcttcatgcaaatgttatctgtgttgtgcaagcctcagaatcccctggagggcgtgttaaaacacagattgctgggtcccacactgcagcctcagattttgcagttctagcaagttgtcaggcaatgctgatgctagtggtctagggcctgtgctttgagaaccagtgctctcgtgcatggactgattggctgcaactatgctggtactcaacgtatggtctggtccattcagatggaagtggctcaggggtccatgcaacaattagaatgcccttagatccatctgcttttttttcttttcttttcttttgaggtggagtctctgtgacccaggctagagtgcaatggtgtgatctcagttcgctgcaacctccacctcctgggttcaagcgattctcctgcctcagcctcctgggtagctgggattacaggccaccaccatgccagactaatttttgtatttttggtagagacgaggtttcaccatgttgacaagactggtctcgaactactgacctcaggtgatccacccgcctcggcctctcaaagtgctgggattacaggcctgagccaccgaacccggcctgatccatctgctttttgtggcatccttattctactggacttccaggcaattccagccaattgtaacttgttttcacacaactcagtaaaacccaccccactgtccccactgtccccattgttcaggaactgtgcagttgtttgcgaggcttaaggacaggtctgatttggggtacacttgaaagagtcccatatctcttatgtaccagatatggactctttttaagagtcccatatctgttatgtaccagggcttcatgtgtgggatttgggagggcagtcatgctgataagcatttagaggtgcccagaacagttctttatgcaggaaggatgatgacaggttccattatcttgataagagtttcttttggatgccatccaatttccttgtcctcattctttgctccccaagcaaactattggtatataattttgtccctcaagcagactaattctggagccaaagtatacaccctattggaaataaatgaattggcctcctggtttaccaattagtgtttggtgagtacaattagtgtacctgggtttcctggaacctgatcactctgggctgagcaatctccgaaaggctggcttagtgatgctatcctgcctgaaatgctaccccgggctggtgctttggtgactttgttcttggacctgaaaccagggtttctttgctcagttccaataaccctttggagaggcagcacactgtgcttcaccaagctcaagtgccttaatgggaaagagttgcaaaataacttcgggaggatggtgattgttggtgaagtagaatggctcttggaatctggggtggaggaatgagggtagcacagaggatccgggagtgggagtcacagcttcaatctccttttattttccctctttgctgtaagcctcccctgaactgctagttgccttcgtgattataaccaggtcagtgtagatctagtgttgccattaaaaatattctctcttcactctttcggggataggccacttaccaccttttgtagggcttatgtcaaaaaatctgcactctccctgatgacctcagagccagttttccttctctacccattcctttgaatggttctgaatagcaagatgtcctttggtgtagaggactcaaacctaccatttgaatggaaacatagtcttttcgtgggaaggggaaagattcagtgtcttttggaaaaataccaggctttggggtcagacctcgatttaagctctggctctgccagtttctgggtgtgtgactttgagcaagttacttaacctctctgagcctcagatttctcataccaggggcagttagtaggtaaatgtgatgccctatccaaagtcgtcctccctaccacagctattctctatgccattgccttgttcatttcctccataattcttaccacaatctgaaacccttctccctgctgattgatttcttgtctgttgtctgttttgcctccctgtgaggacagggagcatgtccatctggcattaggctgcagccccaccctctagagcactccctagagcagtgtctggcacattggaggcatcagcgtgtatttgctgaatgagcagatgaatgaacagcattatccttcggcaaacacagaactcacttgaaccatctgtgcaaaggggcctggtcctcctcttccagatctgcccatgctcatccagtcaatcaatctgcagacctatctatctatctatctatctatctatctatctatctatctatctgcatatatatatatatctatatatacaatttttttcgagatggagtcttgctctgttgtctaggctggagtgcagtgccatgatctcagctcactgcaacccttgcctcctgggttcaagtgattcttctgcctcagcctcctgagtagctgggactacaggcatgtgccacattcccagctaattttttagtatttttagtagagacagggttcgccatgttggccaggctggtcacaaactcaagtgatccacccaccttggcctcccaaagtgctgggattacaggcatgagccaccgtgcctggcctgaatgcagatatttcttgagcgtctactactatgtgtgaagcattgttctaggttctgagtatacagcaatggataaaacagacaaaaatcccaccttgtatagcttgcattttagtcagagcagacaggcaaaagaataaagaagtgaaatagaaggtggccagatggtgaggagtgccgtggggagaggatgggagtgttagggagtgctggggaggggcagtcggtaaggctgcatggaggcggtgctatgtgagaaaatctctggaggaggggaaggagtgagtctccagacatttggggaaaaagtcttcaggcacagggagcagcaagtgcaaaggccctggggctggatgatggttacagggggcaagggggagagagaggcaggggtatcttgtgcagggccttataaaccatgggagggctttgagccttcctctgagcaagatgggaggcatgcaatgagatttctgtgtgtcaggggtccctagagggctgtgtttgttgctggaagattccacggttggatggcatcctgatgaacgtggagctcatctgtccttcagatggggggcagcagctgccgtgagtgctgtcctggacatggtctcagctctgtgtgtcatttcccctctctggacctcattgtccccagctggaggctgagtggtggaggagaactggctcgtcaccagcccccgctgaaccacaagacttctttctggggacccctggacagcatgggtgagccgctcacaatccccaccttcaaagccattgcctgccaagcacctgctctgctggggcactgggatcacagaggggcagcaggagacaacaggtctcagcttgatcctcaaagcccagcagggaggtgtggggcagtggggggtggggggagtgagtgaaggagggtaggaaggggtccccttataacccaattgggaagaccggctctctgagcaacaaaaatgagcgacattataaatatcagacatacaatgtcaaaagattgttacaacagtaacaatgaccggcaattatggtgtgctactcaatgagggtaaaattagagtttggggtcagactgacacctgaaggggagccctggtcacacagattacgggattcagggactggaaggcaaacagcagcagccggaaggtgctacagccccgacccttcccaccaggctccccgtccttctgtccccctcgtctgtcaggtcacagggctcctggctcagaaatcagagacccctcagaggtgggaggtgggaggggccctgggctgcctccctgatctccgtcttcctctggcttcccagggcactggtctgtgggtagaaagaatctttagaagaaggagaacaacgggctgttttgggaagtctgcctgggaccccagctcagcttcgtggcagggatgtgtgcctggcagccccaggggccctgctgggcctctcagtgccctgtcttatgaagggaggtcttggcttcccacaggtaatcctcagctctgacggcaggtggccctaggggaggggcctggaagaggactccctcaccacagtcaggagcattccactggcctgttttatgttttggggcttccccatgaattccaatttaggaaaggattctgtagctttaaaaaaaaaagccatacatggccgggcgtggtgactcatgcctgtaatctcagaactttgagaggccgaggcaggcagatcgcaaggtcaagagatcgacaccatcctggccgacatggtgaaaccctgtctctactaaaaatacaaaagttagctgggtgtggtgatgcacgcctgtagttccagctactcgggaggctgaggcaggagaatcgcttgaactcgggaggcggaggttgtagtgagccgagattgcaccactgcactccagcctgggcgacagaacaagactccgtcttaaaataaataagtaaataaataaataaatggccacatatgatccagggggctcttccccataacgaccagtcctctggtgctgggatttaggggcttggtcccacctcctggagtgtgctgtgggggtgccgctggcttaattgcctggggaaggtgctttgcaaatggggcccgggcgccgagtctctgagctttaatgggcttatcttgcttcctgttgttcttcatggcagttctggggtgaataaaatggaactttgtggttgtggtcttccaacccctgctgtttaagcagatgcttctaaccagtaggaaggggaagatgagggtcctctggcaggggctgctgctggagaaggttgtccccctgaacccttctcttcgtccaaggaaagacctccctaaatggtgtcttatgagccacaaaatggccttgggacaagatgaggcacctgacggtgaaggctgaggtcccacacggtgttggcaggtggccctcaagcccattgtcttctgcccgcatgcccaggaccgccacatccttcctgttccactgacgtcacccatttcccacctgggatgcctacctgggctggctttgaaatgacagctaggcttcaccacttccttcttcctggtgtctcctgaacaaaaagctcacaaacccttattgtctcaggatcttttctgctaactaccatgggcaaaagatgcagtcaaaacaacaaaaacggggaggttacgcagttcagaaaatcccacacattctcaagaagggtgtccccgccaagctgagagatacctgggacatcatgctttcctggaggggaaggctccctgcccccattcctgtacagccgggagagtcgctcctgttcgtcatcccatcttctcgctctcatttgctgggctgacctctgctggtatttcaagactgtttggtgccaccctctctgagagatggcctccctcatctgatttagatgcttttctttaccttctcatagcagcttgtactaatacttgctaccccctgttgaaattgtcaccaggcaggtctgtctctaagaccagacagtctgcttttgtcttggaaggacacttattaccccttcctgttcacaggtatttagtattcttaccatcatctttccctgctgtgctcccggcagacaattctaatctgtcatgacactctgatgatcccagacccagctgcattatcattctcagtccaacactccaggaaccaagggatcacaatccccttctaagaggaatccagcatgtgcctggtcttgggcattccctggtaggtgagtaaccctgttctctcgtcacccagtgcttatcagttgctgatctggcagtaggaggatgaaacacagtgagcctattctgtgttcctattctactcaaggggtgaagaggcacctggaaacaacaggaagagttgtaggattaaaaaggacatccaagattgaatgtaactttcatctggatgaagccaaaggcagacttccagccctaaattctgactggtggctgacacaggacatgggttcatggtacccttctagaatgcagcatagactactgatgaacagtgcatggcaaagaagccaagtgtcatttcatggcctcagcctctcagctgagaagcagggcacagctcacccaggctaggaaaacagaggcaagtcctggaaagctgtctgcttttaaccaagagttactggccatcaagtgtcttggttaaaaaataagtgtcaggcaaccttcttggtagatagagtgtgttgggggcgattatcagagtctggtaatgacttctgagggtcccaaagagtgaagtgatatttacatagcaaatccaaggagggggattgtgtgcaatataggtggaggtgggggcaggttttgtgggtttgccaagctccaagggtcatacaatgtgcatgtcaaggacaagaaatcaaagccatgtgaaatggttggaggtggttcagtttgaggtcatgtgtttctcagctcctgttgtggaattagtgtgagacccagaagactgtggccaaagctattatggacccatggtctctgtggactcatccctcatgccttctgctctctgatcacatccacactcatgtcatcctcgttcttccaaggtgaggttactagcactgcacaggggctgatgagagcatgtcctgccaggaaaaaccatcccaaagagatgctttcccccttggcactgtgtcctgtatttgctcagcagcccacatcctgttctgccccaaaccttggggcagacttcccacaggtgaatttgaactccccaagattaaaatcaagcctgtattcaggaaacacttgggagtcctcgaggttcaccgagagggaagttggaaatttttcacttatgtcagtgcgtttgcagttgggcaacagccagattgttcatatggcaatcaatcaaacacacctaagttttttccacatattagccatcgactgttagcaaaagccctcacttcctttatattgatttatagcagcagcagaaatataccaccctagaggacacacctccttttagctaggtacctataaatgtccaggattttctattcaattgagaagaacccagcaaaatggggatctccacagtcatccttgaaatgtgtcttttatggggacaagttctatctacaggtattacgtttaattattatattcattaatttctctcctgcagacccaatcatggcaaattatatctactactttccattacaagggaagttttatatcaaagagtgggtagcactttgctgataattgtaattgtttgcaggtattcaggaggaatggctcttttttgttttatttctggctgagaaatataaatggttgtagttagaaaaagccagtcattaagtcaatgttttcagtaagtcattcaactaaaggaatgattgatttgtcttagaaaaatccctgaagtttaggaaaggtggatgtgtattattaagaggcccttaaactttgcagcaattggttaaacacacagtttgtgtgctatgaaaacggacagaaaggattcccactgcaaatgccctttatgtggcttctttctacaggtgtgtctggcttgatggctaatatttgccgagcaaaatcaggtcaagtaattgagcgcagacaagatcattaagattccaagtttgtcttggaattccaagtttgtctgtcatgcacagctttaaacaaacacttgaagcccagtcactcaagcatagctgtatgttcttagagagtcagatgataaacgtgagagagccgtcggtagcgcactctgattgctgcatctcaatggcattttgcagagatactagaggaacaagtgattctcagtttgcctattctgtctctctcttcctctctctctgcctctctctctctctctctctctctatctttctctcttatctattgtgtagttattatcatcttttctctcccctctctctccctctgtttctgtctgtctgtgtttctctctctctctgtatctttctctttttcccatcttttgggcagatatcaccttttcttcctcctcctccctctgtttctgtctctgcctttctctccctgcccccctcactgtatcttcctgtctttctcatctatcaggcagttattacctttcctccctccctcctcccccttctctgtttctctctccatctctctttctctttattgggcagctattatcacctttctctctgtctctgtctctgtctctctttctcttcaactattgggcaactattatcacctctcctctctctctctatctgtttctcttcatctgtcaggcagctattatcaccttccctccccctctctttttctctctcactctttctcatcatctattgggcagctcttatcacttttcctccctatttctctctctctctctccctttgtttctatcttctttctaccttccttccatccctttttctttctctccctctctttattcatttctttcttccttcttctcttttatctttcctactgccttttttttcttttatgtcaccttttgctagatttatgaatttcaggatacagggtaaaaatcacctaattttcaggtaacttccggaactctcactctccccctaggctcagtgggggaagatttgaagattaaggttcatctggttggttgctttcatgaaagcagcacctcccaacccagccctcacacccgggtggtagggagcaggcccaccccctgtgatgagcgtgtggagggcctgggggccactaggcccaggacctcaggggagtggagactgggcatcctcatcctgcctccatcagaagcatctgaaactgggaggctgcgtcctcagccccagctcttgtcagtaccgagttcaccctccagattgtctctgaaccatgacatggaattcacatcagccactgtagacagggagtgaattgccttgtctttatctacaaagaaacaacaggcagcagtgctcttggattgaggacatttgtagtttgcccatgatgttttgtgcatgcatatggacagacatgcacatatgtgcatgcatgcctgtgtttgccattcagaggtgggaattcatgctctctgaagtggacccgtattctcttatttaaatcttctaacattcctgaagttaggaacaattatttccacatttcagatggggaaactgaggctcagaaaggttattggcttgtccaaagacagcactggtgagtggctgggttagggcttgaatctggatcaaattcactagcattcagatgacagctctggcccactggcccttgctgctccttgcagggaactgaggtgatgaactgaactgtggcatctaactcagtgcttggagcctgaccacagagctttgtgctggaagtaccgaggtggcaggcacctgtcagctctggtcttcatgcaaactcttgagaaaaactcagtatgcccaggtttgtgctgggcaggaaaggctgtggtacccactgctagccccagcaatgcccctcctctgccacttgcctgctgtggatcctctgtgaccctcagtttactcatttataaatggaggttatgttccaacccatgcaatatctggcacatagacagagcctcagaaccatttagtgttactactctagacattttcctcatgttttatccaaaagcagcttcctaaaagtaatgtgagctcttggattggatcctgcaacagaaaatgaaaaactggtgaaatccagataaagcctggagtaaacttagtaggaaggtaccagtgtttgttagcatgagaatcacttgaactcaggaggcagaggttgccgtgagccgagattgtgccactgcactccagcctgggtgacagagtgagactctgtctcaaaaaaaaaaaaaaaattaataaatcattttccagaagtgattcttctcccttcaggcaatttaccaccattcccacaatggcagctggagtaacctacagctatgtggttgattcttggaagactacagattggtctcagtatgtgcagaagggtctattcaaaatgtgtggacacagcagaaccaggaacaacttcaatgtggtgttccatgctgtggatgagccttgtcaaggctctggctggatgagttcgactgccatgggattaggcaggatacctgggacctggcagtgggaattgcatggtgtcaggtagactgtgtttaaatggccgagttttgaatggaaggctctcttaggcacatctatcagctcgttcttgagtgtgggagcagggatggcacgtcagaaaagaggtggggatgttctggtacagagttccctagtttgctatctctgttgaaagaatgttgtggtttctattccgagtttcttcttcattttaagggatgcatagccacatggtttcagtggcccccttcctaagccatcaatatgaagcagggcagctgggggagcccatcgtggagctcatattcaggctgttgaggcaggtgaagatgttctctgacatatggcaagtcctgtcactggcctgttggttccattagagaaattcaaatctctgaactgtgactgtcactgctctcaggacccacatttacaaagaatctgaagagccgggcgtggtggcacatgcctgtagttccagctactctagggctggaggcaggaggcttgcttgaacccaggaatttgaatctagcctgggcaatagagcaagactctatctctaaaagtaaaataataatctgataattttgtcaaatgccttaatcctccttttaccaggaagtaaaaagaaaaggaataatgaaagtatgctggaattgttaataagaatttaaacatagcagacctttttatatcacatacattttggtatataaacatcataaaagacaaaagaataccatcacaggtatttttttttttttagcaaaataagatggttgaagttcttgttgcaaaatatcatgtgatgaaatccctatcgaagtgtgtaagagtaccgtattttatttttgtccttagaattgtatcattgaccctggattcttgaatttgagaaattcatctaggatatcatcatctgaagactcatagtctgagatttctgttgtacaatcaattctaccattattagtatctggagtgctatatcttgtctctatattcctcttctggttcatctaattattgcaaaaacatcttctcttgtcagttttcttctctttgccatcacaagtagaaaatgaaaaaatttgaattcttaactgcattcaatgaaagctaaaaacagactatgaagaaagtgtctccagtcttaaaaaaaaatcttcttgaaagataatacaatactttgggcatggaagaattatgacttatttcactagttcatcttccttctaggcaacttcaccattctaccattttcttactatttaataattgatgaataatgatgcaatactttcttggatgatgaaatagtgaaatgcttcaagacataggaaaaataaaatcagaagccaataatgaatcttggatttataaaaggatctaatggatccatatggtgattacaagataggatgagttttatccttttttttaaatgaataaatactctctctgatctttgaaagacctctaaaatatataaaagttgtgaaatatcaacactcacgagtatagttagaactgctcaaaaagaaactcaaaagctacagttgagtccgatggaccttgtctggcctcactgaatataaagatccagggatctctagatttccatttgcttcaagatggaataaaatattttcaggttatgagtcagaaggaacagaatatctgacattaacatattttcttctttaggggtcatctgagtggctgttgcagctatactcaaatttcagactggacaaccagcttaagctgtcttctcttgtccagcccttctttccaagcatagattacatcctgtcaccataagctgtagtgttaggggcctagtaaagagacatatgcttcattacatctaaaatgattgagctcctcatatccaatccacttgctttaatccgctattgcagaattcatttagcaagaacgtcggggacacacaaacccaagattgagccacagcgccctctggtgtgattgtacggtgaagcgaaagccaatttctgtgacttgtaggaaatcatttctaaacagtgtttctaagacgaatttgtgttctttccaggtgggtggatcccaaggactacagactacggtaagaccttttcttcactcctcttccctggtggggttggccagttctcctctgctgctgttggctagttgaggctgagcacagctgaggtcacagagcaaacgcctgccttgtcgaacgcaggaatgccggggggacaggagacgtgggtgccaagacctggggcatgtctcaagtgcccactcggccaatcccagctgtcattctccttcctcttgctctctgactctcagtcatttatcagatgaggttagtttcagtttggtgtgaggagagatagttgaaaataaaggttagtaccttttcttttttttctttttcttttttctttttttttttgagacggagtcttgctcaccctgtcaccagactggagtgcagtggtgcaatctcagctcactgcaacctccgcctcctgggttcaagcaattctcctgtctcagcctccagagtagctgggactacaggtgcgcgccaccacgcccagctaatttttgtagttttagtagagatggggtttcaccatgttggccaggatggtcttgatctcttgacctcgtgatccacccacctcggcctcccaaagtgctggggttacaggcatgagccactgcgcccggcctaccttttcttttcactagtaatgacaggtatcttgaagataactaacatctaccaagcacttgttatatatcctgcataaaatgattttcatgtatgaaatgaattgatatatttaaaaaaaatacttaaaataccacctggcacctaataagtgctcaactaatgcacatagtgagtgctattatcatgaaatcttcccaagaacactttgaggtaagtaatacgattatacccattttgcagatgggaaaaccagggcacagttagctaatttgtcaatatttctatgtctaagatcatgtgtctggtgagtagcagggcagagatttgaggctaggatgggtgcctcctcttacccctgccctggtctttgactttggctgaatgtccctgcctctccagtgagaatgtgcagagaactttgtgcccaagtttaatttttcagggccttccatgtgttcacttaggatgactctgctcctgggcccttggccttgttgaggtcagtccctccccttccaggacatgacttgagagatccagaaatggcctgggaaaggcagatttctgaccaacacagagcaagggagaggctgaggcagggagaccaagcactctcctggagggaccattcacagggtgaccaggagggggcgcattgccccactgcacctctaggttcatctctgatccagaagagttgcagatggaatagaaggtagggtgttttgctcgtaagaggggcccttccgaataaggcctcaggtctgaacaggcatctccatggattatgtccctgagactggggaaggacagagcatgggaagtccagaatgtactttggggataccctgaagatggtccagctggcctttcctccctctgggaggaaaagcaacctgccccctccctttgcatcccattccagcctctcactctgtgaccacaagtttctcataatctcaaactcaccattgaaaagccacacccaggatctggctcctgctgtcaggacggtgggctgcacccctcaggacctgtgcctatttttctcacaccatcaatacagcttaccccagtgggtggtctagtggcatcacgttgggcaggaacatggtgcttattgacttcccagcatggccagctccacggtgggaagcaggctcaattagcccctcccaggacaggaggctggaaaagtaggtcgaggcttgctcttggacttgatcctgatgggactggagagtgtactgaagcattttgagcaaggaattgaattgaatatatttgtactttctaaagataaaacttgaaaaccacctggagaccaatgaatcctcttagtatagaaatgggtgcagagtaagcactccatcgatgctgattgaatcaatgaatgtggatggactagagaaaggaagagcagacattgaggattcagctgggaggaggccaggttcaaggggatgaaggcttatcccagtgaaatggcagtgggaacgacacggaaggaatgaccttggtgatgttagatgtaggatgtgaggagaaggaggagtcgaatatgatgcccttattcccagcatggttaatatggagcatgatgacatccttaattcaaatggagggaagaggctgtgttgagtttgggatgatgtggggggtaggatggccaggaggccactgaaaatgctggtctagagctcagggctgggctgtcagggctgagtcagaaccagagaggtggatttgggggtcttctggaaagttctcagagtacatgaggttctccagggggaaaatacagaatgagaagagggcaaagagagaacatggaagaacagggatacttaagatcctgctgggagaaagattgtaaataggcagggtggtgagaggaagaaggaggagtgaggagggtagggatgcaagtcaagggggccgagagcacctagataaaagcttctggctgtgtcactgcaggtctgcctctgaggctggtgaatggaggtgaccggtgtcagggccgggtggaggtcctgtaccaaggctaatggggcactatgtgtgatgacagctgggacgcccaggatgcagatgttgtctgcaggcagctcggctgtggctattccatgtcagccctgggcggggcccactttggtcagggcttgggaaacattcccttgggtgactggcattgcttgggaagggagtcctacctgtcaagctgtccccacagcggatggtacaaccacgaatgtggccacagggaagatgctggtgtcatgtgctcaggtagtgtggatatcaccttggtctgtgtatctgcaactctgagtcaatattaccacacataagtatgtgtgtgtacatatgtgtgtgctctacagcttacctgctttgcagtaagtcatgtcttaattgatattggagggcaggtggtactggcccttttcatagacaatgaagatcaagggatcatcggccagtccttctaaagctggacatagtggaggcaggcttcagtctcagccccccagagcctgctgatgcaatcacctcatggactggttttgatgagcagcatcacgaccacccccggcctgggataccaaatatatatcttcctaagtggcagtttctcctcctttaaaagctgacgaggatggaggaactgctggtccttaaaacataaatgtataccaacatcaaattgaggagtgaaccaaagcattctctttatttggaattaaatgacaaataaaagctacttaatatcctcaatggaaaagagaacttctcctggacccaacccagcaaatcccagtgttgatttcctttgttcgcgtagtgccaggaagtgtgtggacaccaaggggtcctttagttcccaaagaaaccttcaaggacactgtcccatggtgtgttccccaaagaggagtttgtggttagaatgttcacttctagagcaactctggcatttgccgtatggactggactgagcccatgccaccatgcatgggatgtacccttgataatccaaccagcaagtgggactggactccccaaggggacatggtcctccatgcaaccactttgtgagtgatttatttcggcattctgaaaaggttggtattctttcgaaaccacctttctttctagttgaaccatcttatcaggagtatttcagtgatggtgaatgtttgtcatttgagggtgtgttttagctatagatacagccagttgtcattgacattggatcttgtgactaggatggggctatgagtggacttggtgattttttgaatacagctcgtggcagcagaggaggtggggggagggtaacaggagcaaaggatgctggtgtggcatcctagcccagcctggggccatttcagtgatggagcgattggcacatagttggcttttagcaatggagggtgcccttaggccatgacttccagttcttgcttgagagctgaggaagccagggaccagccctccccaagcaagggctaccatcaatgagctcttccttttccaccctgcagcttcactgattccctcggaggtgcccttggatacaactgtagcagaaggtaaggtctattatgggggatccctgtgggctcattaccccactgcacccctaggttcatctctgatccagaagaaatgcagaagccatacttctagcaactctggcattcagtgtttgggctgactgaacccaggctaccatgcctggggtgtgcccttgataatccaactaccaagtgagactgggctccccaagggggcatggtcctccatgcagccactttgtgatggtttagttttgcattctggaatggttggttttctttcaaaaccatctttctttcttgttgaaccaccttctcgggaatatttcagtgatggtgaatatttgtcatttgagggtgtgtttgagctatagaaacagccagatgtcttttgacattcaatcttgtgactaggatggggctgtgaatagactgggtgactttttgaatagaggctgtggtagcagaagaggttgggggagggtaagtagagcaaaggatgcttgtgcggcatcttagcccagcctggggccagtacggtgacacagtgattggcacatggttggcttttagcaatggaggttgcccttaggatctgtgtttccagcccttgcttcagagctgacgaagccatggaccaaccctccccaaacaagggctaccatcaatgagctcttcctttctccaccctgcaggttctccatttccctcggagttgaccctggagtcaactgtagcagaaggtaacgtctactatgggggatccctgtgggctcattaccccactgcacccctaggttcatctctgattcagacgaggtgcagagggcatagaaggtagggtgctggtgtcatgttctcaggtagtgtggatatcaccttgctctgtgtatgtgcaactcagagtcaatatcaccacacatgagcacgtgtttgtacacgtgtatgtgctctgcattttacttgctttgctgtaagtgatggctgaattgacgtttggagggtaagtagtattgccccttttcatagacaatgaaggtcaagcggttatcttcctgtccttctgaagctggacgtggtggaggcaggcttcagtctcagcccctcagaatctgctgatggaatcaccttgtggactggttctgatgagcagcatcacgacaacccctgtcctggggtgccaaatatttatcttcctaagtggcagtttctccttttttaaaggctttggaggatgggggaactgctggttcttaagacataaaggtatcccaacatcaaattgaggagcgaaccaaggcattctctttactgggaattaaatgacaaataagatacttaacatcctcaatggaaaagagaacttctcctggacccaacccagcaaatcccagtgctgatttcctttgttcacatagtgccaggatgtgtgcagacaccaagagatttctttaattcatgaagaaacctgcaaggacactgtcccatggtgtgctccccaaagaggagtttctggtgaaactgtctacttctagagcaactctggcattcagtgtttgggctggactgaacccaggctaccatgcctggggtgtgcccttgataatccaatcaccaagtggaactgggctccccaagggggcatcgtcctccatgcagccacctttttgagtggtttagttttgcattctgaaatggttggttttctttggaaaccacctttcttgttgtaccaccttctcaggaatatttcagtgatggtgaatatttgtcatttgagggtgtgtttgagctatagaaacggccagatgtcatttgacgtccattcttgtgactaggatggggctgtgaatagactgtgtgacttgttgaatagaggctgtggcagcagaagaggttgggggagggtaaggagaacaaaggatgcttgtgcgtcaccttggcccagcgtgggaccagtacagtgacagagtgattggcacatggttggcttttagcaatggaggttgcccttaggacctgtgtttccagcccttgcttcagacctgaggaagccatggaccaaccctcttcaagcaagggctaccatcaatgagctcttcctttctccaccctgcaggttctccgatttccttggagtcaaccctggagtcaactgtagcagaaggtaacgtctactatgggggagctctatgggctcattacccctctgtactcctagattcatctctgatccagatgaggtgcagagggcatagaaagtagtgtgctggcgtcaggtgctcaggtagtgtggatatcaccttgtgctgtgtatgtgcaaccctgagtccatatcaccacacacgagcacgtttgtacacgtgtgtgtgctctgtagtttacttgctttgctgtaagtgacgtcttaattgatgttggagtgtgagtggtaccaccccttttcatagacaatgaaggccaagggatcatctacatatccttctgaagttggatgtggtggaggtaggcttcagtctcagcccctcagagcctgctgatgcaatcacttcagcagcatcacgacctggcctgggataccaaatatacatcttcctaagtggcagtttctccctttttaaaatttgaggagggtgggagaactcttgggacttaagacataaatgtatatcaacatcagattgaggagggaacccaggcattctatttactggaaattaagtgacaaataaaagatacttaacatgctcaatggaaaagagaacttcccctggacctaacccagcaagtcccagtgctgatttcctttgttcacatagtgccaggatgtgtgcagacaccaagaggtttttttaattcacaaagaaacctacaaggacactgtcccatggcgtgatccccaaagaggagtttctggttaaactgtctacttcaagagcaactctgtcatttggagtgtgggctggactgagcccatgccaccatgcctggggtgtgcccttggtaatccaaccaccaagtgggactgggctccccaagggggcatcgtcctccatgcagccactttgtgagtggtttagttttgcattctggaaaggttggttttctttcgaaaccaccttttttctggttgaaccaccttctcaggtatatttcagtgatggtggatatttgtcatttgagggtgtgtttgagccatagaaaccgccagatgtcttttgacattcaatcttgtgactagcatggggttgtgaatggactgggtgactttttgaatagaggctgtggcagcagaggagatgggggtagggtaataagagtaaaggatgctcatgtggcatcctagcccagtctggggccagtacaatgacaaagcgattggcacatggttggcttttagcaatggatggtgcccttaggacctgtgcttccagcccttgcttcagagctgagcaagccctggaccaaccctccccaagcgagggctacgatcaatgagctcttcctttctccaccctgcaggttctctgattccctcagagtcaaccctggagtcaactgtagcagaaggtaacgtctactatgggggatccctgtagactcattacccccctgcacccctaggttaatctctgattcagatgaggtgcagagggcatagaaagtagggtgcttagctcccacgaggggcccttccacaaaaggcctcaggtctgaacaggtatatcttgcatcgatcatgtctgagactgaggaggaatcaacttgaagacgcgtctccaaggagttctcagtggagccttttattctgtctctagagattctgttatctttgcttgttgctcactcctgtgttcctcacccagctgtgctcatccgtggccagcctagggttctggatctctggctacagggccttgagggtcaggtgcctacctgctaacgtaaccaaattgctaggacagcatccttgcccttgccctttctttaagcctatattatgccacccttgtttcttcttaacagagagaaatcacaatccttcagctcatgggcatcagagctcatgtacttcccccttgggtatctccagtgagaaatctgggagacatagtcaatacatcctgggattctggcagcctgggctttgggaagggaagtcacttcccatttcccgtgggaaatcttggccctaggagaagctcaaggacaacattctcaccaaggcctctgcgctgcccagggttggcatgcagttgggaatgctgatggtacatgcatcggcccctcctgttcctcaggtcatcttctttcttctcccttctccctctggcccatggggtgaggtctgacttaacctcttcctctttcctatgatgaaggacacagaagacacttgaagtgagggtgagactggctttattctgacttagccatgtcccttcgcaagattcccacattttcttatttgcagcagctataagaggagaatctgttccttcctcttgagtggtttcccctgaggtccctgttacatgttaaggaccacaccttggtgtgacaagccctttggtataactggtccagccagggatgggagtgagggggcagaggtatttggctgatctgcctgtcacataggactgcagataggacttacctggagttgctcttatcaggaactctagtgtcagctgggagtcacatttcttctagatctggagacctcacgtagcagcccagtggagagctcagacagaagctgagtgctgtggctgcagtgggttaagggtaactctcagatcacttcctctccaagccccagcactcagtcagctcctgtaggtgccctggataaattccagggctctggagcaattcaaaaacggagattccaagccagtatcttacttaaaggggaatattagaagcatttctgctaatgtgaaaaacaaggcaagtatgccctccatctccactgctgttcaatgttgtactggaggtagtagccaatgcaatgagagaagagaaatcaattagaggcctaagcatgggaaaagttatttttgcatccctcttctggagttctgtataggttacacgtaggcacatcggaatcagagtgagtatgttggtacagaaatatttcctccccaagcagccctttagaatcaaagaactcaatgctagacaggtttcttgactttcccaaatttacacagcaagacaatatccagatcaggagtgatggctcctcagcagatcctagtttactttcagcccatgagtgacttcagaggagacctaactttatattttctggttttttttgggggggtgtggtggggtttgtttttcatcttctacaattggcaaaagcagagactaccactacaaatactgagtctactgttgtgacaggtaatgagtaactttgaatccctttctgtaggtcatgttgccaactatatccatgggctttactgttactcaggaaaaattttagggaatgggatgggagggaatgttgtgagtacacagtgaccttctggatcccagaggtcagctagagtgaagcttccttcattgcccatgttcctggaggtagggagaaatcagtcagaatatggtgtctccaagagcctgtgtgctttggaagcagagaccagtgggatcagtctccagtccagagtgacagcccagctcccccatctccacagctctgtgctgaccctaacaatcctggccctgaggaaggctataaggccaggaatatcatgtgacaaatgtgctccaaaccaaccttagagctgcagatacacatcagagctcctcccgggacatcttgatgttattgtgctgctcttcagtgtgggatgttgtgtgtcccctgtctgagggaatcaggcagagcccatggtctgcttagagaagggtcatgtgtatctctaggtcccctccaggatgcagatcaggaggagccttttattctgctccagctgaagctctaaggcttgggtttgggccaagcagtcactgtcctcttccccatgaagaactctaaccttaaggcctgttaaagcccagcccaattagagattctctcaaagatatctgcctatggggaagaccctgaatgccctgcaggccctgagactttgtgcctcagtaggaatgtgcaagagaaattctgtgccttcctctaggatctgattctggtttggccctgaggctggtgaatggagatggcaggtgtcagggccgagtggagatcctataccgaggctcctggggcaccgtgtgtgatgacagctgggacaccaatgatgccaacgtggtctgtaggcagctgggttgtggctgggccatgtcagctccaggaaatgcctggtttggccagggctcaggacccattgccctggatgatgtgcgctgctcaggacacgaatcctacctgtggagctgcccccacaatggctggctctcccataactgtggccatggtgaagatgctggtgttatctgctcaggtaggcatccagatctctggagggttgggtgtggtggctcatgcctttaatccccacactttgggaggatgaggtaggcagattgcttgagctcaggcgttcaagaccagctctaggcaagatggcaaaccccatctctattaaaaaaagaaaatcacttgggcccattctggggacagactgtattcagagaatatagtaacaggtttctcactccagggcccccgcccaagtctttcctggttatctggtggctctggagtttagttggggcagttggcctgtgggtacaatgccacggtcagcacaaatccccaagctgcgagcagtgccgcaacattggtttggaggtgactgaggcaccagtgttcagacacagggtccagcatgctgacatcagaaatgatgagctttttattctgctccaggaacatccgcataactcatacccccattttccccgaggctccttctcagggacagcacgttttggggatctggttggtgaagccttccctccccttgaacactgtattaccttgagtgttgtcagccgctgacccagagggaaggatgcaattgtaaatagttcacttatgattgctgtgaagagaggcagggaagtggggtaagggtgggaggatggcagtgagtcgcaaatggtgggctcacgagtgagctcagcatagggagcagggggacctcctagagtatcaccaggaatccacgtcaaacctcagactcatcgcagctcaagcgtggagagttagggtcttcatctactcattgcttagggtggctgtttgctgctccctgggtgttgataccgaggttgttgtggccggtcccaggcaccgaagtgaccttcatatccctggagagtgagccacaggcacagagaaggcaatgccaggggctgtggggtccctgagggaccgagggcttcacggtgggcactggcagggcccacttggtgggcgtgtgatgggcatcagctcagggtgtagataccccaagtcacttcagccttaactctacttggagtcactgagtgtttggtgtctaatgttgctatttttttctcacagctgcccagcctcagtcaacactcaggccaggtgagtccccagaatccttcctcgggataccccttctctttctgctcagttaccccttccctactccacagagccctcctgcttctctgcagatactctggggcatattatttcacccccaactctgtaactgagaccctagcatggggcttcttaaccacacatgggattcagcttctgccttctcttcagtccatctcagctttcatcacacagttccatgctgtcccaatgaacaactcttagaagttcagaaagaagcctgctgtttaatgagctttggcctctttatattcagggctgacacaacctttctgagaattgagggtgagaccctctaatgttctgttgaaggcaaggtcagtacaggcttgatacccccatctctcactacttgaaaaacccccagattctgcagggccacgtctgcattcagaagaggcagaggccatgctgaggggagagagaggctaagaaatgtttctggtgccttcacttaccaggaaacctgatttcccccagggcggacccctagtatcccgaacattttagctgcaagtgtcaagtcttggcagtggtgtcagatgagccagtcagtccacgcgtcagtggatggtgggggatgggggtggtgaaggtttcctaactgcgaataggtcatccctctctcagagagaggtggaagggcctgcatggtgtcctttgtccctgaatgagttccctgggcaggagacctgggcagacacatggggagcaagtggccagaccttcgagtggaattgttttcacagtgcttgcctggtccagagaaccgcttgttttttacctttttcccttcaagtccaattgtatcctttctctttgttgctgtttacagaaagttggcctgtcaggatatcaccacctgtacccacagaaggtaaagaatcctctcaacactccctggggctcactttctacctctggatacactttggatttcatagttcacttatgattgccataaagagaggtggggaagtgggctaagcgtgggagggtggcagcaggtgataaacagttggctcaagagtcagctcggcactgggaacaagagcaggacctcccagaagatcattaggaatcattaggctcatgataggatgaggctcaaggtgggccccttgctttttcatgtttctgtgggttgggtagggaggaagctggagtctctgaaaacccagaattagatgtgatattggagggtggagggtgctggtgacctgtctcctgtgggatcctgttccaagtggtcagaaaagatccttatctatgggctcagaacaagccctgggggtctccctaatcctatggggacctcatccctgccatctctggtactctgccagtcagatcccagataggaccatgctcctgaataagggaggggtctgggcctgccatctggagctgagcagctccatcctctgtgtacccaactggggagtggggcatccattcccatcacatccactggggtcacaggtgcttccccaaaagttgagcatccatagacctgggcagagtaggttatcagtgctactttcacgttgatgaagcctagtctgtggtcatatgcaaaggtgactgcctgcctaggtgacttagttcattaggaagtaccctgagtgtggaacttaccttagattcttgacctcatgatagggatggatgaagggttcttgtgttcccctgtaggatctgaatccagtttggccctgaggctggtgaatggaggcgacaggtgtcgaggccgagtggaggtcctataccgaggctcctggggcaccgtgtgtgatgactactgggacaccaatgatgccaatgtggtctgcaggcagctgggctgtggctgggccatgtcagccccaggaaatgcccagtttggccagggctcaggacccattgtcctggatgatgtgcgctgctcaggacacgagtcctacctgtggagctgcccccacaatggctggctcacccacaactgtggccatagtgaagacgctggtgtcatctgctcaggtgggccttcaagaacttgggctcactctcttggggtggagtttgctccaaaagaaactcctaattacattctgatctcctcactcaaagcttctatgttttctatgtttctgaagacttgtcagctctctgctaagaatccatatgtactcactgcctagtgttcctgtggtcacttaggacaggggatcaaactaaaacaacccagagtttttccccttcctgaggcaaggcaaggaagaggcagaagagaaaagtgccggctccccagggctccatttctcccctgctgagtagcacggtgtgagggtataatggatgcagcacagacagcaaggcaggggagggatcccctcactgcgaggaactctgaactaaagatgcttggctaaaagtgggttctcagctgagacccagtgaggaggtctggaaatagaggctcaagggttaggagtgcaaatgggtgtctgtttgtatcaggcctgggttgcgtggggttggagttcttgacctcagctcttctcagaacgctgctgagcattgcctgtgttctaggtctggtgaggggagggcagtccccatgaggccagccagacatggccttgtcattgcctgtgattggggcttgaagatcgcacaagggattttggctggagtggcttcctcagccttgctgactcaggaacacctaagatgtgcaagggagtgggttggtttaggtcaaccgggttaccctgggcagacacaatttgatcacctcagagctggcaatagtggacaggatctgcctcgaccccttacacggtgcatctctgtggggatgtgcatggcaatgtccctccctgtgtgataggaactaggatggactgagtgtcagactcgctcatttctttccctcctcgttccagttttgccgacttctgtgtaatgttcctgatctgaccttctcttctctttctcacagctccccagtcccggccgacacccagcccaggtaggtccccagtgtccttcctcaaaatgtcccttctctttctgcccaatcaccccttccacactccacagagctctcctgtttctctgtgtggatactgtggggcatattatttccacccccaacaccggctgtgtaactgagaccccagcacagcgctttttaaacacacacaggattgaggaggcctctgtcttcttttcaacccctctcagctttcatgaaacagtttcatactgtcccagtggacaacccttacaggttcaggaagtggccccatgtttaatgagctttggtccttttatattccggactcacatatagtttctgaaaattgagggtgtcaccctctgacccgttcaaggcatcgtcagggcaggctcgatacccccatccatcactgctggaaacattccgagattatgattccgagatttctatccagaagaggcagagtttgtgctcgggcagggagagggataataaaggtttgtgatgtctctgcttaaccagaaacctgattcctgattgtcccctgggcagcccctggttcccctaacattttacctggcagtgtccgagcctcagcaatggcgtctgatgtcctagtcagtccatgcatcagcagatgtgggatggcatggtgggggcatcctctaacagatagaaagataccccaggattagagaaatggagggctcagtctggtctccagcaggacctttgtccctggatgagttcacagcacaggagacctgggaagacacatgggaaacaaatggcaggaacaagaagtggaattgttgtcacgttgattcctcctcccagagatccttttgttctgtgccttttcccttcaagtctaattctgtcttttccttttgttgcaatttacagatacttggccgacctcacatgcatcaacagcaggtaaataaccctctcacccctccctaggactcactatctctggacatattttgtgtttgaaactgataggatgaggctcaatgtgggcttctctgttttcatgtccctgtgggttgcgtgggaggaaggtggaatctctgaggagccagtcctgggtctgatgtttgaggacggagggtgttggtgacctgtctcccatggaatcctgttccaagtggtcaggaaagatcctcatccaggtgctcaggacgagcactggagggctccttaatgctgctgggacctcattcctggccctcaggccatgggatccagacctctgaagagcgggtgaaagtgccggtccctgcacctgtgtggccaaggccttgccatcactggcaatttgccagaaggcagagaggcccatgcaggtgccaataagctcctgaatatggagggggtctaggcctgtcatttgtagctgtgtagctccatcctgtgttcacccagagtggggagtggggtgtccattcctgtcctctcctctggggtcatacatgcttacccatagcttgagcttttatagacttgagtagaatagggcatcactttttccactatgaccaagcttaacctctgggtgcagccatctgccattgtgactgcgtgccctggtgactttggcatttgtattcaaacttgactacttttcccattgccctgagtgttgtccatgccttttccttcacctcagaatggagatggatgaaggattcttgtgttcccctgtaggatctgaatccagtttggccctgaggctggtgaatggaggtgacaggtgtcagggccgagtggaggtcctataccgaggctcctggggcaccgtgtgtgatgatagctgggacaccagtgacgccaatgtggtctgccggcagctgggctgtggctgggccacgtcagccccaggaaatgcccggtttggccagggttcaggacccattgtcctggatgacgtgcgctgctcaggctatgagtcctacctgtggagctgcccccacaatggctggctctcccataactgtcagcacagtgaagacgctggtgtcatctgctcaggtgggcctccaagaccttgggctccctctcttggggtagattttgctcaggaagcgaggtctcattatgttctgatctcctcactcagagctttttcagcctttcctatatatctgatatctccttagctctctcctaggaaactgcatgagtcttcattgccaggttttgaggaggtcaggtaggacaacgggccaaagtgaaataagggtcacgcctttgttcacctaccgaggcagcgcaagcagagggagaagaggaaagtgccaggtctttgccttttagtgtggctggaaaggaatagctggggctggtttgttcatgaggaaagaggctgatttgggtcttggctttgcaggctgcataggaccatggtgcaggcgtctgctcagcttctgatgagggcctcgggctgcttgtactcctagcagaaagggatggggaggtggcctgggcagaggtcacaaggtgagggaggaaggaagagagagcaagagggagggctcagactcttcaaccaccagctcttgctaggaactaagagaagaactcacccctgaccagggagggcactaagttattcatgcagtgttggtctccatgacccagacctggtgcatcaggcctcacctctaaacttggggattcagttgcaatataacacttggatgtgacaagcctctaaagtatagcaccctggctctccagggttccatctttcccctactgaaagattttgcaaagggttacatggatgaagcacatatagaggatgggggagggactgtctccctgggaggagcccagaaccacaggctcctgctaggaagcgcggtcttctgctgaggcccaataaggtgatgtcttaatagagacacaaggctaggagtgcggatgtgtgtctgtccctctctggcctgagatttgggggctgtgagtccttgaccacaactccctccagagcactgcagtgtcttgcctgtgcaccggtctggtgtggagtgtgcagtccccatgaggtctgctaggcaaagcattgttatgaacgcctgtgggctggactggaacatcagaggcaggactttggctggagtggcctcctcacatttgctaactcagggactgctaagacatgcaagggagagggtaggttttgtgtcaacctgattactatgggcagacacaaggttaatcaccttggagttggcaatagtggacaggatctgcccagacaccctccaaggagcatctctgtggggacatgcatggcaatgccctccctctgtgatggggacctagggtggactgaaggcatgatctgtttagttccttccacctttgttccgattttgccagcttctgtatagtgcatctgatctgacctcctctttctcacagctgcccactcctggtcgacgcccagtccaggtgagtccccagtgtccttccttgggatgtcccttctctttctgtataattatccctttctgcactccacagagccctcgttcttctctgagtgaatactacatggcatacaattttcccctgctctgtaactgagaccctggaatggcgcttctgaaccagacatagggttcaagaggcttctgtcttctgttccatttatctcagctttcatgaagcagtttcatactgtcccaatggccaacccttagaggtttaggaagtgacctcatatttaattagctttggcacttttctattcagagctgatatgaccttcctgagaattgagagtgattgccaaagtctcctgggtagccaatgtcagctaaagccttaaacatggctgccgccacaggcaagcaatgtcagtgcaggcctgacacctcccttcctcactccttccaacaccccagattctgcagggctacatgtgcatccagaagaggcataggccatgctcgggcagggagagggataataaatatttctggtgcctccacttactgggaaacttgatacccctttggtcagctccttggtttccctaacattttagctcgagctagtagagtgtcagcaatggtgttagatgtacccgtcagtgcatgtgtcagtgcatggaacaggctaaccctttgtgactgagaagaggacatcccacacttcagaggcaggagggatcgaactggtctccagcaaggcctatgacccttgctgagcttgctgagctgcagacttgggcagacacatggggagcaagtggcaggaaccagaagtggggtagttttcatgatgtttgccttctccggagacctttccttttggagattttcaccatcaactttaattctagcctttgtctctgttgcaattacagacacattgccgaccatcaccttgcctgcatcgacagtaggtaaatattcctctcgcccctccctagggctcactctctacctctggacaaatgttttttctgaaaatgataggatgagggtcaaggtgggcccctctctttttcatgtccctgtgggttgcatgggaggaaggtagcgtctctggggacccagctctgggtctgatgttggaggctggagggtgctggtgacttgtctcccgtggaatcctgttccaagtggtcaggaaacatcctcatccaggtgctgaggaaaagccctggagggttccctaatcctactaagacctcattcctgtccctcagcccatgggctgcagaggtgtgaagagtcggtggaagtgactgtccccacacctgtctggccaaggccttgtcatacctgtgaaattttcagaagtcagacaagaccataggattgccaccaagctcctgagatggggagagtctggcctgcctactgtagctgtgtagctctgtcctgtgtgtacccaggttagggaatggggtttccattcctgttaacttcagtagggtcacagatgcttccccaaaacttgagccttcataaacccaggcagaatagggtgtcactgcttctttgactttgatgaagctgaatctctgattttattcatattcaaaggtgactgcctgcccaggtgactttagccattaggacatgccttgagtgtggaacattccttagattcctgacctcatgatagggatggatgaaggattcttgtgttcccctgtaggatctgaatccagtttggccctgaggctggtgaatggaggtgacaggtgtcagggccgagtggaggtcctataccaaggctcctggggcaccgtgtgcgatgacagctgggacaccaatgatgccaatgtcgtctgcaggcaactgggctgtggctgggccatgtcagccccaggaaatgcccggtttggtcagggctcaggacccattgtcctggatgatgtgcgctgctcaggacacgagtcttacctgtggagctgcccccacaatggctggctctcccacaactgtggccatagtgaagacgctggtgtcatctgctcaggtgggccttcaagaacttgggatcactctcttggggtggagtttgctccagaagaaactcctaattacattctgatctcctcactcaaagcttcttctatgttttctatatttctgaagacttgttagctctctgctaagaatccctatgtactcactgcctagtgttcctgtggtcacttaggacaggggaccaaactcaaacaacccagagtttttccccttcctgagggaaggcaaggaagaggcagaagagaaaagtgctggctccccagggctccatttctcccctgctgagtagcacggtgtgagggtataatggatgcaggacagacagcaaggcggggtagggatcctctcactgtgaggaactctgaactaaagatgcttgtctgaaagtgggttctcagctgagacccagtgaggaggtctggaaatagaggctcaagggttaggagtgcaaatgggtgtctgattctatcacgcctgggttgtgtgaggttggagtccttgacctcaggtcctctcagatcactgctgagcattgcctgtgccccaggtctggtgtggggagggcagcccccatgaggccggccaggcatggccttgtcattgcctgtgatcagggcttgaggacggcacaagggattttggctggagtggcttcctcagccttgctgactcaagaatgcctaagacgtgcaagggagagggttggtttaggccaaccgggttaccctgggcagacacaagttgatcacctcagagctggcaatagtggacaggatctgcctcgaccccttacatggtgcatctctgtggggatgtgcatggcaatgcccctccctgtgtgataggaactaggatggactgagtgtcagactcgcccatttctttccctcctcgttccactttgccgacttctgtgtaatgttcctgatctgaccttctcttctctttctcacagcttcccagtcccggccaacacctagtccaggtgggtccccagtgtccttcctcaaaatgtcccttctctttctgcccaatcaccccttccacactccacagagctctcctgtttctctgtgtggatactgtggggcatattatttctacccccaacaccagttgtgtaactgagaccccagcacagcgctttttaaacacacacaggattgaggaggcctctgtcttcttttcaacccctctcagctttcatgaaacagtttcatactgtcccagtggacaacccttacaggttcaggaagtggccccatgtttaatgagctttggtccttttatattccggactcacatatagtttctgaaaattgtgagtgtcaccctctgacctgttcaaggcatcatcagggcaggctcgatacccccatccttcactgctggaaacattccgagattatcatgggccacatttgtatccagaaaaggcagagtttgtgcttgggcagggagagggataataaaggtttgtgatgtcactgcttaaccagaaacctgattcctgattgtcccctgggcagcccctggttcccctaacattttatctgccagtgtccgagcctcagcaatggcgtctgatgtcctagtcagtccatgcatcagcagatgtgggatggcatggtgggggcatcctctaagagatagaaagataccccaggattagagaaatggagggctcagtctggtctccagcaggacctttgtccgtggatgagttcacagcagaggagacctgggaagacacatgggaagcaagtggcaggaacaggaagtggaattgttgccaggtggattccccctcccagagaaccttttgttctgcaccttttcccttcaagtctaattctgtcttttcctttgttgcaatttacagacacttggccaacctcacatgcatcaacagcaggtaaataatcctctcacccctccctagggctcactgtctctggacatattttgtgtttgaaactgataggatgaggctcaaggtgggcccctcttttttcactcccctgtgggttgcgtgggaggaaggtggaatctctgaggagccagtgctgggtctgatgtttgaggatggagggtgctggtgactgtctcccatggaatcctgttccaagtggtcaggaaagatcctcatccaggtgctcaggatgagcactggagggctccttaatcctactgggacctcgttcctggccctcaggccatgggatccagatctctgaagagcaggtgaaagtgccagtctctgcacttgtgtggccaaggtcttgccatcactggcaaattgccagaaggcagagaggaccatgcaggtgccaatgagctcctgaattcggagggggtctgggcttgtcatttgtagctgtgtatctccatcctttgtgtacccagagtggggaatggggtgtccattcctgtcccctcctctggggtcatacatgcttacccatagcttgagcttttatagacttgagtagaatagggcatcactttttccactatgacaaagtttaacctctgggtgcagctatcttccatcatgactgcatgccctggtgacttctgcattcgtattgaaacttgactactttgcccactgccctgattgttgtccatgccttatccttgacctcatatttgagatggatgaagcgttcttgtgttcccctgtaggatctgaatccagtttggccctgaggctggtgaatggaggtgacaggtgtcagggccgagtggaggtcctataccgaggctcctggggcaccgtgtgtgatgactactgggacaccaatgatgccaatgtggtttgcaggcagctgggctgtggctgggccacgtcagccccaggaaatgcccggtttggccagggttcaggacccattgtcctggatgatgtgcgctgctcaggacatgagtcctatctgtggagctgcccccacaatggctggctctcccacaactgtggccatcatgaagacgctggtgtcatctgctcaggtgggcctccaagaccttcggctccctctcctagttggagtttgctcaggaagaaaatcctaattacattatgatctcctctgaactcacagattcttctatgtttcttgtatttatgcagccttgttagctccctgctaagaatctgtatgaattttgctacagcggttggtgttcatgtggtcacttaggacaggggaccaaagtcaaacaacaacccagactttatccccttcctgaggcagtgcaaggaagaggcagaagagaaaactgctggctccccagggctccatttcttccctgctgagtagcagtggttgagggtatcatggacataggacagacagcggggcagaggagggatcctctcactgtgaggaactctgaaccaaagatgcttgtctggaagtgggttctcagctgagacccagtgaggaggtctggaaacagaggctcaagggttaggagtgcaaaatgggtgtctggttctatcaggcctgggttgtgtgaggttggagtccttgacctcaggtcctctcagaacgctgcagagcactgccttgccctgggtctggtgtggggagggcagcccccatgagactggccaggcttggcctcattattgcctgtggtcggggcttgaagatcacacaagggattttggctggagtggcttcctcagccttgctgactcaggaacacctaagatgtgcaagggagtgggttggtttaggtcaactgggttaccctgcgcagacacaatttgatctcctcagagctggcaatagtggacaggatctgcctcaaccccttacacggtgcatctctgtggggatgtgcatggcaatgtccctccctgtgtgataggaactaggatggactgagtgtcagactcgcccatttctttccctcctcattccagttttgtcgacttctgtgtaacattcctgatctgaccttctcttctctttctcacagcttcccagtcccagccgacacccagcccaggtaagttcccagtgtccttcctcaaaatgtcccttctctttctgcccaatcaccccttccccactccacagagctctcctgtttctctgtgtggatactgtggggcatattatttctaccgccaccaccggctgtatttcacatgggtccttttctattttccctaagtgtcagccggtctgagaaataaagggaaggcatacaaaagagcaaaattttaaagctgggtgttggggggagacatcacatgtcagcaggttccgtgatccctcctgagtagcaaaaccagcaagtttttattggtgattttcaaaaggggagggagtgcacaaatagggtgtgggtcacagagatcacatccttcacaaggtaataaaatatcacaaggtaaatggaggcagggcaagatcacaggactggggtgaaattaaaattgctaatgaagtttcgggcacgcattgtcattgaaaacattttatcaggagacagggtttgagagcagacaactggtctgaccaaaatttattaggaggcaatttcctcatcctaataagcctggaagcgctacgggggaccggggcttatttcatcccttatctgtaagcgtaaaagacagacgttcccaaagcggccatttcagaggcctccccttaggaacacattctctttctcagggatgttccttgctgagaaaaggaattcagcgatatttctcctatttgcttttgaaggaagagaaatgtggctctgttctgcctggcccacaggcagccagcctttaaggttatctcccttgttccctgaacaacgctgttatcctgttcttttttcacagtgcccagatttcatattgtttaaacaatttctgcagttaacgcaatcatcacagggtcctgaggtgacattcatcctcagtttatgaagaagatgggattaagagattaaagtaaagacaggcataggaaatcacaagagtattgattggggaagtgataagtgtccatgaaatcttcacaatttatgttcagagattgcagtaaagacaggcgtaagaaattataaaaatattaatttggggaactaataaatgtccatgaaatcttcaaatttatgttcttgtgccatggcctcagccggtccctctgtttggggtccctgacttcccgcaacacagcacagtgctttgaaaacacacataggattcaggaggcctctgtcttcttttcaacccctctcagctttcatgaaacagtttcatactgtcccagtggacagcccttacaggttcaggaagtggccccatgtttaatgagttttggtccttttatattcaggactcacatatagtttcgaaaattgagggtgtcaccctctgacctgttcaaggcattgtcagggcaggctcgatacccccatccatcactgctggaaaaattctgagattatgatggaccacatttgtatccagaagaggcagggtttgtgcttgggcagggaaagggataataaaggtttgtagtgtctctgcttagccagaaacctgattcctgattgtcccctgggcagcccctggttcccctaacattttatctgccagtgtctgagcctcagcaatggcatctgatgtcctagtcagtccatgcatcagcagatgtgggattgcatggtggggggcatcctctaacagatagaaagataccccaggattagagaaatggagggctcagtctggtctccagcaggacctttgttcatggatgagttcacagcagaggagacctgggaagacacatgggaagcaagtggcaggaacaggaagtggaattgttgccaggttgattccccctcccagagaaccttttgttctgtgccttttcccttcaagtctaattctgtcttttttctttgttgctatttacagacacttggccaacctctcgtgcatcaacagcaggtaaacaatcctctcacccctccctagggctcactatctctggacatattttgtgtttgaaactgataggatgaggctcaaggtgggcccctctcttttcatgtccctgtgggttgggtgggaggaaggtggagtttctagggagtcagccctgggtttgatgtttgaggatggagggtgctggtgactgtctctcatgggaccctgttccaagtgttcaggaacgatcctcatccaggtgctcaggacgagcactggaaggctccctaatcctgctgggacctctttcctggccctctgaccacgcactgcagacctgcaagggtgggtgaaaatttctgtccctgcagctgtctggccaagtccttgccatccctggaaatttgccagaaaccagagaggaccatgtggatgccaccaaactcttaaacatggggccagcatgggcctgctctctggagctgtggagctccatcctgtgtgtgcccagagtagggagtggggcattcattcctgtcacttccagtggggtcacaggtgcttccccaaaatctgagcctccataaacccaggcagcatagtgtatcacctctcctttccctatgataaagctgaacctccggtagcagttgtatgcaattgtgactgcttgcccaggtgactctggccattaggaagtaccctgagtgtggaacttgccttagattgttgacctcctggtggggatggatgaagggttcttgtgttcccctgtaggatctgaatccactttggccctgagactggtgaatggaggtgacaggtgtcgaggccgagtggaggtcctataccaaggctcctggggcaccgtgtgtgatgactactgggacaccaatgatgccaacgtggtctgcaggcagctgggctgtggctgggccatgtcagccccaggaaatgcccagtttggccagggctcaggacccattgtcctggatgatgtgcgctgctcaggacacgagtcttacctgtggagctgcccccacaatggctggctctcccacaactgtggccatcatgaagatgctggtgtcatctgctcaggtgggctttcaagaccttgggctccctctcttaagttgaagtttgctcaggaagaaaatcctaattacattctgatctcctcactcaaagctttttctatgttttctatatttctgaagtcttgttagctctctgctaagaatctttatgaattttgctacagtacctggtgcagctgtggccacttaggccagggctccgaactgaaacaacaacccagactttatccccatcctgaggcagtgcaaggaagaggcagaagagaaaagtgctggctccccacggctccatttcttccctgctgagtagcactggttgagggtatcgtggacacagcacagatagcaggggcagggagggatcctctcactacaaggaactgtgaactaaagatgcttgtctggaagtgggttctcagctgagacccagtgaggaggtctggaaatagaggctcaagggttaggagtgcaaatgcatgtctgtttgtgtcaggcctgcttggagtccttgacctcaggtcctctaagaatgctgcagagcactgcctgtgccccaggtctggtgtggggagggcagcccccatgagtctggccaggcatggccttgttattgcctgtggtcggggctgtaagatcacacaaggcatttgggctggagtggcctcctcagccttgctgactcaggaactgccaaaacatccaagggagagtgttggttttgggtcaacctggtcaccctgggcagacacaaagttactcacctcggagctgacaatagtggccaggatctgcctgcaccccttatatggtgcatctctgtgggaatttacatggcaatgcccctccctctgtgatagggactaggatggactgagtgtcaggcttgcccagttccttctatctttgttccagttttgccattttctgtatagtgcatctgatctgaccttctcttctctttctcacagctgctcagtcccagtcaacgcccaggccaggtgagtccccagcatccttcatcgggatgtcccttctctttctgcccagttacctcttccccactccacagagctctcctgcttttctgtgcggatactgtggggcatattatttttcctcccaccactctgtaactgagaccccagcatagtgcttcaacagacatagggttcaggaggcttctgtcttctgttcaatttatttcaggtttcatgaagcagtttcatactgtacaatggacaagccttacaggttcaggaagtggcctcatgtttaatgagctttagctcatttatattcagagctgatacaacctttctgagaattgagagtgactgccaaagtcacctgggaaggcaatgtcagttcaagccttaaacatgacttctgccatgggcaagcaatgtcagtgcaggcctgatacctccgtccctcactccttcaaataccccagattttgcaaggccatatctgcatccagaaaaggcagaggccatgctcgggcagggagagggataataaatatttctggtgcctccacttatcaggaaacttgatacccctttgggcggctccttggttcccctaacattttagctcgaactgtcagagtctcagcaatggtgtcacatgtgcccatcagtccatgtgtcactggatggggcaggctaacccttcgtagctgagaagaggacatctcacacttcagaggtaggagggatcgaactggtctccagcaaggcctttgttcctggctgtgctcactgagctgaagacttgggtagcacttggagcaagtggcaggaaccagaaattgaatagttttcatgatgcttgcctggttcagagatttttttttgtagctttcctccctcaagtctaattttgtcctttctctttgttgcaatttacagatacttggctgaccaccaacttaccggcattgacagtaggtaaataatcctctcgcccctccctagggctcactctctacctctggacaaacgtttcttttgaaaatgaaagaatgaggctcaagctggcgcctctgtttttcatgtttccgcgagttgcctggggaggtagactccctgggaacctagtcctgggtcagatgttggaggctggagggtgctggtgacctgtctcccctgggattctgttttatgtagtcaggaaagatcctcagccaggtgctcaggacaagccctggagggctccctaatcctactgggaccttgttcctggccctcaggccacaggctgcagacctgcgaatagtggggaaagtgcctgtccccatagctgtctggccaatgtcctaccattcctggcactttgctagaagccagagaggatcatgtgggtgccaccaaactcctgaacgtgaggcaggtcttggcctcctatctggagctgtgcagcttcatcctgtgtgagaatggagctcagaatgaggagtgaggcgtccattcctgtcacctccagtggggtcacaggtgcttccccaatacttgagcttccatagacttgggtggagtaggacatcactgcttcttccactatcatgaagctgaacctctgtctgtattcatattcaaaggtgattacctgcacacgtgactttggccattaggaagtgccctgagtgtggaacattccttaaatccttgacctcataatcagtatggatgaagggttcttgtgttcccctgtaggatctgaatccagtttggctctgaggctggtgaatggaggtgacaggtgtcgaggccgagtggaggtcctgtatcgaggctcctggggaaccgtgtgtgatgacagctgggacaccaatgatgccaatgtggtctgcaggcagctgggctgtggctgggccatgtcggccccaggaaatgcccggtttggccagggctcaggacccattgtcctggatgatgtgcgctgctcagggaatgagtcctacctgtggagctgcccccacaaaggctggctcacccacaactgtggccatcacgaagacgctggtgtcatctgctcaggtgggccttcaagacctggggctccctctcttggggtggagtttgctccagaagaaactcctaattacattctgatctcctcactcaaagcttctcctgtgtttcctgtgtttttgaagacttgttagctctctgctaagaatccatatgaattcactgcctagtgttcctgtggtcacttaggacaggggaccaaactgaaacaacaacccagactttatccccttcctgaggcagtgcaaggaagaggcagaagaaaaaatttctggctccccagggctccatttctcccctactgagtagcactgggtgagggtatggtggacacagcacagacagcggggcagaggagggatcctctccttaggaggaggctcatggtaaggaaaggacatatgttggggtagggaattctcacttgaggccccagtaaggagcatttggattggaggcatatgggctaagagtgcaaacgggtatctgtgcatgtgtgacctgggtcttggtcagtttcagctccttccaaagaactgcagtgcattgtgtgtctagcaagcatggtgttgggagggcagctcccatgagatctgccaggcaaagccttgttattacgtgtggtttgggatggaagatcacacaggggatttttgctggagtggtatcctgagacttgctgacttggtgaattgctaaaacctgcaagggaaagggttggttttggttcaattggacatcacatccagacacagagttaattgccttggagctggaaatggtggacagaatctgcttggatcccttataaggagcgtctttgaatccagccaaagcactagcattcagcaggtctgggtgaaactcctgggtcttgcttgaagcctctggccgctccctacctcaatcaatgtggtatctaccagttgtcaattgatctttaaagaggatctattattagggatgcttttgtttgcacatggcaggaactcaactcaaacactcttaagctagaaaggaattcattgtctcagttatccagaatgtttagtggtggatctggagcttcaggtacagctggttccagaagttccaagtcttttttccccatgctttgcttacatctactcttttatctgtgtgggcttcactatcaacttgctttttgcatgtggctgagagacagcagtgggcagccccaagtctatatcccaccaggagaaggagtcagtctgtcccagtacctctggctgacaaggcctgggaggactttgattgacctgcttgtaaacaggtgctttcttccaaaccatctctattagctctgacggctcagccagagttctatacccatctttgtgttcctttggggcgacgggaaggatgggggcactaggctctacttgaatcttgtaggatgctactttttaaaataggaatgactgtttctattagaataaaaaacaggcaggatgtttgtgacagagatagccatccctcagttggacccttcctttcttttgatactatctgctctttgctggttgacgttacccctctatcctgagatggaaccttccctctccctggctgttgcccatgttcattaccatcatctctatctagttccaggactttttcattatccccaactgaaagctcttaccccttaaccattcataatccatttctctttccctcagcccctggcaaccactaatctgctttctgcctctgtatacagattttactaagaattgtggtcactttctatgaatggaatcatagccttttctgtctggcttcattcacttaacataatgttttcaaggttcattcatattttagcatgtgtcagaactccactacttttaactgccaactaatattccattgtatggctacgccatctttgtctatccatttatcagcttatggacatatgggttgcttccatcttttggctgttgtgaataagtctgctatgagaattagtgtacggttttttgtttgcacttgtgtttccaattttgggagatatatacctaggagtgggattgctcggtaatagggtaattatgtttaatttattgtggaaacactgaacagttgccacagctgctgcaccaaatttgcattcccccaagcaatgcctgagaattctgattcctccgtatcctcaccaacacttgttatgatgtctttttcatcatggccatcctagtgggtgtaaggtggtatttcatggtgttttgatttgcatttccttgatgactaatgatgttgagcatcttttcatgtgttggtgggccctttgtatatattcttgggagaacaggggcttcattttatagatactaagctgaaggccagaggaactagactaatgtcagtatcttagcccaggctcacaggacagggttcaggtacacagagggatcaggatgcctggcccagtgttgtgtctagcatgtgacattccttcatggaggcctaactctgccattttttctccattctcaggcataggcactgctaggtatgcacaactaagtgtcctcatagttgcttctgcccactgtccctgtagctcatggtattcagtaggtccaggttttgtttcagattgaaggcaagctgtgggtttgaaagtgactcaggaataagcctcgggcctgatggggtggtccctgtgagcagagtgagtcagccagaggtggagaggtggactctcccaagaaccaggtcctagggctgcaccttgccaggcagctgggagctggtctcggttgcatcctgctgcaggggcacttgagcccagtggtccctgcagatccatgctgatggctcctgcactttaacctctgaatctgaaggcctggctcagcacttgaattgctggtcactggggtaactccatcagagaacatgcacagctcagtccacacccaagggttctagaaaacaacccttaagttgatgaagaacatcaacttaaaatgatgaagaacaggcttccgtcaatgtctatgctgctggagaacattaactggagacccagaaaccttggccttctggaagaattctgaacttcacttgacctcagatcctcttcctttaggagatacaggagagagttaattttcctgtcttttctagaatccaattctggtttggccctgaggctggtgaatggaggtgaccagtgtcagggccaggtggaggtcctgtaccaagtctcctggggcaccgtgtatgatgacaccaatgacgccaatgtggtctgcaggcagctgggccgtggctgggccgtggcattcccaggaaatgcctggtttgatcagggctcaggacccattgtcctggatgatgtgtgctgctcagggaatgagtcctaactgtggagctgcccgcacaatggctggctctcccacagctgtcagcacagtgaagatgctgtgtcatctgttcagatgggcctccaagaccttgggcctctattttagtgtgtggttttctccatgacaaggcttctctttgcactggcctcttcccagcctgagcttctcttcaagatggccagtttctctgatacctcagcaaggcaataacctcagcaaatgttgttggcgtctttgaattttatgggtaggcactagcttctttcttatgtaggttcctatagcaaacaagggttcaatctactttcaggctgtaagaatgaattcttccaacatctttttttgagactaaccgttaaggtttatatctactattccactctcctggatgactcttggggagcatttctaagtgatgagatggggacaggcactcagcatttctctcgctcatcatcctgggcactgggactgactcatgttttcttcttttccttgcagccacccaaataaattctactacgacaggtgagtctgctacaccccagtccagcaatatttctcttgggaattccaccctctcttgtttccagaagtaggaggagtagggtagactccccctgggggggtaatttctctctgaggactctgatctttgttagggtgacgagctgagttcccactgccatcactctcatgtctggttcaccgtggagggcccctgtggcctcctgctattgcctgctgatagtgctaagtgctggcagagatgctgctgtggaaggaggctttggtcctcccattatttcagatgaaaataactgtctaaattaacccatggaaaattaggaccttcattttagaaacatagccaagtaatacttctgcacgtatttgtcaaataaagaacactttcactttgagggagccatccgcaaagcgtttttgtgccacagtgaaaatatcctgggccaaatatgttgggaggtgctacatactctagaccttactggccatgaacagtgtaaactggaatggtcaaggctctgagaagtcctgtactaaggaaaaggatttaactttgtcagtcaaacaaattactatggaatggaaaaattatctactaaaatcctaaacagcttcatttttttttctagattggtggcatccaacaactacaaccactgcaagtaggtatcacattttctacctgaaccataggtcatacatttcttatccccaagcttggctatccatgagcgaatgctctgccccaccccagccttcctcaatctgcacatagccctggcctgtcccactatacccttcacctcttcatttgaatcaatgagataagtattcttaaaataatagacttaaaggcttttattttggggggtatctccaaagctttaggaggaagaagggagacaaatagtaaatggataattttactacaaattatgcttttccatgtcatttttatttcaccatatggctatgtttcaatagattttcattgcttttaaaaaataatagggatacttttctgtgttattaaatcttttctcacaatcattttaagtccctgtattgtattctattatacagatatgccatgaattatttgacaaatcatcagatgctagatatttgtttgtatttcttcattactgtaaatgattttgtgatgaagaatatttttatagataatttttttgcatacctcactaatttttcctttaggatataaatgggtttactggaccaaagtcaatgtcattgtagtgcctggtacatagaatgtacttcatgcatattaacttttactgtgttaggtattttaagatcttgctgtgtgtatggtcaaactaccatcaagaatggttgtaaaattatggaatgatgtaagagacaaactgatcttcttcctcagagctcacaatattattttgtacacaacaaactagaaaattacagttgtgacaactgtttccaaggaaaagttcagtgtgcaaagaggaagtattagtagagatcttccttgattggggagttaggggaagttccttatggaagtgacatttaagctgggagttaatagaggagcaggttcatttgctgaagtgtcttctaaccagaagggatgctttgaaggccctagggtgggaaggagcttggctctttgaaggagggtggggtgcgggcaaggagggactgcaggaaatctgtcgggtgaggccagatcattcagggccttgtgggtgggttaagactcccatctttatcctaaaggtagggaggctgcagaaagattttaatcttgagaattagctaattggaaatatatttgcaaaagatcatgtttatcttttctgccaaactgcatttcctgaaggcaggggccatgtctgcctttttcataatgtatccttattatctagcattgtgtctgcctttcaagaactgtttattgaaggaataaatgagtgaatgaatgaatggataaattaatgaataaatacataattactgttggcattttggcatacattccatacactgtatacacacacacaaacacacacacacacacagtatggcatgctttatatcccattgtataacccatcattttcatttaagtgtatataatacttttttcatgaccttaaaattagcatttttataacattgaaattatttgtatagaagaaggtttaatgactatatgattttccactgtatagatatatcatcatttagttaaacggttactaattgtggggcaaaaacattgtttccaattatattttataatgttaagtgactatatacaatagcatattttataaccatttatatttaatgattagaaatatgtaactcgtatccttgtctctgaaagtttgactttatccttaattatttcccagtgtagaaatagaaagggagggcaggccacatgatcttcaagaaacactgtcttcccatcaaatgggagaacgtatttctatctcataagggacttgtatctaggatatataagtgactcttgtagtcaatgataaaaagtcaaataacccaactgaacaatgagcaaaagacctgaaagatatttctctacagaagattcacagatagcagagaaggcattggaaagatgctcaatgtcattagccgtcagggacatgcaaatgaaacacccagtaggtgggctgtagtcaaaaagccagataatagcaagtgttgatgaggatgtggagaaattggaaaccttatgcacggctgcagggaatgtaaaatggtacagccactttgagaagcagtttggtggctcctcgaaaggttagacctggagtcaccatatgacccagcagttgtattcctaggcatatacccaggagaaatgaaaacatatgtccatacagaaacttgtatgtgaatgttcaggacagctttattcatagtagccaaatgtgaatgcaatgcaaatgtccatcatggtgaatcgagaaacaaatatgatatgtccatgcagtggagtattatttggcaataaaaatgaatttaatagtggccgggcgcggtggctcatacctgtaatcccagcattttgggaggccaagatgggcggattggctgaggtcaggacttcgagaccagcctggacaacgtggtgaaaccctgtctctactaaaaatacaaaaattagctgggcatagtggtgggcggctgtaatcccagctacttgggaagctggggcaggagaatcgcttgaacccgggaagcggaggttgcagtaagctgagatcgtgccactgcactccagcctgggtgacaagagcgaaactccatctcaaaacaaaacaaaagaaaaaaaagaatttaatattgatttatgctacaacatgatgaactttgaaaacacattgagaagtcagtcaaaaaaactaccatattgtacaatttgttttatatgaaatgtccacaataggcaaatctatagagacagaaaagtagatcagtgggtgccaggaatggagggtgttgagaagaaatggggagtgattgctaatgagtacagggtttctttttggggtgatgaaaataatctaaaattgactgtggtgatttcagagctctcagtatgctaaaaaccatggacttatccccttagaaaaagtaaagaaagagttatgaaaaagaaaaaaaaagacgttttaatttctatcactgagtgtgcacatgtttttaaaaagtttttattactataaaccaaccaacaaaatgtttgaccacttaatatttatccttttctgataaataacaatagctaatattgctgggtgcttatgtgcctggcactctctaagagtttatatagacatagaaacctatcttatgtttatgtataaatgttcatatatacatatcttatttaataccctcatcagacagatgaggcagatgccattaccactctcatttttctgatgaggaaactgaggcagagaggttaagtaactggctccagatcatggagctgatagaggcagagccaagatgcaaacccaggcttcttgttgcagaaaccctgctcctaacccaacgttgtgctacttgtgaattggcagagtcctgtgctcatggaagacgctagggaacacactgtgttatggagtgctctccacgggtcagcactgtgttcagccaggactatcccacgtccctgtctgtagctgattgaacaatgatagctgtcactttgttgctttcttggcatttttgctagaggtgacacatgctccctctgaagcttgggtcacctcctcgcagagggttgctgtccaggcctaacagggaaagcagggacttgaatcaaagcttctaatgttgggccacctagaaccaggcccaagagaggggacttgtttacagggaaagttaagtcttgttataaagtgcagaagatgaaactggatgatacttacacagatgattccttgtcacaaaatacctgaagacctggtacaatggagatgtcccctctctcctctctaggaccctcttcaaattgtggtggcttcttattctatgccagtgggacattctccagcccatcctaccctgcatactaccccaacaatgctaagtgtgtttgggaaatagaagtgaattctggttatcgcataaacctgggcttcagtaatctgaagtaagtaatgcctggtcatctggtgaggggtgagttcctctgcagcacacccactggtttagactgtgtcctgggctgggatgcttttcactctcatgtgccatggacaagcttttggtggctttgattcctaccataaagcatcagggaacactgatgtcctttgacttaattgaggaagagctagaagaaaaacctgtattcaatggcatccctcgtaaagtgcaaactatttataaaatggaggggcaataggaatttcaatgttgacttgaatacattttctccatacagattggaggcacaccataactgcagttttgattatgttgaaatctttgatggatcattgaatagcagtctcctgctggggaaaatctgtaatgataccaggcaaatatttacatcttcttacaaccgaatgaccattcactttcgaagtgacatcagtttccaaaacactggctttttggcttggtataactccttcccaagcggtaagtgcacactagaccatgcctatgaggcttggtggatttacccagctgcctctttgggggcaccatggttccccaaggaaatcaaagaagggcctcagcgatgcacggcccattctctttctcttggcactgactgtgtgggcaggcccttgggaaggcagcaaagggtgcagactgggggttccacctggccttgggtctgccaccaactctccaggggacctggtgactctccttcagagccacccctctccgtctggaggtgaggggatctgagcttggcgatgtctagagcccctttcagctctgcatggagcggtccagtacctccaccccagcttttccacatttctatttggcgactttagaggtgggaaaaggcctgtgggatgcttggcctttgaggtttgttgtgggacatttgttgtgggacatggccatgatctctcagttaatgtgtctttcagatgccaccttgaggttggtcaatttaaattcatcctatggtctatgtgccgggcgtgtagaaatttaccatggtggcacctgggggacagtttgtgatgactcctggaccattcaggaagctgaggtggtctgcagacagctagggtgtggacgtgcagtttcagcccttggaaatgcatattttggctctggctctggccccatcaccctggacgatgtagagtgctcagggacggaatccactctctggcagtgccggaaccgaggctggttctcccacaactgtaatcatcgtgaagatgctggtgtcatctgctcaggtatggcccaatgccatggaaggcccatttcacctgtaacttgctataaagcaagagcttaaggccagtggctgatggtgtctgtggcccaggcaggagctggtcattgtgtcctcgtggcctgcgcactccagaagagcatgcagggggctgctttatctttggccagtttctggacccagggccattatgctgaacactcatctgactaaaggacctccagcaatgattttacttctttatgcttcagtttccttgactgttgagtcggggtggctatgatagtacttgctactggtgacaattgggatggttttagaacaatcatggtcaaggagagagtgatgggtgttatgacctcagctgtaatcctgatgaccacaagtatgacgggacttagggagcatctggggaagctgggaaggcttctcaatagcaattgctgggtggacctggggaccctcgccgaggggggtcaggttatgggccatgtaagtgtatctctgtctcattccggcccctcctccaagccacatgtctgtgacctatgctttttttctattcctttttcaggaaaccatctatcgacacctggtaagtccctccgatttccattccacttccctggtctccaggtctctccattactgctgcctagactgtgcagggcatgttgctcactctccaaggagttcatctgtggtaccatcctctacagcccctgtcccctcccctgccggccaccaggatagtgtgcccctctctgtgcttcagtggcctgacccacctaagattaggatctccagtcagtcccgaggtgaggcccgccacctgtcagatttgactgtcctcacagacaccagaccctgaccagtgttggccaaatggggcccactgcatcgcagagctcctccctgcctgcccctgagctgctctgagtgttcccagcatggccctggcacctctccaacaccccccactgccccgccccctgcttgctttgtcatcccctcctggcctcccatagcagcagcttcaggcctgtgccctcccatccattctccactgtgcagccccttcaagagattcctcagggtcttctggtgatgaccccgctcctcagcacagcatgactgccagggctccccatgatctgctccctatgcttggtgccctctccccatcctctgcctgctccatctacacggaggttcccaaatctattccacccaggtgcagttgcacctgctgttcctctgcctgggacaccccgtttctacctctttgcctgccccctaattactgcccttttttccccactccatctggggcaggggccagacttccaggctcctctccttccccaggctttggtcaatctcatccttttcccagtgtgctgggattcgctctcctccagacctccccaaaggcaagtgagctccccaagggcaaggcctgtgtccagctcctccctgtggactcaggcttggcacagcatctgcacagctcatgagcagtcgacagctgtgtcagggatgccagaaaactgatcctgatcttttctttttgtcaacagctccttttctcaacatcacccgtccaaacagtaagttctgagctccctgacaagtctgtggcagagtggcctggaaattccccttcccatttcctcagtgacaatggggctggggaggagatggcttcccccaaagtggtctccctgcaagagtgccctgccagccctcagtggacggtccagatctaggccacctcttgctcttacttggtttctgtcttgggaattattttataaaattttaaagtaatttaaatttaaagtagtccgcaggtagactgtgcagtgtgctctgggggtcaccgacattcccactttttgtcctgacagcagattattcctgcggaggcttcctatcccaaccatcaggggacttttccagcccattctatcccgggaactatccaaacaatgccaagtgtgtgtgggacattgaggtgcaaaacaactaccgtgtgactgtgatcttcagagatgtccagtaagtgtgcgcccagaagaatgccttggggccccacagacctttcaagagggaataaatggtgcttaagtgtgcgcccagaagaatgccttggggccccacagacctttcaagagggaataaatggtgcttagaaagccaggagagaagtttgctgagagacatttttgacctagcccagaggcatcccgtggagagttggggagggggcacgagagccttggagtggacaaaagctctggtttcaagtcctaggtctttcaccaatttgctgtgtgaccacaggaagtcactcaactttcctgagcctcagtcaaaagaggggaataaaatacctgctttcctcacctcactgtttactgggaaggtcacgagaaacagagaggagagagagggagagagatgtgaaaatatttacaaaatgttgtccagtggaaaagatggttgttaagtagtaatgatagacttaggggcaataatagcactaataatcctattaacaaccacactggccaggtatgctgcctcagggttgtaatcccaacactttgggaggccgaggcaggaggatcacctgaatgcaggagttcaagaccagcctgagcaatatagggagaccccccatctctacaaaaaagtacaaaaattagctgggtgtggtggcctgcacctgtagtcccagctactaaggaggctgaggtgggagaatcgctagagccctgggagttgaaggttgtggtgaactatgatagcgccagtgcactccagcttgtggaacaaaacgagaccctgtctcaggaaaacaaaacaaaacaaaaagaacaattgtatctgttttgtggaaccctttttctccacccattcctttcttcatgtgagttccccaggggtcgggcagagatggaggaattgctgctccagagggtagggtatctgctctgcatccaatcataagtagaaatcatcgttttaagcagagaggacattactaaaagcacttttctttctttctttctttctttctttctttctttttctttctttctttctttctttctttctttctttctttctctctctctctctctctctctctctctctctctctctctctctctctctctctctctctctctttctctctttttctttctttctttttttttccggacatggagtctcgctctgtcacccaggctggaatgtagtggcacggtctcggctcactgcaacctctgcctcccgggttcaagcgattctcctgcctcagcctttcaagtagctgggcttacaggcacacgccacaatgcctggctaatttttgtatttttattagagacggggtttcaccatattggtcaggctggtcttcaactcctggcctcaggttatcctcccacctcggcctcccaaagtgctgggattacaggtgtgagccaccatgcctgatgtcaaaagtacattaatatatgatttatccaaggaggcgggtggcccagctaactgtgaagaggcaccagtgtttgctagtgtcctgaacaaggggctacactaatttcttctctaacagccactgttgaacaaaatagttttccctgttgatttctgtttgcagtgggctttggagtctctgctttagtgattcatttgggattttgcaaaagatacatcattttattctctttgtcattacaatacaaagattgcacttaaagctgatgcagtcctatgggaaaaggttgaccatgactggttctttaaccagcatcttgatagcaatgaccatcaccatttgtgacattttacaaagcccttttctgtatgttgttttatttgagcttcaccatagccctcttcagtgtgcatggatcagattactttgcctttgtaaataggaaaagctttagagagattatttgacttgcccagtatttatttattcaattatttatttctctcactatgaattcatgcatattgattttattctgtgggggcactagggacttttcgatggaagaaaaatggtctaaatcaggatgcgagcccttcctttcctgatgtaaagggctgacaggtgaggggctgtagatttcatatgtgtgattgcaaagggcaggactaagacccaggcatggaggttgagggaagatgagactctcttgatttaaggatacctatgactttcttttgtttcaatttttatttttctttttattttttgagacagggcctcactctgtcgcccaaactggagtgcagtggcacgatctcggctcactgcaacctctgcctccttggttcaagtgattttcctgcctcagcctcctgagtagcctccctcaccctacaggcttgtgccaccacgcccggctaatttttggatttttagtagagacagggtttcaccacgttggccaggctggtctcgaacttatgacctcagatgatccacctgccttggtctcccaaagtgctgggattataagtgtgagctactgcgcccagccaaggagacctatgactttcatcgatgaactttgtcagagtttctggcacagaggtgtgaccccaccctgagatctgaccccctgcgtcaaattctgggaggaaatgaagccaaatggtgtgtcctctctctgcaggcttgaaggtggctgcaactatgattatattgaagttttcgatggcccctaccgcagttcccctctcattgctcgagtttgtgatggggccagaggctccttcacttcttcctccaacttcatgtccattcgcttcatcagtgaccacagcatcacaaggagagggttccgggctgagtactactccagtccctccaatgacagcaccagtaagtccccttgtggaaatgctctgttgggactggggacatcctgagagcatctgtggctcaactgtcctgttgttgtgaaataagaaatgaaggaaccctttcaggtcaccagggcttgattttcagctgaaagggaccaggagcagtgggacttgggactctggctgcccagaaataaagtcagggctagaactggctgatgggtgatgattggtcttactgtggtcagcagagactaagtagagggtcccagatgatgctcttcgtggagagtgatgagtcagtgccaaaggcagaggtgacctcttggcttgaaaccttgtgaccttctcagagtgtgggacactgtggccatggcctgagacctaacacatttggtttctatctgaagatggactgagctgggtggctggaagtggctgagataaggtcactcagacacttccagcagagcctgtatggccatgatttgagttgctgtatggactgatatgtagaatggccaagggccaggcaaggtgacatccagggtctcttatgcagtcaggattaaagactgacttgcttcatggctaaaagaccttgtttcatgacattcccacaatttgatcatacagttactttactttatagataaatggtaacttggccaaacataccacttatttaaaaatcctgcctccaattctccatcagagaaatcctgagtccacgtgctctccttgggctttcataaggatggggctgacttgaccctcgggtccttgggggattgcagtgaggtctatgcccacatcctaagtgctgaccctccctgtcagccaccctggtctgtgcactttttaagtggaaacagcctctggccccgtaggacttgtggagtctggggcagtgactgagtgccttatctgtccttgtctatcagacctgctctgtctgccaaatcacatgcaagccagtgtgagcaggagctatctccaatccttgggcttttctgccagtgaccttgtcatttccacctggaatggatactacgagtgtcggccccagataacgccgaacctggtgatattcacaattccctactcaggctgcggcaccttcaagcaggtaagcctggggcttcccattccatttcccagtgcacaagctttcttagagcggtatgtcctgtgcttcttgaattctggggatgaagaaattatgattttgggataatcaggacataattggaataaaggaagataaaaaacctttggtgctatgatatggctgcagctacttccaaataggaagaaggaagctgagcagaaagagtatctccagctgtgtccagcagagagggcttctggcagaccgccactcccatcagcaataacaacagcagctcctggagcaggtccagattttgcagggcctgaagcttatacagttagggttgggggtgagaggcaggtgttgagatgggcaggggcctcattaagtcaaagaatgcaatatctatgaacttttataaactttgcaaaaacgtatggctgtgcaaacacattgctaggccttggaggaggcctgcacattgcagtaggcagggaagagggggcccaaaagcttcagcttcattagctccatagtcagctggcctctgcagctaccatttgttgagctatcaccatctaagatggccccctgcatccaattttgggtgaaagtgaagccaatatggtgtgtcccttctctacaggcttgaaggtggctgcaactatgattatactgaagttttcaacagcccctaccaccgatttctgtggtttgcctgggactttgcagattttagcatagaaagtcccacgttccaggaaacccctcactcccaggcaaatgaggacggttagtcaccctacaagtggcagatgctgtgattggtccttgtcatactcccccagtgaaggcctggccttaattgtgttgggttctggcttgctgtgagtttggtcagtggaagtcagtccactgaaggtgaccattgttcctatgccaagtgagcagcctggagactccctgagcggccccgctgagggcccttcacacccattcacacccattcacactcgttcacacccattcacacccgtttggagcggccagacaactctgtcagccctgtttcttctaacttggctgatcatgaatagcacacgccacattcttattcctccactcatttatttatttttattttattttaattttttaatgacaggttctcattctgttgcccaggctggatgcccaggcaggggtgcatcatagctcacagcagacttgaactcctgggcttaagcgatcttccagcctcagcctccagagtagctgggactataggcatgcaccaccacacccagctaattaacaaatttttttttgtagaggtgggatcttgctatgtgtcccaggctgatctcgaactcctgagctcaagtgatcctcctgccttggcctcccaaatgctgggattatgggcatgaaccactgctcctggcctcctctatttctttaaataaccatattgcctatcacactgagtgcctcaggggcagggccaatgttttgttcatctttgcaacccccagtgcccctggtcctgagcctaagagttgatatagtattattaacagctcatacagatatcagacactgaactaagtgtgctatataacttttaaaattctcaggacaactttattcccacttaattatgaggcaacggaggcttgcagaaggtaagccacttgcccagaaccatatggccatgagctgcgggtctaagacatagaagtagggctgtgccatccatggctggagcttcccacagctccaccaggctggcctgtgatagtgaatttttatctaaaattagaactgcttcttctgaccaagaaataaatctgcactccatgttcattatttggagtggattcagaatttacctccatcgtaggcaccacaggcaaatgtgacatccatgcaaatgatcatgttaatgtacagggttcaatggaaagcacttgagagcatctttgaaagagtaagaagggtcatactgtcatgtgcgtccatgtgaaaagaccaccaaacaagctttgtgtgagcaataaagctttttaattacctgggtgcaggtgggctgagtccaaaaagagagtcagcgaagagagataggggtggggccgttttataggatttgggtaggtagtggaaaattacagtcaaagggggttgttctctggcgggcaggggcgggggtcacaaggtgctcagtgggggagcttctgagccaggagaaggaatttcacaaggtaacgtcatcagttaaggcaggaaccagccatttttacttgttttgtgattcttcagttacttcaggccatctggatgtatatgtgcaggcttgggctcagaggcctgacaaaagggtttattgcggtcgtatggtttaagtcatacggtttattgtgacaactgttggcactgaaatataaagcaaaaacaaatttttaagacagtttaaagtcagaaaatgtacgctaagagcaggtggacaaggtagaaccccttcctgtgggtcttccccagacctggacccagagtgtaagctctggcaccctgtgctggctcatagccaaaggataggcacgtgccatggccatctctgagtggttctgggaggggtggaagtcttgttgagtcacgtccctctcattcacacccaaatcagctatgggattcccttagcaggtgacatgtgcctgactctgctctcttgcctgcctctcctaggcagacaatgacaccatcgactattccaacttcctcacagcagctgtctcaggtggcatcatcaagaggaggacagacctccgtattcacgtcagctgcagaatgcttcagaacacctgggtcgacaccatgtacattgctaatgacaccatccacgttgctaataacaccatccaggtcgaggaagtccagtatggcaattttgacgtgaacatttccttttatacttcctcatctttcttgtatcctgtgaccagccgcccttactacgtggacctgaaccaggacttgtacgttcaggctgaaatcctccattctgatgctgtactgaccttgtttgtggacacctgcgtggcatcaccatactccaatgacttcacgtctttgacttatgatctaatccggagtgggtaaggagtgtctttatgcgatggccttaaacctttacttgataactcaaacatgagtagccccaaaggcttgaagaatgcaaattttgatgaactgcagttcccagtacttccagcttaactggatccctttctacatgtagtgatgtcctgtagctttcacctttgaggtgcttttactctgtgttctgtatcacatccctgatttctcatcaggtaggatgaccatgtatcatctccagttaacatctggggagatgggtttctggagaatagaacagctcagcagtgttcactcagcaggttagctgtaaaccgtgatcagactctaggtgactgaactccagccatacggttaaaaagacctgcgtatagtgggaaaagcattgatttggagcagaccaaggttgaaatgccagctctgccacgtgccagttgcatgattctgggccagtgaaagcacctctatggaccagttgctcgcctgtcaagtggggataatgacacgcacattgtaaggctgttgggaggatgggatgagagagagtggatgtggcactgagcacagagagtgtgcagcaggtggtccaccaggaatgtgcactgaagatggcaggagccctgctgccctccttcagcctgggaatagaagctctgggagtccacgggttccagtcaagctcaggaggtgcagaggtcaggccagagatgtcaggctggggccagagggtgtgcaggctgggctgctctaccatagcccagcttccctggatgactgcatgtgggtgaagtggggtttgactcttctgcactcatgatgacaccatgatgtgcaactccagccccctctgaagtctctgttgatagatgtgtaccacacttcttggcttacaatatagacctggacacttcagtagccattgccttccaagagaatttataccaataggataaagagttctactaggaattagaggtgggcagattcaattcgacaccctcttgatatgctaaacgtagcacctctttccaggcacagtgtgaacatatgtcagttcagtaggtaggtgttgaggctcaccttgtttacagtctatgcagcttgctcaattcacagcagcccccttggtggctgagaggaggggagaaagcttaaccagattcccgttgtacaaatagtcataaggtgacttttgaatttgtgtgaattgattgacattaatgaaaatgagtgggtgaccttagttcttccttgccaaaggattctttctggtcaaatcctgccatttctatatgacaatgcaatttgctgggaagacggggatgtgtgtgcaggggtagatgtaccctggctatacctggagcacagggacttattggctacacctggccatcaacaagatcatccacctggaagtccattagaatgacctggggctccaaacacaccctgcccaggccctacccatacattctctgtttggcctggtggggcttgggcatgttacgtttaaaaaatcttgagtgattctgaggtggagtcatggctgtggcttcgctgtggcattctggtctgcgtggagccctgaatggcagggttttacggcaaatgcaatgactgcccaggggcttctaagtgaccctgacctttttcccaagtgtcccacctctgaacaagcctctggctatttttgcttcctcctttgccactaagggagctactgtgaaaaaaaaaacaaaaacaaaaaagaaaacttggtatttgagagaatctgggttgcctatggaggaaggaaggaggctctagaagacagaaggaggggagcagatcctggccaggttcccaggctgagccagactgccctggagaccacatccaccacccacgagaaatgcccatcctaggccagtgggccagttttcctggcttttctctttgccatgcccttcaaaatcccaccaatctataataactgggttagtgtgagctgcttcttccatcttaggaaaattcctgtaagcatatccttaggttattttccctctgacccctgctgagaggaggtgccccagggaatgaggagggggtttatatcggtataggggctcctggagggttcgcaggccagtgtggaacgtacagctgcatggggctcagggcaggctgaggagggtcaggaaagagaggccctgggagagggagggtcagggcactgtactcagagtgcagccgaatgagaccttgcctggccctgacaccaggtgagagaagggaaggtcatttacttttctgccctgtctctgggtcccgctcctgggctccaaactccagctacttccctgactcatctggtttacctgggtgcatggagcatgtggtcattgtgggattaggcctcaacccactgtgcagtatgggacctgcttgtctatcgggaaagctctcacaggctttgctgcctaaggatggcggtgaggtaccggagctgccaggatttctctgcaggcccctcagtgagtgtctgatccacacgttctgacagaaggaaggtgaggtgtgcaggaggcaggggcagtgaggacaggctgtggagttcctcacctggtacaactgagtcatgaaggaagaatcgggccttggtgagagctaaggggctactgttctcttccagatgcgtgagggatgacacctacggaccctactcctcgccatctcttcgcattgcccgcttccggttcagggccttccacttcctgaaccgcttcccctccgtgtacctgcgttgtaaaatggtggtgtgcagagcgtatgacccctcttcccgctgctaccgaggctgtgtgttgaggtcgaagagggatgtgggctcctaccaggaaaaggtggacgtcgtcctgggtcccatccagctgcagacccccccacgccgagaagaggagcctcggtaggtggtcgctctcagaccccactgtccaccggggcgcagacccctgactcggggacttgggatgttcctcttggtgtcatattccaactcagattgagccctacattgtgctgcacctggtcatacggagttgaatcagacctggttcccgcctcccccaaggctcatggtccttggaggacccgttgcagggcgaggtcaagagagttctgacctggatggcccatagacctgacgtcccagaatccatgcttctcatctgcaaaatgaaaatgtcaatacttacttcttagcactgttgagagggttacttacataaaggaattttggtgaaactgcctcagcctgttcctggtgcaagtcattgagtgcttggtaaatggtagtttttgttactcctgttgttgtcacccatgttaacaacaccaatgatgacagtattcctcacaacgataataactataacagcagacgtgttgacatcagggtctagacagggccatggggacgccagctgcatggatttgtcctgatcgctggcaggctctactgggcacaagctatgtcacttttcttctccagaacagggagtgcatctgctgctgtgctgctgtgttgctgtgcggctgtgctgctgtgttgctgtgcggctgtgatgctgcgctgctgtgctgctgtcatgctgtgctgctgtgatgctgtgcggctgtgctgctgtcatgctgtgatgctgtgcggctgtgcggctgtgcggctgtgcggctgtgctgctgtgttgctgtgcggctgtgctgctgtgttgtgggcatggacgagggaatgaatgtttgcagagtgatgcccaggatttctggcccagtctggggctaggtcaacagatgtggtggccatggtgttgggggtgggtggggcagcagtagttgtcacaagccctctccttggtcagggcgctgcccatggggcatctttgacagctctttcctcttgattcctattcaggccgtctttatgtccacctgagtccagactctttcctcacttgttcattcattcaatgcatgtttaatgaaggactgttatgcaccaggaggcagataaagtcttggaggaaaagatgcaattcagaataagtctcatgaatggtgcatgcaatggggtcggagtgaggagcaaaggacatcagggcagggcgaaggtgcctgtgggcacaggctcacttccctcctctccctcctgttccctgcagctgccgtagtagctcacgtcctgggggcctcttacctgggactcttgtaatcatttcccagctggtctaaaatgcccaactctctcccctcccattcatctggagcctcaggccagatttgttctcccaaagcccagttcccagttcctgctaagaaaaacttccctgactctccttggctgataaacgtgaaatctctctagtctgacagtcagctgcccattggggtctggcctcagtttcccattcagcacttccttctccaagttttttatcctttcccaccaaacagttctgattgcctttactatgcccagggggccatggcctttacttgtcttcctctcctcctctgccaggctctgtcctggtgccctgtctgttattgtggtctcctctccttcccagacgtgttggtggctgatgtggaggagacagccagcacccaggggaggtatcacagcactgccatctcttctggggtcttcctggctgtggttctggttgtggcagccttcaccctggggaggaaggcacacagcaccagtggccggcctctgagctcctagatatgaagcccagagaaggtgtttagatattggctctgccagcccaggcacccgagagaggatggaagaaacaagggtgcagagcttggcgcccagcagcacctgaactccatttagcttggcacaggtgtatggtggggtgggtggaggtggggtgaagaaagatggggtgggtagaggtggggtgaagaaaggtggagcgaggttttccccagatccgaaggctcagtgctgggtcaaaatgtcaaaggtaaacaggtgctaacgtctaaagcctcacctgcaactctaagccaaacattagtaacagcagagctttctctaggtggaatttctgagcctttttttttttttttttgagacagtgtcttgctttgttgcccaggcttgagtgcagtgacacaatctcaactcactgcaacctccgtctcctgggttcaagcgattcttctgcctcagcctccctagtagctaagattacagacaggctagaccatgcccagctaagttttgtatttttagtagagacggggtttcatcatgttggccaggctggtctcaaactcctgacttcaagtgatctgcctgcctaggcctcccaaagtgccgggattacaggtgtgagccactgtacccggcctcttttctgaccttttataagctcgcttcttaggcctgtagcataaatctcagcctttccttagggtagagccagctgaataaagaacctttttcagagtaagtgtcaatttggccactgttgccttcgtttctcctaagaactagatcctttcaaattaagcagacaggtggggtggttgtcatacagaatgagaaggggcaactcgtgtgtcttcccagtgtccttggagtgttggttcttcccaaagcaggatatgcaggatgcagcctggagaaagacaagaatgctaaatgcattgtaagtttcagtggctgtgattgaaaattaaagatgattgcctccatttctctagggatctgcctcttttggtttttgacacttcatctccagaactatgggctggggcggttcagggaaagaagcaaactccttagggcccttaggaagggagtcctgtttgcatgaggtctccagagagaaggagattgacaggtgacccaaggagctcagaagaaacaaagggatgagctgggttccaaggaagcagtacatttgcctagaaaatcagagagaaatcaggctcagggctcctaggtcaggcttggcaggaatgggagcttttgtgtactgccctggcaatgccagtgtttgccccatgaagccaatctcaggacccctgtcccaagaggggacagctaagacagcctaactctggatgtgtgagttgagctgcatgagaccccagcagggcaatggctacaggggaaaccccaggacaaggggacagagaattccagcagagacttggccatagctgccagctctgactagggctgcccaagagctgcccaccaccggcagctgtggtgagacgccatgagcctccgtgggattcagagtgcgtcctgagccctaccaggagtcagaggagctagggggccccagggactgtctcttgttggtttccattctccttgccatcacccccaacactcacccttaacctcccaggctggggcagttaaggaaagccttaagggttcccctgtgaccatgagtctgccctgaaaagcaatgtcaatgcagtggaatgcaggcaccagcccaggactggatctgagcagatgcagaagcagcaggaagctggagtggtgtgcgggtttgaggtacacatcaatcagagtaacaaagtggcaagtcagacatccgagaattcaaaaaagttcagaggctgggaacccaacatggaatcccaactccatccattcattcgttcgttcattcattcattcattcattcattcgttcattcactcattcatgaatgtctaagttgtaccctgtgcttgagaaggagcagtggaggctgtgggtccctgctgtgaggatgagggggaccctggggctgggggctcagcaggcttgccctgagtggtccccatgagcgccagccccaagccaggctctgtacttgaacctgtggatacaaagaggggtcatgcaggggtcaccattataaggggaaatttatttccacaggaaacatttccacctcctgaagtgtcccctctccttaaaaatagccccagtagccagtgcttcttcacagataaccaccacagtgttagccacttggcagcctctcaaggaaggaggtaatggcccctttatcagcagggcccagccaggagagtggctagtagggacagatgagtttggtagcaagaggcagtgaggtccaggtgaaaggtagagcagaagacagggccaccggtgacaggggctctggactaaagctgtcagagtgtgactgagggtccagtcacaggggacacagagaagtgggcttgcttgggagcagggacccatcctccccatccacaccacatctccacactcagggaggattgggctgacaccaagtggctgtgattcccagcaactgagactgtggtttgaggcaagggtgctcaactctactgcacgtgagaatggcccgggggcttttgaacctgctgctgccaggctgcacccaagccagttagatcagaatctaatcagagggtaggcctggacattggtgacccaccagactcaggttgttccaagattgagagctgctggtttaggactccttaaatccctctgagagagtccaggttgtgccctgtgcttaagaaggagcagtggagactatgggtccctgctgtgaggatgagggggaccctggtgcggggttctcagcaggcttgccctgagtgttcctgaaagatctactttccaagtcccaaaagaccgtatcaaaatcccactgacctaaagtgcctcatttctgctgattcatatttgccccagcctctgccatccataagaacatgccatggaggaaacactgattaagcatcttctgccagcctggcaccttggacataatcctctaatcctccatgtggccaggtattattctcacctggcagggatggaaactgaggctgagagaggcaagtcagcacagaactgcacaggattcaggtagcgagtggcagagttggggtctgagtcggggtcactgacttctggtcctaggttccctcctccctgttccatcatccccaaggcaccaggagcccaggagcccaggaggcctggcctcacattgagtttgcacagagaactgcatcagacacactcctgtctgcagctcctatgtaagatgtggtaccaggtgcaaaaggagggcttaaaggagggttgtgatgtctacaccacacccacaccccagctggccccacgggactactcacttgacctgtggtggctcctccaagttctccgcacctccagtacctgctcatagcccggtgatcctgctccaggctccaccttcagcagagtgactgacaaccaggggccaagagaacacaaggccgggccacatggcacctgttttgagctgtctcctgtgaccttgtagggacagaggctgccctccagccccttcgaaccacagcatctcaccatcctcctgttatcccacctgccagtgccagagggcgctgcagaacaaccttggagctattttattcctgaagaacttgttactgtgtttactgtgagtgcccgtggttgtccattacaggaaggggttccacagttttcagctctaataaaggactcctgtgaaagcctgtcctggctcctttccattactttaaggggacagaatccgatctactgtctgacaacagagtggatggtagctcccctttctgcctggtccctaccacaggctgaaggtggcattcagcagccccttgagatcttgtcccctccagccctgttcctggcatccaaatccctgcagtggctagtaaggggttctgccctgggcaggggctctatcctctgcaggtttgatggcacctgaatggcttctggtgtgtgggaatcagggacagccccagccaatggtcgtttcctgtaggggatgaaactttgacctcagcatctcttcccattgcctgtgttggctggagtacttagtgtcccgagtgcttggcaaggccactcaggtgtgcactgactggagggagaaggtcctctcgggaaacctgtgtctgtgaaatgctgcattttcagaaatcatacaagctggatgttatgtggccattattaaaaattaaattgtagagtcttacaattaaataaatattatattaaaaataaaaatattaaataccaaaactcagcactttctggttatttgactccattttactattacctgtgcccaaggatatttacatcacgttgtgtctgtctgctggaaatactgtcccccgcggagtgactgcccagctctcccagctccacatgcaatggcgtcttattgctggcataaaatggccatggggggaggattcacaccatggaaatcacgctacaaaggaagcttccaccttcccagagcctgttgttaaagatttcacaatgccccactgcctacagctcacccagaaaggggcaaatacactaggagagcttggaaaaaggcttcattggcctgccaccatgttcaagtttccttcattggcattaaatttttttggaaagcgtctgtgttttagcaagtgtggaatccaaagctacctcggcagggagatgccttgggaagctcccacaggctctgatgaaagcagtggttgtggcacctggcctactcttggcccctggggaagggaaagctgtccaggtacaggttaggggcaggccaaagacgggaagccaggtggtggaggctatgggatggcacacgtcagagtcctgcctcatctccctctgcctgagtccagcaccaaattccctctcctgctcctcttagccatgaggacgtctgatatccctcagctccatctttggatatctggcctgagccaaccttcaggtgacagttctgttttccctggaactctatacctataagtgcctgggagcccatatggtttgtccaagcttcgaaatgaggaacagcatccctgctgaatcagagacaaagatttgtttctgtaacagcatcttccaagaggcttaagctccaagattaagtgatggagtcatgtgggggcactgatgactccaagggcttggcctgggacaactgctcaggacaaaggagaagccaaggcagagtgaggccaccatgctgggtaatgactcatctgattgagatctaagatttgtacagagctagcagggaacatagaggagtgaacgctttcaaaatctgctccatcctcattcacagcctgctggggagctctctatggtcaaggaggcttggaatgggtgcacagccacccaggctttcctgtgttctgatgagttagaatctctcctcaaccaacccacctccaccccatgcaccactgcagatttctacatatgggactacaggtggcaaagatggggagtctgcttcttgatacctgtcttctcccaagtatgtaaatactggagggttgagtgttggcctggggtgcctaggcatagtgccaagctcagacttttgtattggaggggtgggtgggggtggaaaattatgaagaaactcacagggaacacaggatcagtaacttctcaggatagagacccacagtgactgtcccagcttgtcaccttctcccagagggatgccttctgtgtgctgtgaggagagcagaagagttggggagggggtatcaggaagctactggaactcttaaatctttgtggaagcctcactggttaagtttggtcaggatgtggttggctcccattgtgtcaggatggctgcctagttaataaaattgctgtctcttcttcctttctctgatcaccggattttcctttaaattacatgcagaattttggtaggggaaacaattcagtactattttcctgggactttggttaataaaatctctgtctcttctcccttcctctgatcactggattttcctttaaattacacccagaactttggtaggggaaccaattcagtactattttcctgggacttttccagttttagcactgaaaatctcaagttctggaacccttcgatcccagacaagccagaatggctggtcactctagagcctctggacaaggctacagggaagaggaggtccagatgctataacaatcatcaaacacagaagactggaaaccctttagcaatgaaatttagactttcacttttttagtctcttttcaattcagtttgaataattccttttagcatttcttgtagggaaggtctagtggttatgaactgatgaactcccttggttatggttagtctgggaaagtctttatatttccttcgtttacaaaggacagttttcctgtctaaagtattcttggttgactgactttttgtcttttagtattttgaatatatcattatcccagtctctcctggcctgcaaagtttccgctgagaagttaactcatagacttaaggggagctcctttgtatatgataagttgcttttcttgtcgctctcaaaattctctcttcgactactgaaaatttaattatattgtgtctcattgtaaaccttttaggattcaacctattgggaacctttgatcttcatgaatctggatgtccatttctctgcctagatatcagaaattttcaattatgattttcttaaatatgtttttctcccttttctgtctcttttctgcatctggaattctcagaatatgtacattggtttacttgatggtatcacgtaaatcccagtcttttccccctatttttcatctttcttctttttgtttatctaaccagatgatttcaaataacctgtttgagttcactgattctttcttctgctaatcaagcttactattgaagatctcttgagtttttcagctcagtcattgtattcttcagctgtaggatttctgcttgtttcttttttatggtttctattttttaaatgaacttataatttttttcattgttgtttcatagatttcatgtagtactaaatctgttcttttcagtgaacttcaagacaattatttgaattatttgtcaagtagttaatggatttccacttctttagagctggttactggagccttattagtttcctttgatggaatcatgtttgcctgattcttcatggtccttgtaatcttgcaatggtgtctgtgcatcagaaggagcagtcgcctcttctgatctttaaagactggatttggtaggaaaagatctactgggtctcaagacagatatgccgcctctgggactgcagtcaagctgggatggcccttggtcatggggcttctttcatgtcttcagttgggtccatggttggcagtcctgttatcctgggtgtgggtgagtatagtttctgtggggtccccagagaaaagagactgcctttaacactacagaaaccagggctagagttgactatgcaggctggttttcagtctggggctgagtctatggtagctgacctgttcctgggacacaggcataccttctagaagcagatttctatgctcttatgtttcagtggtgtgtcacaacctcctacctgggtcctgaagcttccataaaggtatatgtgtctgtggatggttgccaaattgttgttttgtggagaagtgagagctggggattcctattctgccatcttgctcacatcacccttccctctgccttggacattttttctttaaccaaataaattcatcagttggcatatagccttgaactgtataagcctggataattgtaataaaagtttcttgggcctacatttgtgggtgtacacaatcaccttcgatataaggagcaaggtgaaagtaggttgatgttgatccttccttctttccttcctttcttcctttcttttcttttcttttcttttcttttcttttcttttcttttctttctttctttcttttttctttcttttttctattggagacatagttactaaggtcataatgtttatcgtttggtagctatgaaccagttactcattaggatgtaaatataactggctaacatttaacccccaccttacaagcaataaatactaccgtgacaggaatgctttctaactccttaaaagtcatggtatttctctttgaaagcatttcatgtttaaatagaaaaaactcccctataagcaggaaagaatattttatgctctccatgtcaaaaatggctgaaacaacctctgatatgtgagatgaattggatggtcaaaagcagtgaatgaaaaggatttccagataatggctgacttgaaagctaaaaactatacaactccttaataagagcagttaccgaatgacaagtgataggccaatttggaatggagtgaaattcagtgatgcatttggtatttttgtagactttaagtcctaagtgcttcatctctctgatggctattaccacagaattaaaaaaaaaaaaagagagagaggttaaacaaaagcatcaattaatctatataggaatttggatattttcattgaaaatgaagtcttttgaaatttctgggtctgtttaatttaaagcattctgagtctgtaccaaagatgagcaataattgctcacaagggtactggggttctctgttgcattgtgaatatggaattgtagtggtagttagcaacatatagtccactggttctagctatgtcctcgttttccatggtttaatttttgcaagccctgtcaatatattttaagattaggaaagtcattaagaatcattttgtgtaagctgtcaggataggtgttttccaagcatagtatttttcatatttctatctgattatttttgatatttatttggttgtattctagaacagctttgacaggattttggagattggggtgaagcactgaaccaaagtcacagatatgcacatatccctctaagaaggtgaagttaacatttgtcagagggacctggaagatttctttgtaaccacctgtccaaggagtttggtatctctaaaagtgaacaggcagagcatgtctggttagttttggaaggggcgtgactaacaggtgatggagtgttgttcttactgttgaaagattttcttaaggggcaagtgttttattttctggtattcatgggacattgtaggggttaggatattttcagcttcatatgaaagaaacccactcaagttggcttaaacagcaaggacaaatacagtagttcccccttatccacaaagtatacatttcaagaccctaatgaatatctgaaattgcagatagtgttttttcctattcatacatacctatgacaaactttatttcataaattagatggtaagaaattaacaatgataataaaatagaacaattataaaaatatgctataataaaagttatgtaaatgtggtctgcctttgtttctcaaaacatcttattgtactgtagatcttagcaacttcacatacacatcttttttccttattaagccgagaagattcacattttcacttaaagaaaccacttcatgacttccctatggcatatccggattgccgtgattccatgtcctgcaccttaaggccaattttaaataaaataaaggttatttggatgcaagcactgctatccaacacactcaatctggtaacccagatggctcctaagtgaataatgggcaggtgggaagtggcaactcaggccagttctcagacctgagtatgaggtcagttgccccctgggcacattgggcgcatggggtgagaatagatacatggacaaaattggggttctataaaaaaggagggaaactatgctggagaagaaacttatgaaatgcccaccagatccttaaactcttcctggtaaaataaaagcaagggtgctagggaggtgaatgatgacagacgctggggcagtggcgagaccagtgcgacagttctgaatctgtgggggacagacagtcagagggggtctttgaacaagatgtggagaattactaaactctcctggagaagcagagagaaaaactgcagtgcagaaggccatgaggaaggaacatacaaaggggagaaatgccggtctgcctaggaccatttggaaactaggaattacctgaaggaacaaagatccaagggacataactcctcaaaagctggtgtgaacccagatctttcctgcaagaggacactgcttggggtacctaagacattgatttctggggtcccccagaaaacaagttagatagtaagagattaactgcttcttcttcccacgcagccgcagccatgctgggatgctgctggcggggagcacagctgccctgacacattggagcccatggtagcatcctcagcatggacaacaagaggaaggacgtatcctctccatgggctcccgcatttgttccatgtgggtattcacatccaatggtgaggagctttgtcctcccccagcccagggcctgaagaaagatgaatgaggggtaatgggacagggtatctggagtaagaggaggaaggagaattgtgaggaagcattgcagtttactttggtaatacctgggagcttaacactaaaacggccttagcactgaattctgagcagagaggaaacttaccaacttcgcttctgcctcccttcctcagttgggatgctatgagtggctagatggctcctagcccagaagtgtcggcctgttctacttgagttggaaagctccttcacactgtgaacccatcagggcctgtgcaaataattacgggaaggaaaggacaagtgtggcctctatgattcataagaagaagaagagcaatgcaagagaaaactgttctgaaggcatggactggcatttccaaaagggcctcagctggagcagagacactgaaaagatgccagtcccactggaattcaggaaaacacacatttaataaagttaggtattgtttctagcatatttgatcagcaagacacattaaaagatttggtaaatagttcagaaaagtggatactcctgttgtcttggttgttgtataaattggcaacagtccttggtaggcactgcagctcacattcctattcatggtagaggaacagtccatcttaagtccataccacgttttatttacttactcatcagctgatggacgcttgggttgcttccacatgctggctattatgagcaatgctgctatggaaattcatgtaccaatttttgtgtgggcttatgttttcatttctctgaagtatatatctgatggaatttatgggccataagggaactctctgtgtaaccttaaggaaaactgccaacctgtttccacagaggcttgtgctgtgttattttaatcacaaccctgccctgggactgagccgtgtaggtcctagcatgacccatggataataaatacagacacaggtactcatgccatccacctggacattcgcacacaggtggacctgcccctgcagtggccccaccatgacccactcacacctcgagcagctcaagggcctgattctgtgcctttgtcctccacagatacagagagggcggtgggagccacaggcagtcaggaggttgggacctcgccctagtgccacccctgatgccctgtgactttgggtaagtctcctgctctttgtgggtcttggttccttgcttgtccaaggactcctggcctgcctcacctctcaggtgttatgagactttttcaatgtaacacaggtgaaagtgctatgagctaaacctaaggcaggtgggctgcccaatcaggaggtcatgatggtctgtggtcaacttgtgattcttcctctgagaccacccagagaggaaaagaggagaacctgatcattatatctcattctaggtgacagaggactctgaaccagactgagaaggaacagtgttcattagcagctagccacacctcacgcctccctctctagaccacccagtgctgcaggtgatcctgcagcacactcagatcctgcagcttggacagccttggctccaggtgagagggaggagatcagatttcaggagcggctctatatagctccaagccaccagagctgtgctcactcctgaggctggtgccaggctctgctcaggatgaggctgtccagagccttcgcttgggcactgctgtgcagtacaggtaatgtgtggcccccgagccctctgtcctgggcttctctttgctttcctgttccactctgaggttgttgtagtttgctttttgcataggaagaagctcatggctgattggctgtgagatactctcctccatacaaaatgtgtcactttccccttagtactggaggaggaagggacagacagggattgttctggtcactaggctgatgtcagcatgatttttaatgtttctcagctcttggatctatgggcctcttccttgccttaagcaacttatgctgagattctacggggggcaagccagaagtggctgagagaatgagacatggtcttgctttggaggcgttccaggtggtgtgagcatctgccaatgctcccctggctcatgcaagcctggctctgcacatgttgggcagaggctgcacctgtgactgcagaaataagattgagccacggttttcctgcatcagccttgggtgagggagaaggagtatgacccagtaacccttccagaaacatacatggattctgttccagcatttctgtacacctacttctttggggtcagtaggtcagatgtgaaaactattctatcgttcctgtccttttgatattggagcatgtgtctgttagactctatcttcttcctctttgttgatcttattataagccctatggcatttcccaatgtatttatgcgaaatgagtagcatatgaactttataatatcaaggatgtataatacccaatgtctatataagatatataatcctggaaaaaatatataaaataaagaaactcataactcatggaatgtgatgacagttggtgccctatgaatcactctctgtactgaaacacacagcacacattccccatccctaaaaggcttgtattcaattgaggactgaaaccagctcacacagagtcaaatagcagcacaagaagcaatggcccccgacacccccaccaggcagccgtggcagctgcagacactgtgaggtctggggttcacccagctgtgctgttcacaccaggcttcccagtgaggtggagctcaggtctggcctccagcatggggaggtctggaaaggccggaataggacgtgctgagcaggtgccgtgagcagaggtggagtcacccgaatggggtgaatttaggaacaaagagaacacagagaaaggtgctccctccttagtctgagtgtttcaggaagggcaaagctcaccctggggcctgggttaggcacatttgagcatgttcaactgcatttcaggcacattgctgaagtggccgcttcttgcttcactatgcgtgaggtctctctggggacagaagagggcttggctcctggtctttgttctagataggtctgggctttttccaagacacttggtgggccttggggaggcccacagtcctccatgaatgtgatttggggagaggaagacacagggtcagggaccttccagaactgaccttgcagagtttccctccactcatgaagctggaaggagcgtttggatcctgtaaacctcacatgaagcgagcatctctgtcgtgtcgtctaagttgttctgaatgtttgtcctggagcttgaaggattgcctgaaattcactgacacgtttggagaggaaaaacaaatcctacttttatttgccctttctgatttttctaaattaacagatacagaggtgctgcaggcaggccttgtcctctagctctggcatgcagcgcacggtcccctgggatttagtgagagcagatccaggtctttgatggtcccagagcaccctggagtggaataatatgatggaaccagctgagtcctagcttctgcttagcacgctgatgtctttggctggaaagggtctagggaaaccctggccaaaaaggagccaaagaaataaaaataacaaggcgcctatgtccattctcctgctgactgacatgcggctccaggtcagacctttcacctctgtcaaccacgattttctcatttatgaattggagatagaaacaggtaacaaagaaataataatggtgaagaccattaaacacttattcaacactcaacattctgtaggtactacatcaataatttcatacaggttgtctaatttcaccatgattggaactttttgaatagtaataattttcccaaaatttttagggtttgagaaagtaaataagttgcaaacagcttccctagaggcacatgctgtcatgctagctaggactgtgatgagggccattctgatgcagaggctgggctcctgccgccatgtctgtcacgagtgtgaaccacagagccacgtctcctgagggaggccctgcgactgcacccagagctcctgcatccaagtccgtgacacgtccctgaaatggtgagccttccataaataaacgtgtcatttcccttcacttaacaatgttattcaagttgattattgattttattatgaaatttacaataagaaatgtttagaaaaggtttagtgtgaaaaactctccagttttgcccaggatgaaaggtttcatggacaagtgatcttccacgctaaagcaacaaaaatcatcaaaactaggacaagacagtccccttgatcagagcagtttttcagactgtggtgtcagaatgtggactttgagtcgaaccgagcaaggagaaagcagcagtgagtgagctgggccgtgagtgctgagagccattccttctttccttgggatgcagggctgctccagggatggggacagcgatatcccctcctctccctgcccagctctgtccctttgcactcaagctcctcttcatagtgtggtcattttccattcttctcccttgacccattggtaacttcggcttttcattttgcttttctgttttcatgattattcaggaataatccatttaccaacaatgacaagaagtaaacatgagcaatatatattcaccctttccctctcctcacacaaggactatgtatttctgagttggacaccatatgtctcgacaggaagtgtaggacctgagcctttttctgggccaaaagaatgtggtacatgtatctgaatatcagcttcagcactgatacaacttcagctcaatcctgaaacttctctctccacacatggtcttcctctgtgtgtccctcaactccttccagccccatggagcccctctcttttcctgccttctctgtagcctcactgtgcagagaaaggaggcacctctccacagagctgtgtcccaggagaatgggagcctcttctaaacacctggagtcctagagagctgaggggctgctccatcctcggagtcagagatgaaagccttgaaggaacagggaagaactgcagcgtggagagggtgggtcggagggagtagaggtttcctcctgctgcaggcagcctgttgatggatggattcatttacttagtgcttagccagttgctgggtacctgctgggcactttacacacccgaacacatttgcccccttatgcgaggtgctactttcatcctcactgaacagtgttctggaaccgcaccctcaggtcttacagtgacatggattctcatgtatgggggtggttaggcctctctgggggcaggaacactgcctatttgctattttttctggcctccttaggaaaagacaatcagagtggtagaaaggaggtgttcgtgctgactttctgttttccactgtggcggtggggtagatgataaagaagatttggtgaggggtgctaaatttcttctatttcccagtgatctaaaagaaattatactacaaatgggtgtgataactcaaaatctctgagtgtatgaaacagaagccacattagttttgggggaatggctatctggtcaccaatttccttttttgtttttgttttgttttgtttgttgttgtttgtttgtttgagaccaagtctggctctgtcacccaggctggagggcagtggtgctatcttggctcactacaacctccacctcctggattcaagtgattcttgtgcctcagcctcctgagtagctgggattacaggcgtgcacaaccacacccagctaatttttgtactttttagtagagatggggtttcgccatgttggctacgctggtctcaaacttctgatctcaagtgatctgcctgcctcggcctctcaaagttctgggattgcaagcgtgagccaccgcacctggcctgatcaccaatttttctgagaacacctggaagttgagagtatcaacaaccatttgccccagagatagcaaagtccctcagctcaggagatgccctggagccacggtggttcctgattctctggttgtaggacccgctcagtgtaggagtgtccttagtgtaggggtgtcctcagtgtaggggtgtcctcagtgtgggggtgtcctcggtgtgggggtgtcctcggtgtgggggtgtcctcggtgtgggggtgtcctcggtgtgtggggtgtcctcggtgtggggggtgtcctcagtgtgggggttgtcctcacgcattctctgggaaggttttcaactcaggaacaaaacagaatctgtctgggccatccaggtgaaactaaaaggaaatctatctgttatttcctttcctcaagtgagtgctcaggatgtgatttcctttgttgatggtatagtttgctgggatgaaatccacatggcgtcttgccagtttacccccacccaacccagaggcctctaaatagaattggaggcttccactcctgctgcaaatgcatttagtgcctccctgtcttccaggtcaggtgctctctccttagcctgcattgcaaaatacttcccaatgtggctcctggacctctcctcccctccacccactcctgccctcggccccctccacactggggttcctggcaccacctgtgaagcagctccatgccattgctcacactgggctctgatgagaacgcctacttctacccctgtcagactcatctgccctatccttagggtcctctacgaggatttcatgattcagctggaggcccagctcttctgtagtgtctgcgtgactccttcccagacgggcagagctctttcttttgcaccctactagataccttcagaaaaggccgagttgtcttttcaatgtacaccgacacttgtttcattctttgacgccactgcaatgaaagctctcttttggggttcaaggcaaaattgttaatgaatgaatacatgaatgaatgattgaatgaatgaaagcagtgataagatcccagaaggcagaaaaccctgtagcatttatacccaagacagtctgttttgattgagcatggcagccacatttccatcaattccagacaaagccaaacacaacccaggatgtggatgagaaagatgatggaatatatgtgactaaggtccccctttccctccacactggcttttgggctgggacctcaaggttatgcaggtgctctgtgtgacaaaggacatcttttggatggctgcctcagatacagaacttagaccatttgcccaacacgggctccagtgattctgaaaaaggacttgcagcacaggagaccaagatggagaaacaaggagagaaggaggttggagttgggaattccctgtgccaccatttttccgggctcagaaggattggcagctctgaacattttcctgtattgtccttttgcccttttcaaagattggttttagatctcactgtccttggcatcaaggaagcactcaggctgggccaaaagcaaaactagtatgaagtcaaccctgtgtgtgtcctaatgggatatgtcttaactgtcttctcatacttcaaataagctgtaaacactctcccatgtacataaagcttgctgggggctaattgaggatgagaggtcaggtttgaagactgaagggggtaagaggagtggggagacccctcaggagggcgacattccatgtccacaatatctcactgtaggtaagaaatggaggcccctccctgccttgagtcagggaagccaagcttgggctggggacccttgttgcccctctatttgccaagggcaggaatcacagagtggcatccacacactcatgtctggagcatctcatcctgacacagaggctgtggctgaaaacacatgtccctgagatgcagattttgtagcttgtggggcctgaaacacagctggtggctggaattaaaattcctgagtggtattcccatccacaggcagggcttccaagggcactcggaagacgcctgcagtcctggtgaagaaaacatttattttattcaggggttatggaaagagactaatctgtgtgcagaagagctgttagactttccattccttgctcgccccgggccttgcacttctgagaagtaagctaatgagagctggtgccactcgctggggaggaagctgcctgctggagttaggctgattccaaatgctgacacctgtcagttctctgccccacagcctcacctatgggagtgaacaggtagaagtcttggatggatctctggggtccagatccctgagcaaaatgtgtaaagatatgtccctgacctaccaatcctcttccaatattatgaccatcacatataacagaactttcagccaaccatccacattctttgtgggatgcatattaccatagtgactcagaaggtaggtggggaaggggaaaacctgctgattctccccttctctgtggaagccagctgagtggcatgctgcatatagagatgtttctgtgactgccagaaaaaaaggtgagaccgctttccagtggccaagtattgagtacaggtagtacaaaaaatgcattgggacatacgattatagcctggagcaactcatgttgacacacgagtagaataatgcccagtctgtatccccagaggcttgtattcagttgagtactgaaaccagctcacacagagtcaagtggcagcacaagaagcaatggcccccgacacgtccaccaggcaatgggtggaagctgcagacactgtgaggtctgaggtcggccccacatgcgctgatcacaccaggcttcccagtgaggtggagctcaggcctggcctccggcatggggaggtctgggaagactgcaaaggacgtgctgggcaggttccatgaccaggagtggagtcacctgagtggggcgaactgaaggacaaggagagagaggcacttcctcatgggccctgtaggcattgctggtgcagagatgtgtgcactggggtggtttggggcaggacggctgggtggagcatttgagaggctcagacatgaggctggacctcttaggggtctccttcctggaacatccccccagctctgtcaactcctctccagcatggggggcccctctgccctcccatctgggaagcctcactgggcagggaaaggagctgcctctccacagagcctgtgtcccatgggggacaggagcctcctctaatcacccagagtctggagagcggacgggctgctccaacttcagagtcaaaagtgagagctgtgaaggaaaagggaagaatcgcagcatggaggatgcgggctgggggcaggagcagtttccttgtgatgcaggcagcttattcatttattttttaccaaggacagaggacttgccaggtacagaacaaaccttttaaaataggaacatattggatcctagaacacctcttccatgccacttcttttttaactcctcaggtgactgcgtctctctctccttttgcctcatcagtcaccccatgaaaatctatagtggattttagcataaaatgttacttgcatttttatttttgtctgccactatggaaactctaactttgggttcaagccatatttcctaaatgaatgaatgtgtgactagtgtgataagatcacggaaggcattagcaacatagcagtaagttactgccctgctatcccagggccatcatcatggattttaacgtgggagtcacatttccatcaactccagacaaagccaagggcaggccacagtaatggatgagagacgtgatgaaatctgagtgactaagggctcctcccgctccagaggtggagtggtgtcaggacccccactaagtttctcggggctttctaggatgaaggacacctgggaaatggctcttacacgagcagtgctacaaccctctacaaaactttgttttcataaggcagcaaataatggtatgttcatgaaggtcatgattcagggaacagagaggagtttgaggggaggacagggctgaatgagccaggcatttcttgtgtcgctatttctccaggggtcagaagagtgagatgtttggaacattttcctaaggaccctttcctttttcaaaggtattttggttctgactgtccctgtcaccaagaggctcaaggttcagccagtaggaaaactcgtacagaaggtccccatatttctgctgttctgagatgtgcccctcttatcttcttatcctacagagcctctgggctcccgcctgggagcaggagatacactgggggctaagtgaacacgaggggtggtggatcaggctgaagtgttggccttgaaaagtgcctggtctggccagggctgcaggccttcttcctggaggacacgctctgctcagaacagggctgctcctgtggagctgccctaacaacaacttgctctcccataactgtggccatgggtgaggggttggtgttatctgctcaggtgggcttctaagtcactggtcctctattttgttttgtagttttcttcaagaaagtgctgaaagggctccagtgcatggggccttctcacacatttgggcacatttccttaatttatgagtactcctttatttttaagccaatttagtaccttctggccacaacacataacaaaacagatgtatgcacacataaatacatctgagcacacatacacactcatacaaagatcctatagctttaactttggaactctagccaagagatatctacacaaactcaccagcttatcaaaaaatggttggatgtaagcagttgtttttatcttaataccagtagaatggtcctctaaactagaaaaaatacattttcttaagcaaaaaccatatccttatgtttttgtttcaccaaacacacatcttattctcctacttctctaactcctagtaactctaattcctagtgaaaattctaggattacttaatttaacataacatgactttaagatttcaaatcaatagagaaaattaaatttaccaaattaaacttaccaaagatgaccaaagtcatgtgaactgaaaagcctctgaactagtttctgttagtccaataaacacttagacttttctttaagacaattaattagagttctttagactttaagacaattaattagcgctgtttcatataacttggtcgtgaaatatcacttcacatgacacatacagttctatagacggacacagacagaggcagatcttaaacactttagatttttcatttgtgtgttttcaaaatttttctgtcccctacttcagattattggtctcctgatgatctgttccaagtccaaaataattgttaacgaagcaactctaaatgtacaactccaaagacatgactttggtgaaatagggtagaaaatgtacatctcaaaggcacagacttagacctaaacaaagtcaaggtctgttatgtaaactttaagccattgtcttccccctagttaaggttcctggtggtacagatgcagagacagagatgctcttacaaaacggagatttcctttaatgatgtaaattttctttacaaaatgtttttattaaagtgacttaatttgataggtgtttttatttgtttgtttgtttgtttttgagacagagtctcgccctgttgcccaggctagagtgcagtggcgcaatctcggctctctgcaacctccgcctcctgggttcacgccattctcctgcctcagcctcctgagtagctgggagtacagaggcccgccaccacgcccagctaatgataggtggtcttttaacttagcttgattagatcaccggctttagggtaaagctctttggggaatggggccaagaattcatgcattttttaaggactaaaccacaatgttcttattcaaatgtgtgaagaaaagagtatctccctgtagtaatgaccatttcctgccaactgtcctcagccacccctaaaattgtagctatcttctgccattacacacactaaagtcagatcctctcacagtacaaggtaatctctggtacccccaaaagccaaagaaaccaggtaacgcaatacaagacagaagagctttagacctgagaacaatctgcccatgactgttgaaactccacaaagaaagaacacccctaaaaggagtgagcggtgcctttatcctgagctctttaagggacccaaattattagaagcctttctagatatgtttttcacttggtactgaagatggcaacagggtggaagtaagtgaaacaacaatttttaagaaaggaagtgaactgagaagccaagcacctttttgtttttctttttgcagctgtgggggattttagccaattcagaggcctccataatttggaattcttatccggatttgaccaagtccagtacagttggtcaaatccaatgggagaaagactgaaaaaaaaacagcgaaaagccaaacaatatgcttattcttcttattcatatagttgtattttttggatgactgaggatggctatttggagattttggtgaggtagtaaactgaaggagccaatatgtgcatgttcctcagggcctctgagaagttgacatagtcagcatttagtcaaagggaccttgaaggtttctgtgtcaccacttgccccactgaacgctctaatggtaaggagaaattaagaccagctggttatcagtcttaacttttagtcattaaggagacttttcaacacaatatcccaattcagctacttacctaggaatggggcccaggccgaagattgctctctaccatcttagaagcaggaaagaaactcaaactcaccttcccttttgcaagtaagcagagattccaggaaggacttgctctcctgtttccaatgtcatggaaagcaggaaaacttgccttccctgttagaagtgagtaaaactccagaaaagcagtcgtatggtgaaatacaccttagatctcacccaagtttgggggagatcagggattctctggagtggggaagctcccaggcctcagcaaattgtcccattggtttgagcaataaagatagcccaagccagtaccaagcacccacaggagattcatcaaaggtcaggggcacctccactcagagtctcttcagttggtcgccaatttgtaaaccaaaaggtatctgagacaggtctcaattgatttaaaagtttattttgccaaggttaaggacatgactagaaattgaaaaaacaaacacacacatgcacacacacacacacacacacagaaaaagcttgtggtcccaagaagattttgtgggcttcaatacttaaaggggaaaagatggctggaagggaaagagggagggtatggtcatccacatgtctacgctgtgccgcttgggctggaaggcataggattaagcaacttctcttgcatctctgttcctacatttcattgtgttaatttttttccttcccaatcaataatcctggctggaaggcataggattaagcaacttctcttgcatttctgttcctacatttcattgtgttaatttttttccttcccaatcaataatcttaattcaattactttaaaaatgtttctaagtcttaagaaaaggagcaggtaggggatagtcaatcatgagtttgtctcacactcagtaaataggcatttatataagataaggtgaacatagagtaactacctgtggagatatttaaccttttatctgtagctctctgcttaggaacaaaaggaaaggcagcttcttgcatgcctcagctttcagcttagtttcctttttccttttggcataggaaattggagtttggagtttttatttttctttcacagaagatagataacaaataagcataggaaaagatactgccaaatgaagatggaatttttgttgtagttaccagcgtaagggcttggagtttagccatagcctggctttccatgatttgattttcagaagccctgtcaatagattatggttactttactcaataactaccattttatgtaaatcttcaggatgagtgtttcccaagcataatgttttgcatatgtccctctgcttattcttgtaatttagatggctgtattttctgatggctgtggctggcttctggagactttggtgaggcagtaaatagaaggacccacatgcacatgtgcctcagggcctctgagaagttgacatagtcagcattttgtcaaagggacgttggaggtttctgtggcgccacctgcccaagctgtttggaatctcccaaatgaggtgccatggcaggtctgctcagcctgggggattttagcaggtgatggatggttctcattcttctaagactctctaaagagcaagcactttaatttctggtattcaaggggccttgaagagcttaggatattttcagctacatgaacaaaaacctcatctcaaattgacttaaacaatgaggacagggattgatgcctgtgtctggacaatgcagaggctttagggctgacatcagcagcagctctggtgtggccttcccaccattgccttgctctgcagctctgccagttggcttcatcctcatcctggtagcaagggggagcagccatgtctgcctccctctgagtcacaccttcctttgatgccattggaccaatctgggtcacatactcaagtccgcatccatcactgatgcagagggtgagccttctgtcaccatccatgccaccttcctactctactcaggccagcatttggagctaggcttggagccagttgctcctaggacacattgggtatgctgggtgagaatagatacctggaaaaagttggggttttttgtttccaactgggaaatcatgctagggagacaacacaaaaaatgcccatcagaccctaaaattcttcctggtaaagtaaaagtaagggtggtggggaggcagataatggcagacctggaacagaggagaccagttggacagttctgacactgtggatggcatcagtcacaggggtctttgaacaaggtgcagagaattactaacctctcctggagaagcagaggacaggtctgagtgcagcaggctatgagagaagaacatacaaagggaaataaacaaatccacttagggctagataggagcaagggacgacctgggaggataaagatctgagggacgcaaatcctcagaagctggtgctaacccaaatctttcctccaagctgacatcgtgagttggggcacctaagactttggtttccagggtcctccagaaaagatactaggtctttgttccttcagacagccacagccatgcggggacgatgctggaagacatgtagccatcctgacacattggagcccatggcaggatccttgggctggggtacaagaggaaggaagcatcctctccatgggctccagcatttgctccatctgggcattcacatccaattgtggggagctttgacctcttcccagcccagggccaggggtagggtgaatgaggggtaatgggacagggtatctggagtaagaggaggaaggagaattgtgaggaagtattgcagtttactttggtaatacatggggacttaacactaaaacagcctttttcagtgacttctgagtagggagaaacaactgggctcccagcccagcagtgtcggtctgttctacttgagttggaaagccccttcacactgtgaacccatcatggcctgtgcaaacaaagttgtgggaaataaaggccgagggtggcttctttgatccataagaagacgagtgatgcaatacaagattgccctgaagatatgaacaggcatttctgaaagagctgtagtgggagtggaggcattgaaagggtgccagccccactggactttggggaaatgcattttataacattaggtattatttccatcatatttgattacaagacatattaaaagatgtgacaaaatcaggagttggttagagtttaggaaaatgggtcctcatgaagtcctggttgttgtataaattggtcacagtctttggttgacaaattggcttgcattccttcatatggctgaataaattcccattatggctataccaagttttcttcatctgtttctcagttgatattagatagtttccctctttggctaatataagcaatgttactatgaacattcatgtacaaatttatatctagacatatgctgttaattctctttagcatacagctagtggaattgctagaccataaaggaactctctgtgtaaccttctaagaaatttccagcctgttctccacagaagcctcttttaaccatgaccctgccctgggactgagccatgtggatcctggcatgacacatgggtaatacaggcagacacaggtactcatgccatctacctggacattcctacatgggtgggcctatccctgcagtggccccactgtgacccactcacacattgatctgctcaagggcctgatttcatgcctttgctctcctgtgacacagagagggctgtgggagagatgggcagtcaggagttcgggacctcaccctggttctgcccctgatgccctgtgactttgggaaagtctcctggttctctctgggtctcggatcttcagctttccaaggactcctggcctgcctcacctctggggtgttgtgaggcttccgcaacataatacagctgcagatgctacaagttaacccaaagaaagagggctgccccagtaggagatcacagattgaggccagcttgtgatacttcccttgagtctgcctgggcggaaaggagaaggagcacctggccattatatctctgtctaggtgaaacctggaacctggctgagaaagatcagtgttgattagcatctagccacacctcatccctccctctctagaccacccaggtgatcctgcagcaccctcagatcctacagcttggccaatcttggctccagatgggagggagaagatcagatttcatgggtgtttctatataaccccaagccaccagagctgagctcactcctgaggttggtgccaggccctgctgaggatgaggctgtccagagccttcgcttggccgctgctgtgcagtataggtaacgcatggccccaggccctttcttctgggcctcgcactgttttccttttcaactgcagagattttaaaatttgcttattgccaaggaagaagcccatggctgattagctgaaagatactctcttccatacagaatgtttcacttagtgctggtggaagaagagacaaataggaaaatatctatgtcattgtgctgatgccatcgtgatttttaaacatttctgggttcctgagttcccggtcttgatgtgttctgtgaccctccttcctgccttaagcaatgtatgctgagattctgcagggctcacccagaagtggctgagaaaatcagacatggtcttgctttcgaggctttccaggtggtctgacggcaggcagtgtcttggtgagggtgccctgcattgaatgtgtctggggacttctgagggggtaactgtggcccttgggggagcccacagcaggagggagctctgcatctgcccagcgggttgtcacatggctgctgcagcaacttcgggaggagcaataaccagcagctcccaccgctggctgggagtgcctggaagagggggagtcacttgccctctagagggctggaccctgggaattgtgtcaactgcatgaggactggccaactgattttgaatgcaggcaggaaaggaagagggtatagatttcctcagggagatgtcttcgtctctatgtctctcttcccctggcttcctgtttccctcattctccccaccttctttctttgtatcctcctctttctctcccctttccttcctgagctccttgtttcctactctcgtcacttctttctcctctcttgcccttgccgggtcctttccaaccttgcccatttctcctgcgctgctccactttgctgactgcacactcacgtcaggggctgccccatcaccgggtgctctcctcccctgccaggatttcagcctcactgtaggccccagctccacatggctgcctctggctaaagcttcagatgcccatctacatttccaactcagataacagcttacagcttctgtctaaattagggctacagtgaggccttagggcaactggtcataggaaccctaacagcttggtggaaaaatttaatatgcttgacatttggtttcctcatccttggtgaaatcaagagacacaaagacaacttgatgaaaaagagggagaggtgctgagcttaaatgcagaaactaatgagtgctgcataggcttggccaagtcacccaacccctcttaacctcagctgtagaatcggggtgcctcgacagggctgttgtgaggagttagtgaagcaaaagtttccattcaagcaaatttagaaaagttcattactaaagctccctggagtgatcactagcctcacagcctgaaagcttgtgtggttagtgattgttaagtagcagcttcttccccatgcctcaaggcctttgcctaagaatctagatgaaaggaatttaaggtagatgtggttacagtacagaaatgtcactcaatatgacaggcatgttcaggatttgcacttgaggtctgctttctggggaatcgtgatttatttcttccagagccaacttgatagaggccccagctgtggggagactcttctttgcacccacaaaggaccaatatagtctcaggctcaggaaggacagctaagatgtcctggttgactttcttgtcagaataggttgtgtagcattatgaggattgctaatttacttagtaaagaaacatcatctaatttggaaaacgaagcaactgtcttgaaagcgttagagtgacagatcaggtgtatgccaggctaccctgtgctgggcattgggccatgggctcgtgcacccagcttcatcctgtaaggtagttaaaatcaagatgcccattgtatagatgagtgactgaggcttagggagagttaaaaactttgtccaaagtcgttcagctctaggctgctgggacagttaaccagggacatctgattctgaacccgtgggcctgcccgctagatcatagcctgacaatgatcccagtgtcacgtgcaccgtgggacgtatgagattgtgtgcagggctggcttggatcccgttatctaactccagtccctgaatagtgaaatttccataaataaacatggctcacttctactcacttaaaaattttagtcaacagatttatttcaaattcaaattaatcactggttttgttatagaatttacaaggagaagtgtttatatcagagttaaggtagctgacttttattttttcccaggaaagtgggacgtgagacctttagctaaaaaatcaggaatgtctcggataattcaagataagctgactactctatcagagcagtcatttctgaccatggctccagagtgagacaattgaactttaattgagtggaatgggaaaaacaagaatgctgtgagtgagctggtttgtgaatttgtgagtgctgagagccgatgcttccttccatccttctctctgggtaacccagggctgttcccataaatggggacagtgacgccatctcttcttcctgcttagctctgtccctttgtgctcagctctgtccctttgcactcaagctcctcttcacagtgtagtcattttcctttcttctgctttcacccattggtaagttcagattttcatggttttttttgttttgttttgtctttcagccacaactgttaaagctccatttgccacaggtaaatgcagacaagactgttaccctctttcccttgcctcacacagagacactgttttggggttgaaatccaaatggatcaatgagaagggcacgtaccagggataattcttgtccaaaaggacttggtaattggattcagccttcataatcgctaattccccctcccaccctctcagtgctcccctccatgagactcctcccaacttccccaacacctccaagcccccccgaagtctcctctgccctcctgtctgaccagcctgctgggcagggaaaggagccaccactccacagagcctgtgttcctggaggttgggagcctcttctaaacacctggagtctggagatctgaggagctgctccatcctgggtgtcagaaaactgctcctccctctaacctgcttcctccagggtgcagttcttccctcttcctacgagcttctccgtgaggatgcaggctagagggaggagcagtttcttgcgatgcagggtggcttgttgattgattggtggattcacctagtgtttaaccagttgctgggcacaagctaagtgctttagaaactggaacacatttgaccactcaaggaaagtgctcttttcatcctcagtcacactttcggagcctgaggcatcattgaacctcaaggagatggattctcatttgttcagggattgggctactattggggcaggagcactgcctatttgttatttgtccagcctgccctaagaaaagatctgtagggaaatggaaagatagtgtttgtgctgattttctgttcactaatcgggcaatacgattggtgagaaagttttagtaaggggagttaagttcctctatttcccactggtcataaacaaattgtactttaaaataagtgtgggtcacctaataaagtctgaaaccaaaaagcccaccttgtttgtggagccatcagactgggccattaaggttgaattttcttcccaaggatgggaagttgggagaatcagtaataacaggggcccctggaatgacacaagccaatcccagacctagagcatccctgcagtgcctgggccccgtttctcctcttgtagcacccagtgactgtgggggccactacacagatgaatatggcaggatcttcaactacgctgggccgaaaactgaatgcgtctggatcatcgagttgaaccccggggagatagtcacggtggccattccagacctcaagtgagtactggggttgtgagttttctttgatgttgttggtatttctaggaaagatcccatcttgacctcatatggttcaccttccaccctatccatgacagccatttgacacacaatttgacgacattttcacttcctgttgaaagcttttcactggctcgttttctccaaataaagttgattttcttgtcatgcctttctcattcctcacaactggtttctcttctctgctcacttctgatcacttctcctctctggaccctgctatgggctgtgccattacactgagtttcctggacacaccagagtccagcagctccttgcctttgctcacacctgccctctgcctggaatgcatccttcaatccctgccagactcatctgccctctgcaaagggttttcatgttgtatttcatgagttagctcaaggacaacaacctccataacaataaaaccactttcctgactctctgcagaggaggagagatctttttctcacaggggtttacataatacccctggaaagctctacactgaatttatagtgtaatattactcttggctatgactttgtttgtgtctactaggagtctgtctttggattgcaggtatttttcttaaatgaatgaatgaatgaagtgataaagccacagaaggcatttccaatgcagcctaagttactgcattgatatcccagggcagtgttcacagatttcagcatggaaaccacatttccatcaattccagaccaagccaaacacagcccacaatggtggatgagacagatggtggaactgtgtgacccagaggtcctgtcccctccagacagcctatgggctcagaatcccactacgttatgcaggagttctatgggatcaaggacacttcgagacacctgcctcaaatacggggcttaaactgtctacccaacctgaggcccagggattcaaaaaggatgtgtggccatgaagacccagatggggaaacaaggagagaaggagcttgaggagggacctggaatgaaagagtcgtgcacttcctgtgtcataatttccccaaggccagcgggatgggcggctgtggacattttcccatattgtccctttgtccttttcaaagttgattttgaatctgattgtccttggcaccaaggagggacacaggctgggccaagagcaaaactagtataaagtcagccctgtgtgtgtcctggtggggtgtccccttgttgtcttattataccccagagaggctccagcccctccttgtgaactgagacctgctggggcctgaggatgaggggtggagattaggactggaaaagcacagggaggagagggaagtagggaggtctcctaggactgagaacttccatgtgcagcttgtctctcacaggatggagatagagacccctctctcctctgcagtgagtaagcaaggccaagcttatgctagtggggggtcatgcttcacctcttcctgtcccatctgccaggggaaaggaaggcaggaaccagggagtggtgtccacacactcatttctggtgatttttgtcctgacacagaggttgtggtttaaggaaacataccactctgctggctgcattccctgtttggggaacttgaaacacagctgatgttttgactaaaattcctgggttggaatcctagggccatgggctgggctccctggaagacatggaaaccatgagactgggaagccacctgctgccctggtggaggtgaagttttctgggaagatggagggggtgctcgggcccctgcttgcgttattgaagaactgacaaactttccttctttcgttctcatctgtccttgcacttctcatgagcaaagctgttgggatctagtgtggattcattggtggagggaggtggcagcctggctggaggacaaatccaaatgctgatggttgccttttcttctgacccagaggattcgcatgtggcaaagaatacgtggaagtgctggatggacctccagggtctgagtccttggacaggatttgtaaagccttcagtacattctattactcttcttccaacatcatcaccatcaagtactccagagaacccagtcatccacccaccttctttgaaatatattactttgttgacgcttggtcaacacattaataggaagatcgggggaagaggcacctgctgatgctcccctgctctgcctgagcctggttctgcatatgttggacagaggctatacctgggactgcagaaataagattgagtcatagttctcctggatcagcattgggtgagggagagggaatgtgaccctgtgacccttccagaaaaaggtacgggttctgtctcagcatttctgtacacccacatctttagtgttagaagatcatatgtgaaaactttatctttcctgtcttcttgatatagaagtgggtatctctgagaagccatctttctctctattgatcttattatatgccctgtagcattttctagtgtatttctgcaaagtgagtagtatatgaactatatactataaggaatgtataatacacatattctatatgaatatataatcctagaaaatatatataaacaagaaatatatattatatatacataaaatatatataaataagaaacttgtgcctcctggactgagattatacttggtgccctatgagtctctggacacactgaaatacacagcacacactccccatccctaagagacttgtattcagttgaggactgaaaccagcttgcatagagtcaaacagcagcacaagaagcaatggcccctgacacccccatcaggcagtgggtgacagctgcagacactgtgaggtctggggttcacccagctatgctgttcacaccaggcttcccagtgaggtggagctcaggtctggcctccagcatggggaggtctggaaaggccggaataggacatgctgagcaggtgctgtgagcagaggtggagtcacccgaatggggtgaatttaggaacaaagagaacacagagaaaggtgccccctccatctttctgagtgtttcagaaagggcagagctcccagtggggcctgtgttgggcacatttgagtgcatttcaggcacatcgctgaagtggctacttcttccttcaccatgggtgaggtctatctggggacagaagaaggcttggctcctggtcttggttctggatgagtccagttttttttgttgttttgtttttttttccccgggatacttggtcagtccccaggaggcccacagtcctccctgaatgtgaccaggggagaggaggacacagggtcagggaccttccagagctgaccttgtggagtttccctccacccttgaagctggaaggagcatctggaccctgtaaacctcacatgaagcaagcatctctgtctgtcatctaagttgttccagaatgtttgtcttggagcttgaaggatcacctgaaactcacatgtttgaagaaaaaaaaaaacaaatcctagttttggttggcttttctggtttttctaaatgtacagatatggagacacagcaggaggacttgtcctctagctctggtgcacagcacacggtagcctgggactttgtgtgagcaggtcaggtctttaatgttccaagagcatcttggagtagaataatacaatgtgaccagctgaacatgacttctgcttagcgtgctgatgtctttgactggaaaaggtccagggaaaccctggacaaaaagcagagtcaaagaaaaataacaagctacctgtgtccattctgttgctgagtgacgtgcggctccaggtcagactttttacctctgtcaaccatggttttctcatgtgtgaactggagatagaaacatcagaccttttacctctgtcaaccatggttttctcacgtgtgaactggagatagaaacatcagaccttttacctctgtcaaccatggtttcctcacgtgtgaactggagatagaaacatcagaccttttacctctgtcaaccatggtttcctcatgtgtgaactggagatagaaacatcagaccttttacctctgtcaaccatggttttctcacgtgtgaactggagatagaaacatcagaccttttacctctgtcaaccatggtttcctcacgtgtgaactggagatagaaacatcagaccttttacctctgtcaaccatggtttcctcatgtgtgaactggagatagaaacatcagaccttttacctctgtcaaccatggttttctcgtgtgtgaactggagatagaaacatcagaccttttacctctgtcaaccatggttttctcatgtgtgaactggagatagaaacagatgacaaaggaataataatagtgaaaaccattaaatgtttattcaacacaacattctctaggtactaccttaataatgtcatacaggttgtctaatttcatcatgacatgaagtcttttggggtagtattactatccctagtttacttaggatttgagaaggttttgttttgttttgttttctgtatgtttgtttgtttgtttctgagatggagtctcactctctcacccaggctggagtgcagtgtcacgatcttggctcaccaaaaactccgccttccgggttcaagcaattctcctgcctcagccttcctagtagctgggattacaggtgcgctccaccttgcctggctaatttttgtatttttagtacagacagggtttcaccatgttggccagggtggtcttgaactcctgacctcaggtgatccacccgcctcagccccccaaagtgctgggattacaggtgtgagccattgtgtctggcctaggatttgagaaagttagttgaaaataacttctccagaggcacacactgtcatgccagctaggactgtgacgagggccatctgatgcagaggctgggctcctgccaacacgtccatcatgagtgcgagccacagagtcatgtcccagagggaggccctgtgactgcactcagggctcctgcattcaagtccatgacaggtccctgaaatggtgaaaatttcataaattaagatggcttatttctcctaactccaaaaaaaaatcgtattcaataggtttacttcaacattaggttgattattggtctcattacagaatttaaaacaagaaatattcaggtgagcattagattggctgatttttctggtttgcccggaataagaggtttcagggacaggagaatttcagtcctaaacaacaaacgttatcaaaaactaggacgtgaaggttgccttggtcagggctgacttttctgtctgtggctccagagtggggatattgtactttgagtggaatcaaagaaacaagaagaaagcagtgagtgagctggtctgtaaatgctgagagccagtccttctttcctccctgcccctgagggacccagcgttgctcccagggatggggacagcgatgccacctcctctccctgctcagctccatctctttgcactcaagtcccttttcacagtgtggtcattattgattctcctgccttgacctacagctaactcccagcttggcattttgttttttgttttgtgtccttttatggaaaatcaattagccaagaaggatatgaggtaaatgtgggcaatctaatttcatgctttcattcttctcacaaggaggctttgcattttcaggttggaatccaaacagctcacccctaaaaatcatgttctgagacatgttcttggccaaagaaaagtggaataagtaactgactatctgcttaagcacttcacaatccctagatcaccctccctaccaggtgctcaccactatttcctccctgttcctcctcccctctccctctgcaactccaagtcctagggaccttcctctgccctcccttctgggcagcttcctgggcagagaaagtggccacctcctccagagcctgttcccaggagaggagactcctgtaaacccctgaagtctggagagctgaggaacggctccatcctcagtgtcagagatgagagcattgaaggaagagcgaagaactgcagcatggagggtgctggttggagggaggagagtttttctcaggatataggggacttccaaagtgtttatccacctagtgcttaaaaggcagaaattatgggctcaattatgggctaagtgctttacaaataagaacacaattgatcctagatcacccactgtgataggtacaattatcgtgacaatttaaacttatctgagactaatcctccttatctgtgataatggaaaacaacaaggttaaggaaagttctccaccatttttgttctggagaatggcttactagaaagaccaccctcacctgtatgacttagataagactcatatgatcccacattttccttaggcaacctggacaccccaaattctcactcattttctcttcaatgattagctgaactattttccttccttatcaattgaaatgaaatgcttgccaaattgacctaaccaaactttagttaagctggtctcccaccacagcttccccacctttgattcatccctcaagataaacaagcactgcaaagcagaataatcctcccaaagacccttctggaaatgagctgaccaggagacacaaattcctggtcacctgtcacactacctgctcatcccatctcccaccctcagtccttctagcttctgtcatcctccctagaaaccaaattcctttctctctgacctctgagatccttgccaatcctctggttggagcattctcagtactgctataagcattttgaataaagtctttgtattagtccatttctacactgctcataaagacatacatgagactgggtaatttacaaaaaaagaagtttaatggacttacagttccacatggctggggagcagccacaatcatggcagaaggcaaggaggagcaagtcacattgtacatggatggtggcaggcaaaaagagagcttgtgcagggaaactcccatttataagccatcaggtctcatgagactcatttgctatcatgagaacagcatgggaaagacccaccctcatgattcaattacctcccactaggtccctcctacaacacatgggagttatgggagctacaattcaagatgagatttgggtggagacacagccaaaccatatcaatctatttaaagctacgttgggatttggtttattatttgacaatcttcctatcacactttggggacctgggcatcactgagcatgatcgtgcagcctcttctgacctgtctttaaaataagatggattcttgtttgtctgaggtctctcttgaggcaggagaacagcctatttgctatttctctcccctgtactgggaaaagacctgtagggacacacaattgagaaggtgccggctttctgatcaccattctgccaatgtggtgatgcagtatgctatgatgatggtgttaaagttctactatctcccactggtcaaaaacacattagactacatatggaactgggtcccttaaaaacctctgcatggagtaaaacaaaaagcccaccttgtttgtgtgatcatcacactccagttacctatgttgttttcagctgtcacataacattttaaacagacgttggtatctctatgaatatacccagctaaggtttttctgtgaaatgtagagattaaggaatagaaacctcttcaatcatagttcaaatgtgcatgaccatatgtatagtcaactctccataaaaccagtagttctgtcttgctcgtgatagtagttggcctacaaatgatgcttaagttcctgctatgtataaaatgaaactttcgataatatttatggatgagaatcagttaaatgctctttgctttgagtggaaagttgacttcaaatgctatcttgggtgtttgaggtgggatctaacctttttactcctcacttacaggctggtgcccttctccaattgctgttgggttaacttgacatctttgaaggctcctggaaccattttctactgaaaaatatctgtggccttctgggaagacatcctctcctaacgagatgaaagttcagtgttttagtgaactgacttaatggctattactataccataatctagctgggttagtgggttgggccattcttgcattcttataaagaaatacctgagactgggtaatttataagaaaagaggtttaattggctcatggttctgcaggctatacaggacgcatagcagcatctgcttctggggaggcctcaggaggcttccaatcatggcagaaggcaaagagggaacaggcactttacatggcaaagcaggagcaagagagagagagttggggaggaggtgccacacacttaaacaaccacatcttgtgaaaactcactcactattgtaaagacagcaccaaggagatcgtgataaagcattcatgagaaatccacccccatgatccaatcacctcccagcaggctccaccttcaacactggggattacatttcattgtgagatttagagggaatacacatccaaactgtagcagtcagggacccgactgattggctggccaatctgattcagtacttccgttttgttttgtttttttttttttgagatggagtctcactctgttgcccaggctagagtgcagtggcacaatctcagctcactgcaaactttgtctcctggattcaagtgattctcctgcctcagcctcctgagttgctgggattacaggcacccaccaccacatctggctaatttttgtatttttagtggagaaagggtttcatcatgttggccaggctgatcttgaacttctaacctcaggtgatctgcctgcctcggcctcccaaagtgctgggattacaggcatgagtcaccatgcccagcctgattcagtacttcttatcatgctgttccaaaacaggataatgacaccagcaagaatcacaaccaatatttgttcctgtatctatatttctgtataaaccaatatattaatatatctatttatctacctccatttacctgcttcttccaggttgactgaatgctgagaagaatcacttgctattaccttagtgaatgtcctttttgttacaagtaacagaaatacactttaggtagattgagcaaaaaatgaggaaatttactgaaggattctagagtaagtctcagaactgaaggggcggtgtagacagggaagcaatttgggaagctaccctcacctctctatttttgatgccatctcacctgacccttgtgtttcattctcctcccctccagcctggcgacatcctcttctctgtgcacattgtagaggacagctgccttacagctcagctcccaagcgtgtctgtttgtgttagtccattctcacgttgctatgaagaaatacctgagactgggtaacttacaaagaaaagaggtttagttggctcacagtttcacaggctgtacaggaagcatggcgctgggatctgctcagcttccagagagggctcaggaagcttccaatcatggcagaaggcaaagggggagcagacacttcacagggccaaagctggagcaagagagaggcagggggtggggggtgtcacacactttcaaatgaccagatctcaagaggactcgctcactgtcacgaaaacagcaccgagggtatggtgccaaaccattcatgagaaaccctcctccataatccaatcaccgccccccaccaggccccacctccaacgctggggaataatccaatcaccgcccccctccaggccccacctccaacgctggggaataatccaatcaccgcccccctccaggccccacctccaacgctggggaataatccaatcaccgccccccgccaggccccacctccaatgctggggaatcggggggtgcaatttgacgggagattttgtgaggggacgcagattcaagccatatcactgttcatagttcaaaacgacagcaaagattcgcttgcacctctgatttctgtctggaaatttccagggagagactgatttgtgtgaattcggttgaggatccacctctggttggatggctgatcaccagcaggggagactcatagagcacaaatgtgggggtgcccattcaggcagcactgggctcaggtttcagagggaggttggtagggccccaaggagcagtcattccagaaactattacagtgtcacctgtcatgtctgcctggccgacatttttttttccatattgctcttgaatttgagtttttatgttatctttactgaatacttcaggtatccagtaggaaatgagtgcttaaagagaagaaattaaaaagggaaagttacgataaactgaacatgaccagtggaaaagtgaatccagcagaggaatgaggaaactgtctttgcccatcaaatattctgccttttggggacatattgttgaccttggcaatcatctgtgggtgagggaagatcagcaaagaccatttgttctgtcgtgctgacgaagaccagatatattaagcattcagtgacctctgtctctggagaggtgacatttcggccaaaatgtgcagccagctatctgcagaaagagcattcctgcaagcgcagaggatctttagcaagagcaaactaggcttgttctgggtgctcaaagaggttcagtgttgctcaagtgagtgagggtgggggaagaggaagaggtgagagcagagaaaggaccaggggacagaccaggggaggttttgtaggccactgttagaatcttggatcctgtttaagtgcaagaggaagcatggaagggttttacattcatttcctgctgtaacagagcaccaccagctggatggtttagaacaacagaaacttctctcacagttccagaggctagaagtccaacagcaagctgtcaacagggccacacttcctctgacggagctagaaaagaatgtgtctcaggctgttctcccaccttctggtagcctctggtgttccttgacttgtagatggccatctcatccccatgtttcttcacatccttttcccccgcaagtgtctgtgcccaaattcccccttgttataagcacaccagttatattggattaggttccatcctcccaactttgttttaatttaactacctctgtagaaaccctatttccaaataaggtcacattctgaggtactgggattagaacttcaacatatcttttgcagggagggagacacaatttaacacatagcagttttaaacaaggaagtaacataatgtgtttaaaaatatcactctggctgctaggtggattgtgagttataagagggtccttttgaagagcctcctgcattagtccaggtgaaagatggtggtagtttggatggagagaaatggctgtctggctgtagccttggcttgagcttgcggtacaggcaggaagtgaggcagcttgaagccaaagataataatagagattcagatattataaactcttagctaacatgaagtaactatgaagtactcactaagcctcatgctcaattagctgttcttattctttcccatgaattatctcatttaatcctccaactacctatgatgtagacactataattgcctctactcacagatggggaacatgaagctgagcactgcctagaaacctggctgagatcccacagctcacctgatattgaagcagctattcccacccatgtctgctgctgccacgtccaggctcttggtgacgtctcagcactctatttcagaacacgctgaaggcttgtttgctgagactggagatttacggcacagagggagataacgttggttaggtggggctcctattttaattatttatgagtatttgtctcattcttcaactatttataagcttgttgatggtagagtccaggctctctctctctatatatatatccatatagaggtagacatgggtgtgtatatacccatatataagtatatatatagtctggactctacccttaacaagggtgtatatatattcccacacccatatatagatatatagatattcagctatctatctatatcaatgctaatattgagctattatcatgttctgggcctcgttctgaatcaggttttcttaacctcagcgatattggcattttggtcaggtcgttctttgtcgcagggctgtcctgtgcattgcaggatgtttagtagcatctctaccctccgctagatgccagttgtgacaaccaaaaatatctccagacattaacaaatacctcctgagggacaaaattccccctagttgagaattactgtctaatacctcacatttaacatatccaggagccccattaggcagctactcttctgattccatttgtgggagaggaactcgaagctcagagatgttgagatagatgtcctagatgatacagccagggttcatataacccctccaacatctgagctcatggcagatgttgacaggacacctgctggatggattgcaggtagctttgacattgaggcagagatgtttatgcatggctaagcattataggaaaccatgaaaggtttttgaccagcgtagtgatctgagaaaagcagaagtttacagaaaactcaaagactccctcccatcttcaaagataacttcatatttgggatctttgggcctggggtcagaagggattagagggtaacctcatccaggaagggaaatgttccaaagatcaccgatgcttttctgcttcctcctttcctcttctcttatgaaattttctttctaccaaattacataagatcctctaggcatcctgcttcttgtcactccccagacattttggtaataagagcataaggattaattacaaccccctgtgaatgtttaatgcaattactgttcactggctcccagtaatttccaaaacataaatgggcagtgaacagacaaaatctccatttgccaacaaagctacaacttggcatttaaattaaataaaaaccacctaccatttttttgacttttatttgaaggtcgggggtagcatcactgcatgatcaaacaggaatccaacgcatccattcaattattactggttgacaaaattgtatgagacataatgaatgccaattgattccactatagtcacattaaaactgacatagcattaaaaaaagaaacacttactaaaaatccaggaaagagacaaaagaggaaaaataggcactcaacttcttcatgatctcctttccaataaaatatcttgtgtgtagtatgtagagtgttcctcataaattcatcagaagaaatcattcttcttcctttttgatgcagctctggatttggggaactcaagaggttctcctttgcttaatctatttctccttacagtccaaggcatctaatccccttgtctatgggcagcccttagtgctcccttttatctctcacattgtcaaggttttggtgacagcattacagatagacatgaccactgtgccccaccctgactcactcatacccttttaatttagatgttcccatcccccagagcagaaggcacttcattcatattaactttattttctaactactttgattactattctatcaactccaaagtggtcaagtttaagtttaaagccttctagtctcttaacccagtgcagtgcattctcagtgtaaagtggtcatgtgcagggcaaacagtagctcattccaatgccactggggctgctctccaagagccaggtgagaaacccatcctgaccagagcaaggtggacttggggccaattcttctacaaagggaaccatctctgaaaatggtataatatggtaacaaatggcggtcttgttctgtgttcatggtcagctgactagagcaaatagctgggtgactgagataatgtatggctaactcaatattcaagctgcctgcatttctaagcacctatatttttcattcacttattcattcattcattcagtctgtaaccccaaatctagcttgagctcactggcttcttaggctctggaggaggcaggctccacttctcaatttccctctggttgaagttcaaagccttctttgggatttctgcaaactgccagcaggctgtaggacaccatttccacacatgctgtctctcttctgaactctctgcctgatatgaaactcagccctgtcgtcaattcacaaacgccagtccccgaagctcattcatacaacgtactcatgaatttaatgggcttttctgatggtgagggtctcagggagtaatctctggagctctgcatagcaaacaacttacaacaacatgttaggtacttctcgtctcaaaagcccacagcctccttgatacgtggggttttacatggctgtttatccccatgcagtggggtacatctcactagtggctgtctcttcttcctcccttcttccttttctttttaagagaaaaacaaaattcctctcatttcctcatgcaaagaggctaaccattctttcattgttaggaggcttctcaagtatccccttccagccccaaataaactgtaaggtatttttccccaagaaaaacaatttaccttaagataattttgggtgccagctcttaaggaatataaatgctgcctcattatgattttaaaatcatttattgaagtacatacagtatgttaggtactagggatactagaatgattaaattgggcttatgcactggctacagaaatggcttgtcatccagtgggttatacatgagacagatggcatgtggaaggaggaaggcagtcagtgagagggaagaagcagagtcaagttgctatgggatccctgaagagggcaatggatttggtttagggatgaattatagaacgagtgcagtgtctcttcaggaaatggaggtaaatgtctggtcatatccaaattgttagccagatgttttacctcaggattctccagcttgtttttgtttgtttgtttgtttgtttttgtttttgttttgagatggagtcctgctctgtcacccaggctggagtgcagtgacgtaatctcagttcactgcaacctctgcctccttggttcaagctattctcctgccttagcctcccgagtaactgggataacaggcatgcaccaccatgcccggctaatttttttttttttcttttgtagagatggggtttcaccatgttggccgggctagtcttcaactcctgacctcaagtgatccacctgcctaagcaccccaaagttctgggattacaggggtaagccaccacactcagccttctttagcttgtttgaccccaatttagtcacccacttctgacaccatcatcataggtgagccctgtctgatttcacagggccctcgtgagtaaggggtgagaccacattaaaaactatatagcctctaggaatggagcaaatgatggcgtctgtttacaaaagcaattctaaataaaaccaataccaatttataagtaaaaggaagttcaaggaagttctgacctgttcaataatgactactttcagcttatatgaaaatctactatcagattcttttcctccaaaatatctatctttctgttttttgagacagggtctcgctctgttgcccagcctggagggcagtggcacactattggctcactgcaagcttcacctccaggattcaagtgattctcttgtctcagcctcccaagtagctgggattacaggcatgtcaccacacccggataattttcgtatttttagtagcgatgggttttcaccatgttgaccaggctggtctcaaactccaggcctcaagtgatccacccgcctcagcctcccaaagtgctgagattacaggtgtgaggcaccatgcccagcctatttatattttgttttcgtctgctggataacccaataataaacttttggtaaaaatttaattgatcacttgttctccaagccttctttgttaatcagcgttctcagggaacagggattgttagaaatttcagattaagcaactgattaccagagctctcttttgtgtccagtgctatgtcaaagactttctaaattcgtcatcaccattagcataatctactgagcataagagtctcatagggccttgtggtcacttatctctttatcaaatattatcatctggatgtatttatgaaactcaggtaagtggtgcttaagataaataagtacttaatccagggaattttctaaaaccttcaaaaattcaaatccgaatctacatttattttcatatagacttcctgaaagatggcatacacatacatggtaaactgtgggcatattctggatggctccaggtaattaatgtttacggcaattaatatcacacttatcaagaagtttggtattgataacagccagtaaggcaatatcttggcattctgttgacctcttctctttccaaagggttgaatttgttctcataggtgatttccgcatctcagagaatttgggtcagtgaaaatatctctatgccagcaccacctggccttcttgtaacacaatacttaggttgtaactgtccacactaagcaggtggtgagcagtcggcaagtattgagtcaactcccaactccactgaacgcagctaattaaatgaattatagaactgagccttgctgaccatttagttcaatgcactcgtttaactgatgggtaagttgagtcacagagtgcctggtggcttacctatgcctcacagctggttgggaacagagctgtagggagagcactgatctccttatttctcctttagagaactttataccacatcatattgctgatcctaagcaatttttagggtccagataaatcgttttcagttttttcaaactggcttgagttttcaggtgatgctttggtattcactattttatacatatttaggaggttatatcaacattggaaataatattttcctcccccccccaccaactccaatttctaactttgcctcagctgaaaagttaacccatttctttgattcatgctgattctttagtcagaatccactgatatttgggaacaatgctacactgcccagaatcactgtcttggccacagcagctgctgatagaatacttcaaaatgctcttaacttggagctgtggctaatggagttgtcctgaaaaatcagaaagggtgaagcctcctgctaatgacattccctctgcttggaggggagctgtggctctgaaagggctgattgtggaaaatccactggcaagagggagctagaaaggaacctgaccttgcctcaggcagttgtaggtccctgtagacaagttcactgtcttcccaactctgtgaggagttgctgaggacacagtgtgattaacggaggaattcctctatgcttcagatgtagacagtgagtaagtgcatcatgcatctcaaatggtgaaggtgctggctggactcagggtgagattgttagggaaacagggtgacaccattttaaaatcaactccatctttaaactagcaaggcacattccttgctggtcatgacccatggtcatgaaatgtttctggctgaggaaactcctactacaatgaaatgtccagatgtcccgatatcacataataatatatgcttttaagatgattctagacatgctttgatgtacctacacactaaaataccaaaaataactttctttaaatcaacaaagtaatacattttgtcacgctgttagcccaccctcacattgtcatagcttagcttttacatagataagacccttgtataagaaaaacttaaagatgatgcattcctctgcttgctttctgaggacgccccactctgtaactgagtagctttcaataagctatctcttctctgtgctttctgcaactcaccttgaatttcttcctacacgagattcaagaccctctcttggtgtctggatcaggaccccctttttcggcaacaagagttctgtcttttggggaaaaaaaatcctcatttcttctagacgtctaaaaatgcttcacttcatatttacacctggaactcgagtctgacccataagatacttaggagggtgagggcccacgtctctgtgcagcttagggtctggttgtcccccaactcctattgcccactgattaatgggcactccagtttttcactgaatagctcagcatcaagaaaatggcctatgagcaagcctacaatttggaacagttccctgaggtcatggacaattgccagctgtcttctgtcttgattattaggaaaggagggaaggagattggactgacatgtccaggttctatacaggctatgtgtgctttgaatttgatgaagtctgtgctagccatgaaagtctgacagaatggctatgagttggtggctggttgtgagtgtggctcagagcaggtgtgagggtcattggtgaaaacttaagacttgtcatgagaactgcacaataaacaaggtcccttggcagtgtctatgtgtgtgtgtgtccgtttagaggaggcagtgtacagggaagaggctagaaaaatcctggcttcaaattctttcctcccatgagaacccattttcatattttgaagcaaacctggaagggtcagcccttctctgagccatcctccttgttgatggccaagcatctgtaagaaacaagagctccatcttggtaaagtctgactaccctagttgttgtctactatatctgccacattggggcacaggcaaagccttgatagttgcagcaatagtgacctcagagacatttggtacctgctcctgacatgcccaaaggaattgtgcatgctacagccatgcctgccctgtggctgcacttgacttgatggggagggtgtggactgcctggctgcattgaagatgagggtagcaaagaaataaggctggaaagggctggctctgccttccaaggcagaagctgtatgcctgggcaggaagtggagagcatgaaatagacctccaacttttagatgtgggcatagcgttcttttcttcagttgtactacaggctgctcccagttccagagactctgctattgactgtctaatggttccaaatattcccacttctttgtcttcatgtcttttgcagtgtggcctctcatcaagggataaagttcatttacccacttttgcatctaggctggcctcaggtcttgctttggacaacagaaatgtggcaaaagtgacagtgtgccagttatgagccttgatcttaataggccttgcaaacttccacttaccctcttgggccccataatgaccctgtgaacaagcctgggctagcctacgtgagggaggaaaaatgtggcccagtcacccccatggacccagttgatagctgtcagttcccagaaggagagccaactaatttacctgcagttaactatagacacatgaggaacccaggtgagatcaggagaggcacccagctgagcccagcttaaattgctaacccacaaaattacaagcaaaattaatgattgttgttttaagccactaaatttgggggtgatttgtttcatagaaatagataacagacacacaccccaatgggagtaggttaggagaaggctgggctgttgctgagggtgggagcgatagccaagagttgcctgaggtcaggaagcctcgtcaggtaggtcttaccttgaggccctcctggagattgggcaggggaagccaaaatcccaatataagatggggtggcaaggagcctggggcacagctgacgggaataataaggactagtacacctggttaccctgggcaacaaataaaactttaataatgataaggagttgctttacgcatgcgctctttccagatactctcttcttccaggctgtaggtcttgaccagatcactgaagtggtctctccgtgatataaaatcctgattcattagcattaagtcaccagggaattctgatatgcagaaaagatttcggtttgttaggcctgcgatggaccgttccggtttctttgtggggaggaatgatttgcgatcatttccatggtatgttaaacatttttttggttcttttgacttgaaaactacattcatttttatttctcgtctttttgtgttttttccctctgcctcctctttcttatcttggttggcatcatcacaattatgggtgtcatagttgtcttcctttcgtctggccttattttttgccattggacccaggcccaccccagacagaaatgaggagcgtgtaaacctttcaatgtagggtaaaggctgatgatttcccagagcccgagcaagcctcatcctctctatgtgcttactgacgttcacctgctctcgttgtggcattttaaatgcctccaggggcgcaatcacctttgctgtccatattttttctaggggtacacaaatagcacaaggagaggaatgtttctttttatactccattgcttgtttgtagtccggagacagcaactgtagttccttgagcattctgcattcttcctcttgcttgtaagccaaaagccttcttgctgctatggtgtgaatgccacctagacgctgacaatggagaaaggactattaaaatctcaagagcacaggggcaggcggcacccacagaaacttgctagtggctggttctccctccattgtggaaagtgtttgagcctctctgtagtggaaaacaggtgaacctttggcgtcagataaccttgggttcaaatcctgactctcctctgacctacaatgaattcagaataattttgttgactttacagggtcatggtgaagcctcgacaagacaacatatacgaaagtgaccagtgcaaggtaggagctgaagaaataactgttccatcatttgttatttactcatatttgtaagtgggacgtgtcaataagagtattttgctgtgggccgggcgcggtggctcacgcctgtaatcccagcactttgggaggccgaggcgggtggatcatgaggtcagaagatcgagaccatcctggctaacaaggtgaaaccccgtctctactaaaaaaaaaaaaatacaaaaaattagccgggcgcggtggcgggcgcctgtagtcccagctactcgggaggctgaggcaggagaatggcgtgaacccgggaagcggagcttgcagtgagccgagattgcgccactgcagtccgcagtccggcctgggcgacagagcgagactccgtaaaaaaaaaaaaaaaaaaaaaaaaaaaaaaaagagtattttgctgtgcaagtgtggaagccactagcagattcagccaatgtgagtctactgtttgagaggcagctctgttactggtggcttctgaacctttggctccctctagctaaactggctggcttcagtggggcctctccgtgtgaaaactgcgggacacttactaggatctctttttccaagggggagtatttcccaagggcaatccgtgggtctgatctgtagaatttgctccatatcctgcaagaagagaagcaggaatatcagaattctggaaaggctcttcctacttttccctcctggagtgggaaggctcataaagggttattctacactagccaggctgaggccgccatgagcaggggtttctgtagccactgggtaggcttctccacttggcctctttctgacatggacagactaaagtgcaagtcagactcaccgcaacggtgaagcagaactcagatcctcttggcaacacgttggggcttgatcctgaaaggaagagttggtattaaatattctaactggcttttcattcttcctttcttgcaccattgtgtcactagccctctgtttttcaatcctctgacagtcattcttccattctctgatcatactccggcaataagctaggacgggaggtgttcacacctggagtttgtttctaagacaatgtgatgagggcccgagggtaagtcacaaacatttcttgcatcataactggcttacctgggggctattgtgaggtctgagtttaagacattgaatgatcccctggggtgaaatggacacacattaccaggctcctggtgtgttggagtcgaagagaatggatagagaatgtggctgggaggcaatctgaccatgtcactgccactgaaaaacccacaagactgctcagttttcacaagaggaagactcagtcaactaaaatctctctcactggctttcactagtctcttcagccttagctcctcatgcttgatcaacgccacactatccatcattctcaaaacaagcgtctgagctattgttcacagtcccctcatgtgttgaataactctcttatccttggcaacttgcttgtctctcaggacccagcttaattgttgcttcctctgaatgtctccttgcagaataaatcaccctttgtccatgttctcatagcactctctgcctcatgctatggtgctttctcacataatgacttgcttggtaagtcagatttcttggtaagtctgtctctccctctattgaaagaaggtaccaacagcatcttattcttctttggtgtgtggttgtcagcatagggcatggtgtagggcagatgctcagtttgctaactcagtaaacaattgtcctgagaccctgttcaaaggtgtggttaagaatggcactggtgggaattgatattgccaaaactctatggaaggtaatttggcaatatgtatcaaaattataaatgtatttgccctttcacccagttatgtgtacaaaataaattactcccaaggttggtcagtgtgactttgtttgaggtgacaaacctcatggcaaattcaaatacccattaaccagtaattggtcagagaattctagttagccatacaatggagtataggactataggagtcaaaaagatcaaggaaggaagacctttacttatatggaaataactccaagaaacataatcaaatgcaaaaagcaagatgaaaacatatataaattctagaatactcttttgtgttggggagggaaaaaataagcatgtatatatttgtatttgcataaagaaaccagaataatacacaaaaaactagtaagacagtaggtattcagcagatgaagaagtggtgggaatgagccatttcatggtatacatgaagatattgtcttgaatgtagaaccacatgaatgtattaggtatttgaaaacataaatttaaaaagtaaggaagcagctcatggaaaaagattgccatgttatcgctgacaaacacaggtcctaaaactcctttcccttaccagaaatccatggtggatattaagagttgggccagtgttcagacccatgtaggcactaaaatacagaggtacttttccagttgacacaggcaaattcagttacctggaccatctgtgagcctggacatcagcagagggcctctgagcagtgaagaaaatgccttttgcagtgcattcattgactttcccatgtgtcccacactcaactgctaattaagtgaccttgagcaagccatacaacacctggcacatcatatgcattcaacaaatatttgtggaacaatcgatgggattgttggactccaattgatggaatatcgtgtacccattaaaaattgagtctaaaaaattttctgtaatatgacataatgggatgcaaaaataggcagaatataaaacttatatagggtataatttggatgctgtaaaaatacaaatatgcaagaggaaaaaaagaccaaaaggaaatacacagtgatactaaggttacttcaggctatgggcttgtggggatattccagggctgatggtgcatcagcagcctggtcaactccagatatttagatggaaaagttattgccctgccacagcaggtacagacaggtaaaggtgtcattgtcagggtccagctcctccagacttcagagaaaacgagggtgagaaaggatacacctgggcggggtgtcaccacagccatgaggctctatactgtgggaaagtctgcttttctcacacctggttccacaaacttctgcttttagctcacttccttctctccttctctttcattgtcattcccaggctttttgcttttgttttcttttacagatatttcccctcaattgtttttacattaggttttattcttgacttttacctggttttgtcctgacttgtattcatagacatcaatctcatctcctggtccattttcaaattctcttgaactgcctttcacatctgtctttcatcttttacttcatgttttctttatttctttgtcttgtagactttatcttttatacatatttcatttattcttaatatttataattaatatttgtacacacacacatacacacatatatataaatatatatacacatatacatatatactaatcatatgagagagagatttattatctattatttattttagggaattagcttacatgattacagaggctagcaagtgcaaaatctgcagggtaggctggcaggctagaggcccaggaagaagtcagtgtttcagttcaagtccaaaggccatctgatggcagaattgcttcttgctcaggaaaagtcagtcttttgttctattcaggcctttgtgaggctcatccacacaatgcaaggcaatttgctttgctcaaactccaccgatttaaatgttaatctcatcccaaaacactgtcccagaaacattcagaataatacatcataccaaatacctgggccccatggcctaatcgagttggcatataaaattaaccatgacacctacttatagttcataggtttttaataatttgtttaaatgtattatagttttaaaatatcaggcttttcgtttctatacataattttacccattattgaactttatattaacagattcacatagtatgtgttcctttgtgtctgctttgtgccccttcttatgaaaaaaaagttacaattctcttactgatatgcttgtacattcctttttattgttgtttagcatgatgatgctatgatttatttatcagtcatctgttgcttacagttgggtggtttccgatttggggagcattcttctacatgtctccttgggattacgtgcatgcttttctctaccaattcacattcccaccagtagtgtatgagaatccctgtggatactcatcttgccgatacaggtagattggttatggtatcttggatggttttcatttacatttttctggttagaaataaaattgaacactttttctattggccattgagattattctttgtgaaatgtctattcaagtcttttgctcactattttctagtttttgttttcttattgatatgttagatttctttatatgttcttgatataggccctttgtcagttaaatgtgttgcatatacccactcctactctgcaattcacctttttactgtctttaaggtgtcttttgatgaatggaagtccttatttttatactagctgcactctaatttatcagcctttccctttatggttagtgctttcatgtcttgtttaaaaaatcatctcctacctcatgatactctcacatattatacacacacatatacacatacacatacacacacatagatacacatacacacatgcaaatacatacacacagacacatacacacagagagatacacacacacatacacaaatgcatacatacacatacacatacatatacacacatatacacacacacacaaacacacacacagacacatatacacacacatatacacatacatacacatacacacagagacacataaacacacacacatacacatacacacacccagagacacatacacacattcacacagtgatattctcctatgtcactctctaaaacctttgatatttttttcttttgaagtttgttaacgtcttatcctcattttattaactttatttttccaccttattttcttttaagcatattttgcaacttatttttataatggctatcaaaaagtgtgacggtgtgtgaataagtcatacacaaaaccctggggactcctcaccctctggcagctgcccctgcagccatccctgggctctggctccctctggtggatcttgcagaggctggctctccaaagacccatcggccatctccctctctccaaggctgagtctatgcaggtagccgccttgaagcgtggaaatggtgctccttcttaacattgcatgagatccacaccttgtataaggagctgtgctctttaaaatcgtagtctcctctacaaaaccaccagctcagggcacaccacattctgggaagtgtcctctaggtcagtgcttctcaaacattaatgtgcgtgtgaatctcctggaggtcttgtggaaatgcggagtctgattctgcaggtctgggccaggacctgcacctctaacaagttcccaagagaagcaaagttgtgactctctgtgtaggtcactcaataagaggtgatcctcaaagcatgtccctgggccagcggtggcagcagcagcatcacccaagacatgcagactgtcaggccccatacagaactactgagtcacaatctgcatctcagccagttcccgggtgaatggcaggcgtggtaaagtgtgaaaggaatctggcccgggcaatgttctcatctgctgcctgtgaaggatcagacaatggacagcctgtgcagagcacctgtggacagaattctatgggttccacagcaaagtgcctcagacgtcccggtttccaggctgagccttcacccttcttggcatgaaagggtcctttgatgcctagtttcctcagtctccttcctttcggcacaagggttgaggagacctggctcagtcagccttgttccaaaccattacctaggaatggggtcagctgtgcctctttgaggagcctcttttgagaggttcacccagaagagtgagacccaggagcaggagaggccaattctcatttagccctctgggagtggtttcagccacaatgaggtgtcataagcttgatctttgcttcttctgtctctcttaggggagcagattattaactggggaagtcaaaaccctaaaagggtgattttcatcaaacttcagattctagtcaacaatgctgacattcctgcccacatgtgtcttttattttcccccagaatttctgctgggttctttgcaggccctaccaacaagcactttccctctgagatggagtctgtcccagtgggggccaagcagatgaaaaacagcatcagggctcatgaggagagatcttctctagcctcccttggccaattaaatggagatcattgtccaacaccatattatctttctgaaaggagaccttgggaatccccctgtggttgcctctgctgctattaaaatccactgaagggcatgaggaattcttttttgaagtacaggagggcttgggttcttgaatttggagaggtaatatggtaggcgttcatcttcacggtaaggccaatagatgcacattttaagagccaataggctcggccaggcacggtggctcatgcctgtaatcccagcattttggtaggccgaggcaggtggatcacgagaacaggagatcgagaccatcttgaccaacatgttgaaaccccgtctctactaaaatacaaaaaattagtcaggcgtggtggcaggcacctgtagtcccagctactcgggaggttgaggtaagggagtcgcttgaaccccggaggtggaggttgcagtgagccgagatcatgccactacactccagcctggcaacagagcaagactatgtctcaaagaaaaaaaaaaaaagctccaaaaaatatgtctctagatgcctgaattttctctttagaaatgtggtcagttgagggcacagaataaaaccctgaggtattagttgacttttctgatgggttttgatgccatgatcctaataaagagatactagagtatgatggtcaacagcatgggtatgaagtcactggcgtgctagtaaatgttaacaaccggctctctgaatgaagttgacaaatgtagcaaataaaaatacagggcatctgttaaatttgaatttcagatatgtctcatttacttatacaaagaatttttcatttttattgaaaattcaaatttaattgggtatcctgttattatcaggcaaccctatttctggggggggatgtgagcagaggggtgcctctcgctacttgccagcttactatctctttttctttttaacattaatgcctatgtcattcttttccttccaacttttatttcagattcagggggtatgtgtgggtttgttatacggataaattatgtgtcacaggggtttggtgtacagattattttattgcccaggtaataagcatagtatccaatcagtagtgttttaatcctcactgtcctcccagtaggccctggtgtctattgttcctttctttgtgtctgtttgtacccaatgcttagctcccacttacaggtgaaaacatgtgatatttggttttctgttcctgcattaattcacataggagaatgggtttattcttttaggttgactccatgtctttgctattgtgaataatgctgtgacggacatatgtaagcatgtgtttttatcatagaatgacatagctatatactgaatcacgggattgtcaggtcaaatggtaattttgttttcagttctttgaggaatctccagactgctttccacaaaggctgaactagcttacattcccaccagcagtgtacacagcttactgtctctagggagtcatgtaaactgggaagcctctgtttcatatgtacaactaggatagtaatatgacctgtcttagagggtagttgggaagatgaagtgagaagttacattcatggaaatgctcaataaagagcttgagggtcctggattgtggcaaatactagtctctgaatattcattgcatcactccaatcgtcacaaacaaacattttggtccaagaaagggtggagtccaccattgtctctaccctctccaaggaactcttgttgagttcctgctctcaagtggaatttattcttgacaatcctgttgtgtcttctgacaaactggacgaggtttgtcttagcgtagccttgtttctggcaaggcagacaatatctgcttagtctcttcgacaactttcatctatctaaaacattctaaccccaagggggcattcgtcctccctggggagctggtgggctggacttgtagtaggtttctggagccagtgatgagtctaataggttatttttattttagggacagattatttatatctaaggacaaatatttctaacattttaaatttctttttgtagtttcattgaggtataattgatacaaaataaattacacatatttagatatagaatctgatgggctttatgtatataaacaaccatcctcacaataagataatgaatatatccatcatcctccaaagctttttcatgccctttgtaatcgctctctcccctcacctctgtcccacaaccactgatctgttttttgtcactatagattactttccattttctataatttttaataaatggaatcacacagtgtgtactccttctaaaaaataaactttttgatttggaatatttttagattaatcgacaaagtaccccacgctatatatgtggaggctgtgcatcgtctcatccctctgatgtaggctgtgcctcctctgatccttcacaggcagcagctgagggcgttgcccaggccagcttcctttcactctgtaccacgcctgctattcactcgggaacttgttgagatgcagattgtgactcagtagttctgggtggggcctgagagtctgcatatcttgggtgatgctgctgctgccgccactggtccaaagacatgatttgaggagcacctcttattgagtgacccacacagagagtcgcaactttgtttctcttgggccagcagcgttgggctcatctgggaatttgtttgaggtgcaggtcctagcccagacctgcagaatcagactctgcatttccacaggatctccaggagatttatatgcactttagcgtttgagaagcactgacctagaagacactttccggaatgtggtgtgccctgagccgatggtgtcgtagagagactatgattttaaacagcactgctcctcatgtcttcacaacttccctgaacaatcaggccggagatcctcttaagtctccataggccaatgcacaaatgatttagccgttccaagacgccattagattatggaggaagggtgttaactgtggtttctcttatctttaaataacaacttcctgtattagcctggcatgaagatggcgccaggcaaaccaaactgtgattctgctagtcccaccaaacaagacagggcaggggacaagggggatgggagcctctccatatttggaatgttcctttctgcttgcaagcaggcaccagtgtaccagcttggtaactcatttaaatatacatatatttaaaacaatagtcataaaggttcttggaatatggattgaaaaacaactacacctgtaaatatagattatggctttaggatagcctaatcataagcaactagtaggatgattaagcatgaaaaaaaaaataaaccttctttcgatgtaaaagccatcaaaaagttaccaagacattcctcttcttaaggaagtttgtagttatcatttattttttacaggattattgaagaatatatacttatccatactataacatgagtggcaattattaggggaaaatattcttcaacttttttttttaaataaggaagcagtaaaggatgtttgctcatcttatgccaagaaatatacataggaggtgttctataaactttcataatttatacaaatgtttttggtttgtaaaatttagcaaatttcttctcagatattgaaaaggtcatttacagttttaagaatcttggttttaggccagttaaagaaatacatgtttttttcttttaagtacatgggaaaaataaacagtgactttacctgattctgtcagattttagctagacttaaagtattttggtacaagtttttgtttaggttctcatgtgcagttactgcaccttaaattacagacattttgccattgacaaagattgagaaggctcgtcattctacaatttcagttgctccgattccgcaaatactttagaaagagtttctacaactccaagtagactttcaaatgcttgatttttcaataaaacttaaaacataatattggaaagtgatatggaacctgtttaccaaatccagatggagcacgggaagctagaagccagtgagagggcaacccaggtaacttgcccttgggatagagaccttgttctctattctgccaagacttgacacacagtgcttcagaataaagctttcttctaattcttaagacctatacctatttctctctaatgtctaattaagatatagtattccagaaagtggaaataaaagatgatgtgttttacagaccaaacccacaggcacaagctagcttaaagaaaagtgaggagaaggggaggtgattaactttaagcaaaaataagaaaagcaaatcattttagttctcttaactaggtggtgtgcactccagcagtagtaaccccatgttgctaatatgatcatgtgacctagacactcaacaagtcagctcagaggcctgggttgtaccgagagcaattcccacaaatgagacacggtggtggaagaaggaagagaaagagtccaggctttttcattttgagaagaaaatgatagcctcccagtaaagggagtggtatgggttcaagtcccagctctgttgttccccatctatgggaatttacacaagacaaagagagaggtggctaagacacagcagggaagaactgattggggaaactgtattagaatcaaactacaaggacagagactgctcaagagaaaaaaaaattccttctctccccatcctgcaagaaaggattatgaataaaaagggcgattttgcatttatagcatttgtgcctccaggaggtccaatctatgaatctgtaaaagaagatgtcagatgttggagaaaattggagaggagaatccacagaagctgccagtacctgggtaacctgtgtgaaggacaggtcacttcctgatcacagctgagcctgcgttggttggagccaggactgtccctccccatagaatagccctgccaaggcaggggttcctacgcacccctcctactcattctctctcgggagatctggtttgcagacttttgcagacaaagaagccaatgtactgaaggaaagtttcagtgattttcccaaggtcatactacttaaaattagaaaaaacaaaacaaaacaaaaaaaaacccaccaatcccaaagtaatctgaggtcagattccccaggaaatggtgtggtgactgaacgatgccaatcagtctgataagaagattgagatggaatatgaggctggtgaaattcacaaagaaaaatattgagcatcaagggtgtagcagttcccactgttaccacctttaaatgacatgtttggtctgaaacaaggaatgccatcaaaattaataataacaccaactaatattctttgaacatttactgtaagcaggcaccagtctatcagctgtacctgccataacccatttaaatatacacatatttaaacaatagtaataaaggttcttggaaggcaactgcttccaaaacaaacctgattaacagcttcagtaatctgctttgataagcagggtgaggttagaaatactggagcctggcacagggcacagcgtgggccactgactggatttaatgctgtgttcatgcttgatgttaggttctggatcagggaaggggctggggctccaagtggttatagaggacactcagggagtcattgcccaccagttagaaagatttacaatctttctatagtggtacatccatagcaatctgtactggtcaaatagcagccctactgacaggtgtcaatcctgactcacccttcctttttcaggaaactttgccaagtgtcaccataatcttgcagcaaagcctcctatatgtttaacaaaatacaaagtgttcccccctgattatctctccctgcctggaaatgtgtggtgtgtcctctgtctggaagtaaccctgcttgctttcccagaatttgccaattcctgtgtgagaccctggccttttctgccaattgaggtggagtttaagagttgttattaaggacatgaagttttctctgtatcatgagaggatgatgcaaataactttgaactttccctgtacacccctcactcctatctgggctcaccctggggaggatttgtgttttttcaagaaagctgaacctaactgagcatgcataaaaagatcatatgaattaccacgtgcaaacatgaaaccatcttatcttaacaccttgttggcaaagaatctcctacaggtactggaacttttgtgggtaagtggaaggagtcaccgtatatcttatttgcaatctaacatcaagaagagtacattgtcatgatcttccaactgtgtgccttgaaacagagtcctgggaagagccctaatgtttagtgttaagaatctccaaatggctggctgggctcttgcttacttcaggcagttctttgcctctcttttgttcaggagtccattgattctttaaacggggaatccattgttaacatttttaatagtagtgttcaaaacaaaaagcgatctctggagcctgacagcagctactgagttgaccatctgtcctgtgcttgggcttctcaccctttcagtcccaggcaaggttactggttcttgtagctacagccacgttagccagtatcacccaccgtggtctccctgaggcagcctccaccagcactctcaccttagccctgccacctctgtcagttgtatcacctcagcagcagccactctcatcttttctgtccttgctgtcactgcatcccaactgtagtcactgtggttgggcaattgaggtgttaggcattcttgcaacaaggaagtggaaacatttgaccaaggaatccaactagctgtggggcataaaggataaggagaatggagggggcagtgttgagaatagagacatcaaagtactgtgcgtcgatattgaagtagcttagtgcgctgatgatcctgcagaggccaaacacacctcaggagagggacatggggaggccacggtgggattagggatgaagagacaggacttggcaatgagggagcagagtgtgacttggagctctccattttgatggctttcactttgtgactgaggacttttgcaactacacctgctgactttgtcaataaagataaagatttcagcctgcctgtggtgactgagcattcagttaatgctatatgttatgaatggaattgtctcccccaaaattcatatgttgaaatcataaccctcaggatgtgatcttatttagaaatagtatccttacagaggtaatcaagttcaaaggtctttggggtgggtattaattcaatgtgactagtgtgcttataaaaatggagaaatttggaggcaggcatgcacagagggagaatgccaagtaaggatgaaggcagagatgcttctacatgtcaaggaacaccagaaaaccaccagaatctaggggagaggcatggaacagattctttctcaccgtcctcagaagaaatcaaccttgccacaactttttcagacttctagcctgcagaactgtgaaacaatacatttctgttgtttaagcctcacactttatagtactttgttacagcagccctagcaaactaatacatcatcacaatctttccagcagaatctgcccaaagaaaattaacattctataaggaaattattaatcttgaaaaaaatgtatgctggtctccatcaacctctgttagataagagatagaaagtcttcattgtagcagaagaccctaaagaagatgaagtgaaaagaaaccaggtatttgcagagggacttgcctgaaggaatgaaaagaaggcaaaacttggagaggggaaaagtgtgaaagaaaagatgatccagaagcaatggttctcaaccttgactgagattcaaccttggttgatgttggattcacctggggaggtggttatggagaaggctttttataactcctgatactcatgcaatatcctacattaattacatcagaagctctgggtatgggacccagatatcagtattttgcaacggtccccaggggattccattgtgcagccaaggtagagaaccactgcctagagagttcctcatttttggtgaactgtgttgaaaaatgttatctggctcctaaatacagttctgaaccatgttctagagctcctgaaatattccagagtgaagtttcagatgttggtgagcctgcgagttttacagtggactttctgtttgaactgaatatttcacaaatgagatgttgagatacgcaataagataatcctcagacaattctggtctccttttctccagtggagcagacgtgccaggctgagtggtatgtgagcctacccaggagaaaagaaaagaatgctactacaaaaggaagctgtaaaaatgcacggggcagggaaatatttgaagagtgaacaaaccagcttctgttgattcttttttaagttattcttgcgagtggagacttcaatgccttcaaagctgtctttgctgcagattacacataggggcactttctcgatgactgtatagtgccataatcaatagctacttcataagagaagattacaaagataactgtgatacagaagctcaagatgctggtgatggcaaagcagaaaatgcagctcagaaaaacaggaggaataagaagaagaacaaacatctattcatacccagcagactgcaagtcataatgaatcagtttgtgtgaatctttggggaaaatcttgaatattatagactaaaatataattttccatggcttaaaatcttgtgcattcaatttttcttgtttaaaaaggattttcttaaaaaaataagttttaaaaaagcaaaccaatttattccactttgaattacaatcatgtactttgaactcagtctataggatgccgccaattctgtatatttattggcactataatttacatcttgtgaatggctttgtcatgtaggaataggactagagttgtgagttttatcagaattgtcatctgagatcactatttacttagaaaaaattgttcacaagaaccagttaaagtagtttctaggctagcttgcctttgctgtgcctttgtcatagaaatgcaacctctattctagcaaggagataaatctatttgattttgatgacttatcagtaataaaagtttaaaatttctagcaggaccacattttataatattagctgttggctggtttatatgacagaagtatacttaagattatctttttgtcacttgaggattaaaatatttatcacattatttaaaaaaaaaacagatccagtgccatccctttatacagttggtctaggaaagagagctggcatctgcttcacaggccaggcgggccacattttgtacaaggggaaaaggtaagtggctggcttggtggagctatgtaacaatgaccatcatagatacaacaataatctcttacctagtgttacacacctaacgttaaaactaataccagaaattataataaagttacaatctaccttagagagaaagaatactcactggctttttatcctcaagagatactgtgtctcctgtggctttctgaaaaaacacaaactaaaaaaaaaaaaaaatgatacagagatggagagcatgagaaccagccaacctgagttcttattccacagcttcactctctcagcagctgaccttgggcttagtcagcttctccctgtctccattttcacatctataaaatgaaggtaagactatatgttctgcttacctacagaactatttagaaaattgaaataatgaatgtgaaacactcagagcagtaaataaatactaggcaaatgtaaggagttatagaacccttgtttactttattcctgtagcaaatgccccctttcaaatgtagtttattcttttaatcagttttcctgcttctcgcttctacatttgacttccatttatttctcctgcttttatttacttggcttccatttatttctcctgcttttatttatttttgttttccccatttcctcacctagtggctttaaaaaatacatctttttagattgtttgcacttttatcaaagcttttgattctttttctggaaggtgacataaatataaataatggtataataaactcagtcccagttatctcaggtaaaagatgtattctccatgcaccatcatcttacccctgaccaccatcttgcagggtgggtattttttccaaccgtaggctgcagctagtgctgatgcaaccaaacaatttgtttgccttctaccggcaggagtcaggatccctgggttaaaatctggcctgcacctctagcaagctgtgtgaacttctgcaagttcatttttaaaaataaatcttaatttgagtcccaccgatctagacatcaaggaggcaatgacaaaccagcaccctaccaagtcagctttacaatccccacatcggcaacacctgggcaatgcaccatgtcctcctcctagaggttggggagggctgagtgatgtgtgtgtaaaacaccaagcacagtcgggagccgcagggagcactcagtaactgtcagcagttccaggttagcccctgagcagacagtcctcgtcagacaacctgagacccgggaaccaagaggccgaccaatccctgcaggatttcatccataacctcttccttctacctggatctaacttcctgaatgaccagcgaagttttgcaagttgggcacaaacctagcggaataaatggggctttgggctgaaatgggaaccgatgaaatgaatgttttcttttgaacactcatgaaaaacaaggagtctcaatttctttaaatgtccacataatacaacctgactgcattttattccagtgaaagaatctattgtttctatgcatggtaaacagccagaaagtaggagtttcctgttaattcttatcacttttcagaagcagcttctccactgatgtatctcctgcaccccatcagtactaaaagcaacctgctccttagagacacaggctccagcaaagacaggagaagaatcgagaggctccagggagaagccgaagtgaaatggatgtggagccagctgtgcagggaccagtgcaagcctcagaatgcagcagaggctacttggaaacaatttgctgatcttcaacaatctttttctttaaaatgcatttaattcattcaaatgctggaaacaatgccagtagccgacaacagaagcagagtggaatgaattatgcagcattctatcagtgaaatattatgcatctgtccagaatcatagttatgttttaaaaaacatttaaactggaaatgtctcattacgtaatgagaagtttgaaaaacacagtgcacagaagcataccaccataagatgcaagtccaaaattagtgatgaactaacagcagcaacaacaaaaggcatatatacattttgtttgaaagctttaaaggaaatatactaacagtgtgtaacataggggtactggttttatttccttctgcagattttcatgtactttataattttctttagtgaatattactttcatcatgttaacgaataaaagttacaaaatagatgatcagcttttgatggaattcaatcctgatttttttaaactctgttcctttgcaacgttatattgtgttggtaaaaaaggtaaggcccagtttagtcctggagaggatcccaagagttatttatgtggccctccttctgcctcaggcagctacactattatcatcactattctacaaaagttgcacctgagagagagtaaggcacttgcccaaggtcatacaagcaacaaatagcagactagtagactaggactcagattttcttactatgatgatagtgttctatgctatgttatgttatgttatgttatgttagtattttcgacaacttactaaagctaaaatttatattctccctgggctaatgcaatattgaaaaggagaaaattgcaagtcttttgacatttcattaaaatggacagttcaatgtcagtattacaaagaatactagatcctgaatttccaggcccctggacacccactgtgatttcatgtctccttgctctatgccattctttggtttgcgatcccaagctggttcagctgcatcttagcccccggcctgacctggccccaggagggcatttagaacacaggcaccggggtggtccaggctgcaactgctccgctgctcatctctcatgttgagaaggttccctcagccaccttgtccaaatatctctgctcaaatgttgccttctcaaggaggctgcctggattatccagcttccaggagctttctcccctccccatattctctccccactttcctgttcgatcgttctccaagcataaagatgctgtatatttgcctggtttgtattctccgtcttggccaactagaacacattgcttccagggacaggggacgtgttctgtcttgttcactgatacatcctcgtgcctagaatggggcctggcacatagcagttgctcagtaggtatttattgaagtgaaggaaggaggaaggtatgggtaggattcccccgccttacctccattaccccagcaataaatagcagcatgtcatcatcacggctcactgctcaccgttgccatcctagagccacttccaggaaactgctgagccttcccagaaggcttggaaggtgcgtccttcctgcccttctctaagtctgtgctttcctagtttaagttctgagaaaccaggccaaactagcacactacagcagtggcatgtgaacatgcaggcacgtagatactgtatttgcaggccgatgtcagctgagtgcctttagagtttctgaagggaaagctgcctgcctttcacagaagcccatttgaaactgggtcttaataaaacaatttactactcaccacagtatgtgaatattcagtgtggtagagtgccacctctaataagcttttgttctgatccaagttatccaaaatgctaatattagtggttgaaacgtccaagactcaggtcgctttattatttatacaattcaacttctcaatacttactataataaaaataccccaaatcccttgcacacatatctccagtagttttatatcaactccacgggaagttagagacaatagttcttaacaataacaattaggaacagcacctatcattaatgttccaggctttctcctgggcggtcttcagacatcttttttttgttgttttgtttttttttgttttggagatggagtcttgctcagttccccaggctcgagtgcagtggcacaatctcagctcactgcaagctccgcctcccgggttcacgccattctcctgcctcagcctcccgagtagctgggactacaggtgcctgccaccacgcccggctaatttttttttttgtatttttagtagagatggagtttcactgtgttagccaggatggtcttgatctcctgacctcatgatctgcctgccttggcctcccaaagtgctgggatttattcttgattatttacagcaaccctgtgagctacatgtctattcctacataagacagcaaagttgccgagagctgaaacagtacagctaggagaaactgcaatcagcctctgctctggcttcaaagctcagtccatttcacagcaggggggtttctgagtggaggattcagctgctccattgtatgatgagacaatattgtggagtatttgtctatggtctttctcccacctccctctgtcccccatcacttcccagaacaatggcactagaaggtaaaaaaggtcatgttattgatattttagtcaaaagatgtaaactagggaatatctggaagaagctgtaccccattagaagtcctctgaagtctcaaggggacagaagtgaagcaggaggttactggtgggtctctgatgcccagaggacaacagaatgctcagataatttgggggactgtgggatctgaagaaagagatttacatccctcccatcctctggatggtgagaggagagagggctgggtggcttgtcaaagacaaaaggctaaaggtagcccctggagtggctcatctccccaaaagggttgcagaagttagaggagagagaaggaagatgtgtaagcaagggagctggagataatgctgaacaaagcagtgaggaccctgcaacctgagaccagatagagccactgacacctcagcaagtaccagggtggagggatgaccatgtctgaggatgcaacaaaactagcatctatctcagaggacagcaacgtgaaggaagccaacatgcagcaaccagcattctcctctgccaagggccacaacgtactttatgcttttaggcacaaggaggaaagggaacatgtggatttaccaagaataaacctgaaatggttgggactcattttgacttgtcattctatagtgtgcctctagctgaatgggatttccaaggaaaggttaagttatgggaaaatattcacttttggtctgtgagatgtatcagctacagttatttttgtctgtgtcataccctctctccttctatgccttttttttcctacgttggctaaatttggctgaatttactttacaacttaatattgggactgtcagaaaagctcaaaatctctgtcataaagatatctattgagaagtcctcttggtcgtataatgtataaatctcctatatatgcctaattttattttccaaggaacccgctaaagtaagcagagcagatagtattatctcactttttagatgaggaaactaaggctcagtgaagcttagtggattgccccaaatcacaatggagggaacaagatgcaggcccttcaaacccaagccccaactctcacccctcttctacttcacccatgaccctgtttttgcgatcgtgaccaagtgtggacctttccaatctttgatattccacacacaggagaagccaggaagccattcctgctggatgtagtgaccaacacattggatttacccaaattgccaagtgatcctgataaacaaaattagagtattcagattggaaaaatatttttttgcaactcctcctcacaacccggaacccactgggtctaaaaaaccttgtattttcatttcattcacaggaatatggagttagacatatgctagagaaggtgggttcctctattagaagactaagaattatttgagattatgggatagtttgttatataaaacaataatctaagtcaagagaaaaatatgtgttagggaagtaataatttgtagaacgtcagatatccctgtgtactgcaaagttcaattcaacaaagatttaagtagaaaggcatcacgctaagcctgccataagtaagcaatattataagtgaggctataaacaatataaagagaagttttgccctcaaagtttacaagataatggaaggaatcagactaaaaccctagtaatgacgatcaaggcagaatttattaagagtgattaagaatgtattaaggtattaattacaatcaaggcagaatataaaagccgtgccaagtggacgtcgtagaattagagaagggtgcaaacacatgtagttgggaaagaagaggaagacttcaagaaaggaggaggggcagtgtgtgggcattgaaagacgagtagaatttcagcagcgtctactgggaacagccacatgcaaaaagaagtgatgccctccatgagatccagggctcctggtgacctctttccccaggacagaagggtcaggagggccccagctgcttagccaggtactagcacatggtttgacttttcttctctatgattttaacttccaactattccatggaatgcctctcacaggtagaatcaccctttctcccatatcaaatacacacaatatgccaaagcaaatgagtctgctggtctgagtgcctgccaatccaagcctgagaagagggtaagctgcactgacccacctccagcaggggaacttggagagtatataaagctgaaactccaggttttgctgtagctagaagctctcccaacatgggctgccaagccctcccgctttggctgctgttcttccatgccgttattctacctgaagcaggtactacagctgatgcacaggttcatttttctcatgccttgtcacaagcttgaaaggcaaagtatggttatttgcacataggccaccagcacaacagcttaaaattaaatgcagatagagcttttactccgcttaatgtaatccagccactgatgagacattgctgtgattatagctgaatgcataatcataactaattttaggaaagtttgattgaatattttctgtaagatttgttttctgtgagcaaagcattagccaatttattgctctttaaaatcatacctctattgtgagattctggatagaaatagacaaagaaagaatacttggctatggtataatccaatacgggttcttaaaatgttctttggcttatgtattgatattcagcactaggagtattgaatgacagtcatgattttttttattgttgctgaatggaggtataaaacctactattaaaaaatcttagcttgaaatacttgacatgacataaaattatctgggcttgattcatgatgccttctaatctgaaaaactgtacctttctataaaaatagatagattgatttgatattattgcttttaatgtgtattctacatctagtcctcttaaggaaattttaaatttaacttggaactaaactaatttaaaatatctacataacttcaattatttttatcattattttgtgactttgggggaaaacattactgtcttacttgtactaacaaacgaaaatttggaaatacccttgaccagcaagtagtttgaatataattcttattaactataaaggaaaaacataactcacccaccacacaatagcaattgactttaaagtttgtaatatgctcaaactctttttttttgttctgcacgtaattgtatgagtatgtttatacccaacatttaaacatttattaaaacatactaggttgttaggaaggatttcaataattttttttaatcttttgagtttctaagccttgtttcttatccatttgtccaatgaagtttcggcttgggaatatggggtttagggcagaaagatctggaacattcaagtgctaactgggcactttttggcccagtgaacttggacaagtttttaaatctctctgtgctgctatttctctcaagtaaaaagaatataattcacaggattgtttgggggatttaatgaaatgtttgtaaaatacttggaagactgcttcaggcatagaaaatgttcagtcaatgttaactgttattatagacactgtaaattataaactatagatattttaaacggagaagagatgaaaatacagattatcagattcagaatatgacattttaccatgatacatcaattcctcgggaaaccaagatattttcccctttcgacgtttcagtaacaggttttgagtaatggattcaatattttaaaaacatatagcaggaaagaagttcttgtcttccagtagatcaacactatgcaggttagtacttggggatgtgtgggctataccaaacatgtatggaaattgatcgttttctgaagcatagcaaaaatttggaaatttctgagagaattcaaaattcacattcatcatatttgtgccacttgtggcaaagatgattctagtttgatggtgctcagagtgacaaagtgtcagctttggggatgtaattgtaggccatgggagaaagtgaccctggaccaattcagaatgaacctcggtcatctctgccccgctctcccaggctccttcccttacctgaaatgtattgctactcttgggaagtggaatcagtctatgatttaatttctttggaatcaagttcccagaggattttagacagacggaaggacccaaaatagacaattctcaatctgcaatgagtttaatgatttctgggagccggaaagaaaaccacccccaaattcagtgtttctcttaaggctacaccctgataactactaatctattgggaacagcagagaaagggtcccttgaagcaaacatcagcctcattctggtcccagctgtcccgaatcccttctccctcacatcactgtgaaaatccaattcccaatggaaaaagggtccaaatgaggactgctattacactgggcactttcataatccagttccaacaatattcagctctcctcttccctgccttattctgctttctttgaaatttgcaagcttaccaccaaataccagagcatttcccaggctgagggcacatgctgctctgctctgggcccattacttagcacagtggttggcagagtagagaacgctccatcactagtttgaaaaaatgaacaaaacacaatgagcgagaacatcacaccgttagctgatctccacttgtgagatccttttcaaaataacaacaacaggattatgaggctttttcccccgagtggctgcaaatctagggatatttgagaggctcaggtaatcttacagacaccattggcaagtctcagttatcagtggggccattttcttgccagcttcctggtgcctccttcatctttgccccttttccaacccttttgtgcccacctgtactgtcactgcacctctcccccaagatgcggacattgccccagagtttatggagggggtgctcttcagcttccaggaactcatggattagtgatacgatatgacccaataggcttttctaggctcctggtgctgattgcacaagagtcttacagacaatggggccagtgagaccatctggaaacaaccacccagggacaccactgcagttccatgcaggtcactttgatactagaagagatttgtggaactggcagactattggagtgcagttgatattagggtgattcacatgaaaagtgaggacaaagggggaacttgttgaccaccagagagagaaagacaatttctgataacgcaattgttccctggcacagaatttatctaatcaacacaatcctagtgaaatcattaaaaagtctctataaaccccattatgatcaatttacaatccattcagctgtgtgcactgctctgcctggaccccacactgaccacaacccctccttttctcacccccacagaccccacccaggctctcagccctgccgctgcctcctcagacagggactcccagccctggcaccaaggtcagctggaaattccaggtgtcagatcacagctggatctgcagaactgccctgtgatcccaagcacctctggccaaatgctcagcagaaagcacaccgcctagccctgttgcaaggcctgcagccctgagagccactctgtacacatgcacactcacacccaccactcacattcgttcacatacacacactcacacaaatacaccttcactcacacccaccactcacattcattcacatacacacacaccattcactcacactcacacccaccactcacattcattcacatacacacacaccactcactcacactcacacccaccactcacattcattcacgcacacaccactcacactcacactcaccactcacattcattcacatacacacacaccacacacaccactcacattcattcacatacacacaccactcaatcacacacccaccactcacacactcaccactcttaattacatacacacaccacacactcacaccaattatattctttcatatacacacacaccactcacacttacaccccaccattaatttttatttacattcacaccatttaacacacacttcaacctacaaattaaatttatttacaaacaccaattacactaacacctaccaattattttttttacaaatggcccaatttcacttaaccattgacatttatttacatttcccaccacccctttaacaatttaccatttaaattttttgtaattaaccacaaaccagtgtaagtttacccctgnnnnnnnnnnnnnnnnnnnnnnnnnnnnnnnnnnnnnnnnnnnnnnnnnnnnnnnnnnnnnnnnnnnnnnnnnnnnnnnnnnnnnnnnnnnnnnnnnnnnnnnnnnnnnnnnnnnnnnnnnnnnnnnnnnnnnnnnnnnnnnaccactcacactcacactcaccactcacattcattcacatacacacacaccactcacacactcaccactcacattcattcacatacacacacaccactcacattcgcacccaccactcacattcattcacacacacagcactcacactcacacctaccactcacattcacacacaccactcacacactcaccactcacattcattcacatacacacaccactcactcacactcacacccaccactcacattcattcacatacacatacaccattcacacacactcacacacatcactcacatttattcgcacgcacacacacacactgtctttcataccactcacattcattcacatacacacacacccatcacactcaccagtcacattcattcacatacacacttacactcaccactcacacacactcaccactcacattcattcacatacactctcacacatttattcacaatgtctcacacacacacacacactcaccacatacgaccaacctgtttcattcactccgcctccttgatcctatcccaaagccctgccctcctcagcccctgccctcagtgctgccctctcctgactgagctaccagttatctccttgcctagtcttaaatcttccctaattcctggctccttatctcttattgtaaatattcccctgaacactacaaaacagaccaaacgctccctcagaccacctgcccagcacccgacaccacctccctacctgaggccaccctggacattccgcagggtgcactgcagcagcctgggagggagagtgacttcagccctgggggatacatgggcagtgtgtctgcatctcagcttactccagattgagaagaggttgactttctacatcaaagaccaggagttgggtttcagtcaccctgccaagcccctcatggaaattccgcttgcttcacatccaagatttctagcggagttggtcctgacttcttattctcaccccttacttcctaacccagtcaccctggtttcacttcaactcctttctgaagctgctctttttttttgagactgagtcttgctctgtcacccaggctggagtgcagtggtgcgatctcggctcactgtaagttctgcctcccaggttcacgtcattctcctgcctcagcctcccgagtagctgggactacatgcgcccaccaccacgcctggctaatttttttgtatttttagtggagatggggtttcaccatgttagccaggatggtctcaatttcctgacctcgtgatccgcctgtctcggcctcccaaagtgctgggattacaggtgtgagccatcacacccagcctgaagctgctctttttaagacacaatggtactggcctttgattgccaatccagtggcatcagcagcctctgtcttgtcagctcccccacagcaggccacactgacagctgtccctgtgcccagaccctcactctcccttggccctgtggcagtgacaatggtcagatgaaagctcttgtatctaaccagaaagagttggaaaccagtttttaaaagtggttatgtttatgctgtgtttatgtgcactagccaaatacctcctctctcaccaaagttacctctaaagcacaaatccaaaaatgtaaaattaattaattttacttaaataaccccccaaaagaaaaaaatacataataaaaataaaaacaggaaaaaacacaaaaagggaaaaatgcctgaaaaaggacaaacccatgcgatattagaacacatcaaatgaactaaaaagcatggttgaatttatgtgtaaattgtagcttacttaaagcaaatgccatgattaagtacagatagctaaagatgtgtaataaagtatacaggctgacataaaattggaaaaactggtacaaacatatacttgattaaaaggaagagtcataaaaccaactacacaccaaggcaagatcttaagaagaagtgattgcaggacatgggtttccaagctcagctgcacaacagaatcccgtggactgtcgaccattcagattcccaggccccctctgctgcagctgtgagccagtgggtttggggtggggcccgtgaggccactgtcttaggccacactcaggatccctgctgggttgtaacgtgtctgatgcatctcagtttgctacaggaaaaatgtgggaggatccagaggaaggctgtggaacccatgctctgagagaagcactgtccaaggtacacctgcgactcagcaagaaggtgagtcacagccagacattccccttggccttgaggaggaggggccgcgggcaggtgggacctgaagggcagagggtgtgactgtccccaggaatggacagtccccacccagccaggcaagtcacacatctccacaaagaatgacatcccagttttatttctgcttaacaagacaaggatgccctcagatctttgtttaacttcatggttcttatacattaaagactgactttggccgggcatcatggctcacatctgtaatcccaacactttggtaggccgaggctggcgaatcacttgaggtcaggagttcaagaccagcctggccaacatggtgaaaccccatctctactaaaaatacaagaaaaaaaaaatttgcctggtgtggtggtgcgtgcttataatcccagctacttgagagtctcaggaaggaaaatcacttgaaccccggaaggagaggttgcaatgagccgagattgcgccactacactccagcctgggtgacagagtgagactctgtctcaaaaacaaacaaacaaacaaacaaaaatacctgacttaagggtctctatttcaggagttcttaaatgatggatgtatgataaccaccccaagagcttattgaacatgcaaaatcctggcccccattcccagacatgggatgcactccaggaatctgcataattagcaagccctcctagagattcaaatgtctctgcagcttgtgtgagggtcacactttgagaagcactgccctgtggccactgggaagggagagacagcaggagatccaccagtcccctgctgtccctcagcagtaagccttgggcatttgcttctgtctcccttattactggctcttaacatgaaggtaataaaaattgccagctccaaagtgttccctctgtgccaggcattttacctgtatttgtttcatgaatcccctttgaggcaggtacagtgatctctgacagatgaggaaagtgagggctcaagtggcccatgcgaattgcatagctagcatgtgggagagctgagacgcaaacccagaggccggctgtggcactcacactctgaagcccgaccatcctaggtgcctcgctatccccggagactcctgtgggtagccagttggatcatgcccatcaaagtactaagagaggggaactgcaggtgccaggtgacaggagagggcagcagcatctttggaaaaaaaaaatacaatgctagtatctgctgtgcacttgcacttcacccacactcaacactcaacactgacaatgacatggtagaaattatccaagaatccaagagagactttctaagctgaaatatcaagaagcccagagcccgagggcttctatcttcttaggtgcagatattcttgccagggtgggcacttctaaaaagagcaaagccaagcctgacatctcatcacagggcaaacctaacatggtcccatggatgaccccacccagaacaggagggccctaggagatccgacagtgttccccttctgccccctaactaacagcatgaccttcggcaagctgctgccattgtcagtatcctatctcctccctggtaacatggggacaataacaccctacaagggagtcgtgagccttaaaaagatgtcagctctacagggctgagcccagtgccaggagcacagatggtgctcagtaaatagcagttgttactgcgaccatgaggagatggtggggaagatgactcccttcaccaacacttaagtgggggttggggggctgcctttcttccaaagactggattgctgtgcaactcgtggaaggttctggaaggtgttcaggacgagtcgaggtgtattttgaaggcgtgtggggcatggtgtgcgatgacctgtgggatgagaaggaagtgcaggtggtgtgccggcagctgggctgtggggcagccatctctgcccctggagaggcccactttggccagggctccggccccattcttctggacgatgtgcagtgttccgggattgaggactacctggaggagtgctcccatgctggctggtccacccacaactgtgggcacggggaagacgctggtgtcatctgctcaggtaaatttctatcttttctgaaagttgatttttcatttttttctgatcaatccctgaggctcctcgtttctccctgacatgagagaatgcctttgtaacatatcatttcattagtatgaaactccctgtccacccaggtcctcaaccattcttcccaagaaagacactcactctgaagctgactcctctatgatatttataaaacagctgaacactctaactctaaccccaatcgtctgtgtctatttgagaagtcaaagataatcatatcgggaagaatgctagatttgaaatgaaaaggcttagtccagctgcaggaaaggtacatggtttgtggatcctgatacaaaacaaaaatgtgggcccccttttcaaaaagtgttaagaatttcaagacagagacagcagagcgtcaatggaagggcagggcccatgggacctggttgaggcttaccccaatgaatattcctctatgattccctctccccaaacctcctgcccccttgagtttaacgtggcattttgcacatcattttctccttacctaacaagttgagaatgatcatcacgacaatcatgacaatgccttttactgtactgctgtgaggacgaggcgtctgtcagttctgatccactgtcttgtcattccacagcctgaaaagcaggctgcccacaaggctgtgttgatacttctgctttttgaggaaatcaaccctctagagagtgagcagctgtgtctctgataaaccgactatgggtgatggggcaaggtgtagaatcaggaggagggggaacaggaaggctcctccttgctgctcagctgcagacaatcgtggagtcagagggggtgtctttctctcccctactcccctgccaattcctcccaaacccaacatgctaggaagcaggattagctccatcaccaagtggccaggagctaagcattcaacaatatttactgccaaaggctgtagagatgcagcagtgaatacaacgtccccattccgtgggatggacttataggtgactgccagctagcaggtacctcgcctctcctgccgactgcaaagacaagggcctgttgtggctgggacctttcccactgcaggcagcttcatctcgacagcagttaaggggtcagaggagaactccagtccattaaaccatcattcccaaggcctctcaccagcctgcagggcaaaggtggccccaggccctcctacctcctagaccactaggtcctgccttatgattgaaccaagtgggacactgtccaaagcccttcaggtgagtcctcagcaggcctgtgtggaatttacctttgcctcatgggggtgctccaggccgcctgggtgggcagaaagaggactctgccactctcttgggcagcaagtcctgcaccaggccccttgggagggaaggtgggagacaggggctgagaacaatctagttagcaaagtattgtaagtataaatcttgcttcaggcaatttaaaaacactttccatgattttgccctccaggggatatttggcaatgtctggagacattcttgattgttacaactaaggtgctactagcctgtgtgggcaaaagccagagatgctactaaatatcctgcaatgcacaggacagttcccaccgcagaactttccagcccaaatgtcaatagtgtgaggttaagaaaccctgcttcagaatcaagcatgtgcagttgaatttactgattgtaataactatttattaattaactgatcattgattaattaacagttgcatcagtaatgaaagcaaagttatctattgtttcttccccaagcgttagccttagtctagtttcttttccagtcatttcctctgattgtcccctctactgattacagttaattaaatgtatcctgtcatttttgagggggataatctcatcccaagtgaatcttgagcagattcactgaatcattattgtagccttcacaggtcatgtgctccaagcatgacaggtctccgagtggtgtcgcctaagagactgtctcaaagcataaccctgatgtcagccactgagcactgtcgtgtttcctgagtacctcctgttcattatcccattccacccttacagcaattcggggggcttgttttatgagccttgcattgcaaatagggaaactggggttcagagacaaggttaagcaaggtcaaagttaaatgccttgaccaaagtcccacagcaaatatttaggtctctggattccaaatccagtcctcagtctcctgcgccaaatgtcgacactctggaaaaattgccctgcacctaggcaaaaatgttcaaatgttcagagttgtctttgatgctctgccagtagcctcaccctccttacctacgtcaggcctccgcaacacactcacaccccctaaatcctgtcaagctccccaggtgcagggaacctctgtgctgaactgccctaatttacttaaacaggagctgggacccaccttcttccatccttgaggatcacacttcccccagttccatttccttaagtgctcttcccctccacctccagtgatgttgagagaaagtcaatgaatgttaattggggaaataagtaattaactacgtgagtgagaggactggatgtgaatgcattagtcagttctgctgtttttcaaatacccccaaacagcatggcccaggtttccatgccctaagcagactctctttgaaatcctttacttactttaaaaagtcacccagttttacttacaagttacaattaagccatatttattttaatacaaaaacaaagttgtaaacactcaacaacatcaggtaccctcagtcccttaggaagatgcacctatttatcctgtggggtcttctaccccatctcatggtgagaaactaagaaacccaaccctagttgcagatagtgggctcttcctgagtggagtttacactaaaatgtgtgcatttcaatgaatactgaaaagagtcaaaagatctttccttcccagatatgccctaagcctttttgaagtaatcacatataaggaaaattccaggctgaagtttttgactggggtcttagtaatggggcaacagcagatccttctagcaagtacagggcattccagaatttttatcatctctaatagactcagtttacatttaactttctttttttctcatagagtatgaaaatgagcgcttgcaatcttttggtaagaatcacactttactatgtctttaacagaatgtccactaatgcccctaatcctttgattgtatttaccagcataatgccttacaagaggttggggagtggcagaaaaaaacaaaacaaaactgaatttaatcaaaaagactcaacaaggaaagagaaaaaacaggtagcttccttgcctttaaccatgcagaaatctttgctccccaaactgttgtctaaatgtattttagaaaatcctggagtgaggacatgaatatggtttagtaaattatcatgcaaaaatgttattaaactcagactaaagaaaatcctaactttggacacccaaataatgcctctaaggttggaaaggcagtgactatggcctcagaacagagtccctttccatctctgtttggcaaattcagagattaatgagaaaagcacagcctttattgttaacctgagtccttcagcattctcctttatgagtgcctcaggaatatagttccataagtattttatctttctggcagaagatgcatttgcacaaataatccaatttaaaagatcaatctgtacatgactcagatgcacaataaatttctcacttgtcactgatcagaacctactggatttatttctcaaagcatgccattagctcaacatctgctcctggaatcacatacatgctgacgcttgcccagtaaacttgggtagactattttgcatgacaatgatacctcatttatttctctctgctcttagatgctgagatcctaacgccatttcctggtggtaagtcaagattttctaacttcctggctgatacatcttggtgggtcatttgctgctaaagtgatggttgtatctccaaccctacaaacactaccaaacagaatggtttcatctcaggatcccagtgctttcgcttcactcataaatctctacaggtttttttgttttttgttttgtgttaatgcacagaataaggctctgtccttctccccatccttctttgtctatgtaacttcttcctactcctctttcaagcctcagatccattgtcatctcttagggaagacatccccaaatcccaccccactccattatatactctcaaaacatcaagagattatactgcttcctagcacttggcatagttgcaaatctccgtgtaattttagattaacatgactgcctcctccagacttgcaaactagactccaaactctgtgacagccagagttggatctgttagtttaaccacagtatccacagtgctatctattcggccctggtgtgtgctcaataaatgcttgttgcaaggtgaaacaaatgggttaatgaagaatatgtgccttctgctaacatgcagtatttttgtatttccccaaaagactggccacaattgcaactagtgaatggctcaggtaggtgttcggggcatgtggaagttttccaccatggccagtggggcagggtttgcgacgaccagcgggacatgaatgaagctgacgtggtgtgccggcagctgcactgtgggtgtgccctcgcagcccctgctgaggcccaatttggcgaaggcagaggcgaatttctactggatgatgtggactgtactgggaaagagagttttttgggacaatgtcctcatgccggctggggcctgcataactgtggccccagagaagatgccagcatcatctgcgcaggtaatggccacctctccctccacaatgccgctcactacatctccactcaccccactggcagtgcttccacctatgtaattgaccatctgccacttgggtgagccaaaagtaaaggcacagtggtaatttgagaacttcaacttgagctcaggaatttattagccacaagatgttgaaatggatttttcacagagaaaaatagtggaagatattggtggttccatgtcaaagcctagatgtcaaaatgaatggtgaaagacaacaggagtcaacagtgatgtgactcactttctgggtgtgttctttctttcttcaggtcactgtggtgaactaagagacaaaggtttttcccactaaaaatttgcagtcaactgagggtgacaaaacaaggagtttgtaaattagaatagcaatagcttgtcttgattgggagctcaggccatgactgccaatcacaagtctttaaccaaatagtcatcatcatgatcagtctaggacagggtttagatcactctctgttgtaggtggactgtcctgtgcattgtaggctattttgcagtatccctgacctctacccactaataacagtagcactcctactcctgacactattgctaagtgtcctttgggggagtaaattgtccctgagaaccactggtctggatatacaaacaaatttccaccaaacatgtggctaatttagcatactaccagtgctaacggcataaatttatgtgccagtggggaaaaaagcaaatatatatattttttttttgagatggagtctccctctgtcacccaggctggagtgcagtggcgcgatctcggctcactgcaaggtctgcctcctgggttcacaccattctcctgcctcagcctcctgagtagctcggactacaggcgcccgccaccacgccaggctaattttttgtatttttagtagagacggggtttcaccatgttagccaggatggtcttgatctcctcacctcgtgatctgcccacctcggcctcccaaagtgctgggatcacaggcgtgagccactgcacccagccaaaaagcaaataatttagcaggtctgaccaagcagtaaacttgtcacttgccaacatttctaattgtattaaaccagaaagactttatctaattgatactaatgtcattaactagcctcttaagtccattcaaacagctcaaatagtgtgtgtatgtgtatgtgtgtgtgtgtgtgtgtgtgcgcgtgtgtgtgtgtaagttttggtttgttttttcatttagctttagttttttttttccatcttttttatttttaaaaattatttggagttttggcatagaattccatcaaagcaatctagtctataaagctactgcgttccacctaacagtttcgtgtgtataattagtgttctctcctctttggaggcattatagggtttgcacagtggacacagtagagccacagttgaattgaatatgtgttattagacacactatgctaaaaaattaatacatttcatggttaattaaagtcacctgaactaaggcagggagggtcaatgcttttatttcttcttcattttaaaattaatgtttatttaaagcatctctagaggcagcaacccttttctaaggtagatcttttcctgtatgttaacagaggctgagtacttaaagcccacatcaggtaagttcatgcttttgttttaccaacttgacatttttttattctagaagctacctgggcaggtaatagacagataataaagagacaaatggaataaaaggtgggagggatcagcttgccatattttgacagtcattattttttatttctgcattcctgggccattaagataatcctttcattaagttgaaaatgtcattggactgctttctttgttccgcaagaatgagctttattttcacttcagtcatgagggttttggttattctctagcattgctattttcatttttccagtggaatagcagttaaaagcatgattcctatcaccaagatttttaaggaaaaagcttggtaaattgtgtttctttcgttaccgtttagcatatgttctttcctgtcatgtggggctcagtgtggctggggaagggaagtccctgcctgtacttcactcttatgttctaatgccaccaaattcccaacctgtctccctgcagagaatgctgaagactcactgcaaatgccctaaggtaggaggtattttcttttttctttttctttctttttctttttatttatttatttatttattttattattattatacttcaagttttagggtacatgtgcacaacgtgcaggtttgttacatatgtatacatgtgccatgttggtgtgctgcacccattaactagtcatttagcattaggggtagtaggtattttcatgctgcatttgcagttagtccttacttggtacagttttcttttggtttaaaaaccaaaaaattttcattgcacctgctcagctgaatttggagaggagaatacactacatattctatgcataccatatttggatcaatttcctagtatgtaaggaaactgatgtgtcctacaactagaaaatgcaacgggagcatgttcaagacaggcttgtgcactagccaaggctgagcttggagatgagggaaaggcatgggtttggcagcagaagttctgagtgtaagttccatctcagccacttatttagtgtaaccttgggcaactcactaacacctttataaaggggggataaaaacaccaactttgcagtgctccatctaagttaaacgagatcatatagatggaatggtaactagagccaacttttatagagtgtttaccatgtcccaggtacttttctaaggacttttcctgcataattacccattatttaataagttatttaattaataagttaaatagttaaataatgggtaattacacaggtaagtcccttaaggactggcaaactttttctgtaaagggccacatagcaaatattttaggcttcagaggccaggtggtctcgttgcatttattagactctgcttcggtggcatgaaagcggccacagacaattcataaactcatgaacatgtctatgttttagtaacatttcatttgcaaaaacaggcactcagctagggttgaaccacaggccctagtttcctgaaccttgctctaataaattaattaattctaaacactgcatgaatgacatttagtttttacaatgacctgatgaggtaggtatgactgtaatccctattttactgaggatgaaactgaagcatagaaaaattaatcaacttttattatgataccttgcttgacttttacggagagttgatgttaaaaatagatatatttctcctgtttagtttctcaaatcatgaaaaatatagagccaaatcttattcctcctctctctactcacttcacccaaccaatgcatcagaaaattctgtctacttctaaaatatatgctaaacccattagcatctcccaactccactaatactgcagtcatccaaagccccatcattgttcatcgtcactatagcaacaattttccaaatagtcctctacctcctccctttcctcccccaacatatacacaatctattctcatcacagaaactagagcaggctggtaattgtaaattagatcattccttttcactcaaaattctccaaaagctttccgttgtatttaaaataacatccaaatctggtaccatggtctttcagaccctgcatgacctatgccttgctcatgtctctgatccttgagaacacacctcttgcactgtgttccccgagtcttttttccatcccttcaaactcacaaggtagcttccaccttagggcctttgtagggggtacttccctctgcctgaaatgctcttctcccagacttttcttcagctcattcctcgtaatcaggcctcaggtaaaatgtcagtccctcagagaggtttcccctgaatacacaatccagaaagacttcctctcaatcacattctatttgatcagcctgttgtttttctcttcatagtactcacaccattcaagatagcctcttttttttcttatttttttctgaaatggagtcttgctctgtcacccaggctggagtgcagtggtgccatctctgctcactgcaacctccaattctcaggttcaagcaattctcctgcctcagcctcccgagtagctggaattacaggcgtgtgccaccacacctggctaattttttgtagttttagtagagatgggtttccccatgttggccaggctggtctttgaactcctgagctcaagtgatctgcccacctcagcctcccaaagtgctaggattacaggcatgagccaccacagccagcccaagatagtctttgtactcttttgtcgttgtcctgctcatctgtgtcctcctgcaccactccccagagtgtgggttttgtgagagtaggaactttggcaatcttgtttatctcagagccaaggagagttcctgatacataataggttctaaataaatatttgagtgaaaaaatagacatatataacattctgccacttccataaattgctgttgaaaacattatactaggtattaaaatactcaatgaacaaagacaatgacttttttaggaggataccacttatcaggcagtgagaattccattatgcaccaggattttcatctgccttcaaactccaggaagttcagagcttaattgaatgatcaatactagcaatagccaaggattttttttggttggttggtaatttttccatgtattttcctttcattcgtatgcttgttaatcttatatttctatttttctggtcttgctatgcagatatatgtattttactgtcacttgaaatttgtagcagaacatatacatatataattattacatattaaattatatcaataattataacacaatattcaacaaaataaaataatctaatgtaatatataattgtgatgtattatagtatataaagatattattataatattgtgttgtatattacatattataatgtgtaatatataataatagtatgtataataattaatgacatatataggattaatagaaatgtccgcaaagggtccaggaggaaccagatgatggcccctgggctctgacggaggcacaagctgagaagacagctcatatgtggacatgccatggccatcttactttgctgctagcgggtaaccactgcccaggacaggcaggtggcccagagtgccactggtgactggcttgctgtcagtgtgtgggcattctgaagagccagtattatatgttaaggcttttctttctaggctgtgttaaaagcaatcaaatcagcaaatacaggacttctgaaagcctgttgagtcccaggggctgatttcaccaggaattcatgatattttacattttgtattttagacctgtcacattaaagatttgttgaaaaccagtaagtaggtcaagtaaaagttattcaatttaatagaataagaactatgtcaatttattcttaccaataggtgacagaaattcagcaatcatattatcaggtaagataacttgtttgtgctgttttcccctgggacttttctgttttcccacccgatacaggagggaagtatgtggaagcgtggctattgagttattttactcagtgacttattataacctgccccttataactgagcttggatggagatgattttcaggacatcactccaaaagattcactaacctcttaaaaaaagagagctaacaatactatttaaaaaatactggaaacatttggaacataggttttgtaagtatttaatttttcagtttggccagcttctctgggagtatccaaactctcttaatttttataaaggaaatgtttcattttttggaggaataatcatctgattgcatgtaatgtttacttattgtataatttccccatcgctgctctaacaaagtgccataacttagtggcttaaacaacacaaatttatgatcttgtagttctaggggtcagaaatccaaaatgggtctcagctaagagtagtatcaggtaggctgtgttcattctagaagctctggaaaaagaggatccatttcctgtcttttccagtttttagtggtgacctgcattccttggctggtggccaggcctccatctttaaagccagcagagagattagcattttccaatctctctctgactctcttttgccttctgcttccacttttaaggacccttgtgatgccattgggcccacctgataatgcaggataatctcctaatgttaaggcaactgattaacaaccgtagtttcaccagcaatcttaattcacccctttgctgcgtgacctaacatatgctcaggttccagcgattagaatgtggatatctttgggggggccaatactcagccttctgtacttgtttatgaaatcaattttgtagttactgctgctcagtggcgcagaaatggacacgttattcagaacatacattaaaatatggtgaccaaacaggaagtagagagaagaaaggtacgacagaagagggggagcatctacccaagtcaatccaaaaagagaagcaattgttctccatctcctgcagttgcctctgtcaatgttccttatggacattgtaagtaattcccacggccagacatggcatgaagttaggtctgtagagcaggagagaataggggaccgtggagccatagagaggttttttgctagcacaacggcaacagaaatgttgggaacaaaacaggcttaggaataaaacatgcagaacacgcacataaaattaccagagcgtcctcatgatctagaccacaggccaactcttaggaggaatattaagacccagaacacaaaactatcatcacaaaacaccaaataactgcacttggacatcgaatctgggagagagacaggccggggatgattgagcctaatgggattgaagatcagatggctaagaggtgatttagcatttctgtcacttactcagaggtcacttcagagttgaggcagaaccacaccttgtgaaatcacagggagcccctggccaaacacccctccctcaagttacttattgttcacaggtgcttctttattacagttctacctgctgccatctcaactcaactctctcctacaactgctgcacattcggcatcgtcaggtaggacactaccagctcctctgccatggtaaattcaccatagcttctaagttgcatgaatgatagtcggtggttctgcaccctcactaggtattgctaaaagatcacttgagatcaaatgatttgagaggaaaggaacaagaggaccctgagatggtctgaatttcactttgtgtttgatcacctataattttaccaacaaaaaacatgataacgcaagtcttctcatttcacatgctttcacaaatgcagagtaagaagaaaagagatgggggaagtgtgtgttagagaaaaagattattaaagagtctcctcatatcttttgattttaagaaataaactacagcacttggccttatgtctgggaattatccaacttagagatgtccaaattacatctcagtgatcaccattataatccattttcacttgaccatgctagttgattctgtctccacttctgcatcacctgtaactgctgatatttcaattacaccatcatataattcacattctgacaatgctaataatcatctttagtaagtccttaagcctgtactatccatgtgcttactgagatgtgctgtgtctgttaaatacacactggatctttcaaagaatcaggaaaatgggtacttgttgttcaatgggtataagctttcagttatgcaacatgaataggttctagagatctgctgtgcaacatcatgcctatagttaacacaccgtactgtgcacttcaaaatttgttgtgggtagatttcatgtcaagcgttcttaccacacacccgaaagagacataaggaaacttttggaggtgatggatttgtttattaccttggctgtagtgatagtatcacaggtgtgtgcttgtatccaaacacatcaagctatacacattaaacatgcacagtgttttggtctatcaattatacctcaaaaattgttttaagaaagacaatactattaaaagaatgcaggccaggcacggtggctcacgcctgtaatcccagcactttgggaggctgaggggagtggatcacaaggtcaggagattgagaccagcctggccaatatggtgaaacctcatctctactaaaaactataaaaattagctgggggccatggcgcatgcctgtaatcccagctactcaggaggctgaggcaggggaatcacttgaacccaggaggcggaggttgcagtgagccaagattgctggtgacagagcaagactctatcccccccaccaaaaaaaaaaaaagcaaaattgctcattgacttttttatatggattacattttgtatttatattttaaactattacattgaaatgataatattttggatacatcagattaaataagatatattattaaaactaattccatcagcaaccagaaaatctgaaatttcatatgtagtttgcacttaatttataataaacagcattgccttccactgagacaatcacatatgttgaacgtcttatatggattttcttgtctaatccttccaagagctggatgaggggacttctaacacctcaattttcaaaatgaagaaacttatgttcggataggttaaatattgtcctcaaggttggtggaaagataacacaatctgacttcagagccctaaagcttaatctctgaactattctaaactctctaaaccacattaaaatcctattctaaaaaatattgacaaggcacattgcctattcagaaacaaggagtctatttgagatgacaaaagctgagactgaagagttcatctctgagctgggtctgcgtttaatttttgtacttttacccttgcctctcccaaactcacatatccattgcgcattgggtggccactgcaacaccagtgccagtcccctgccctgcctggtccaatcctccccatccctctccaagctgccctggcgggagtggctccctcttctagattctcacagctttttatctgtcctcactttagctcttattcctctctcatccagttgcatatgtatccacttgcttccccagtgacatgagggcagaatccatctttctcattttcaacattgcccgcagcacgtgcatgtgcacacatacacacagatatcttgaggacaatgtcagcatgtctgctctctgatgggcaggcattcagtggtggttaaataaataaatgaataaatgcttgaataaatgaatgtcatttggcttttgccagtttgcatatttatgtccacttctaaacatgaacaacaaagagaaaaaacacgttaaattcctagctctagtgtctacatgactaaatacggacatttttgcacgttaagtggcatattccacttacttgacagtgcagtgctcacagccacctactggattaggatctactctcttctacctgccatttatgagaccctcatgatgtttctttacccctttgtgcttctgttacctcatctgagaagtggaaacaatagccactgatttcaaagagttctgaggattaagtcactgaatcggtgtaaagcacttagcaggcagcctggagcatggtaggtacacagggagtgtgccctccttccgtgcctggaggaatgtcctgtgggatgctgtttttcacaaggaggggcttctgccctgtagtggctaggccaggtgaaaagggcatggcatttctgctctctgctgtagccaggtcattttatcatagttcctcctccagcccctggaaaccaccagtctgctgtctgtcgctacggatttacctatcctggatatttcatataaatggcatcataccacatgtggcctttcctgcctagcataatgtttcttttttttttctctcttttttttgagacggagtctcgctctgttgcccaagctggagtgcagtggggccatctcggctcactgcaagctccacctcccaggttcatgccattctcctgcctcagcctcccgagtagctgggactacaggcgcctgctaccacacccggctaattttttgtattttttagtagagacagggtttcaccgtattagccaggatgtttctcaatcttctgatctcgtgatccgcccgccttgaactcccaaagtgctgggattacaggcgtgagccaccgcgcctggccagcataatgtttttgaggctgctggttcctttaaaaattatccattttgaatgagcttgtataaaggtagttgaaataaagggtccctctttctattcaacgttaaatatcagggatcattttcttgtttatttttaatttttattttcttttttgagaaggagtctcactctgttgcccaggctgaagtgcagtgtcacaatctcggctcactgcaacatccacctcctggattcaagtgattctcctgcctcagcctcccaagtagctgggattacaggtgcatgccaccatgcccaggtaatttttatatattttttttcttttagtagagatggggtttcaccatgttgtccaggctggtctagaactcctgacctcaagtgatctgccttccttggcctcccaaagtgctgggattgcaggcgtaagccaccatgcccagcctggtcattttctttgtattgttttttccagcagttctgtcagcttccaccaccccggaagatgttaaccacccaaccatatcatcaggtaggtcaatgagctgctagttaaaacaacaaaaatgggtgtgatgcattgatgaaaggttgaattgttgtttagggccaggggagatatactaccaaggaatctaaggaccatgtgtgtaatgcccaatgtcacttgcagcaccacatttgaagctccatgaggcaaggcttttatctgtcttgcttgttactgtatccctagcccctatcccaatgcttaatatattatagacacacaataaatgtttattgaaagaataaacaaatgtgcaggtgttgcatggtgggcaggctgttggacccctcttgaggcagctttggcctcagccaagaacaatcctggtagacagtgtatagtggaggcaaatctctccactcaagagacacaggtatcactctgagaaacaccagcagcccctatttgtacaaatatcctgcctcaaagagaagttagtatcatagcaaactagtgaagtcagatctaacaaatatttatatttttcagtgtcagcagataatgaaaagttaccaactaccctagcaggtaagcaatgattctatcattcatcctgtggatgggaggccttaccatccagaggggacatccaggcaggtggatcactaggttgtgtgatgtcttccatggggtcatctaagataatcagcatccttatgaatgcaatgatttttacaaacttttcccaattcatcaatgacttattttactactgctgagtgcctcctgcagaacctggggctgatgcagagttaaaggggggagtcatatgggtatttggggacagcagggtcacactgaggagcttaacctgaacttgactccaacctcatcagaagaaatctggcagctcattggcagcttgtggctagtccaaatgctttggttaaggtgtggcatggctgggggtgcttcaccagctgctagttgagttcttatctgatctattctgtgttcagccggtcctaacccccatttccatgttgttccagtgctacctgtggctgactcagcatctgccagccgtagggccaacgtgcctgggcccagcccttcaggtgagcaaccttcctgaggatacctttttgctctccaaaccacagagtgaaggtgggctcatcccaatgagggaggagcctgggggagcagcaccgtttgcagcctctttggcgtaaaggggaagcacaatcctgagaggacctcgacctccaggactggggccgattcattgggcctcccagacagcatcctcacttgctgctgttccagggaaacattttaaagttcagaaaatacagagaataagaaagcgaataaccatgcctgtcttatctaaatatgaccgatgcttgcatttggttatattggttttcctgtcctatcaatcaagaaataaaacatggttaaatttgaagctcccaatagtcctcagtctcagtcttttctctgtccttcctcacaaacactcttaaattttgtgtatatcctaacctatgtgcttgtgccaccaagcaagactaagcatccaccttaagaattagatatctttttgttgtaacctatttttaacctgttaaaggtagctttttatcaatgttgagtgtgtttcctttgacaccagctattgagttagtattttcatcatccatatccatataatgataataattctaaaagtaaatattcgtaagacttgtctttatatcttacatatttttatgtttaaatatactaaaaataagacttaaaagaaaagtataataatctgctttatgagttaattaaatgactatatttgacaacctttattccaggaaagggctgttaagtattagtaatgctccccttgtgcatgctttatgatgttcacaggtattttacacacactgaaacactgcaggacttatcagagccctttctctactagtggacacgagcattctgtaagaggggactatgttataccaggttttcctagctttacctgactgcaaagctcctactgctcactgagattgggactagtgtctacaaaaatgagtttaaataatgctgaactccaagtgcttagaacatgccattaatagttgttaaatacctaatcaaactgttttaagtgaccttatccccttgagtaattaagtttccttatgacctttgggccccgactctcatcctgatgattctgttaaacaatacatcctaagggtaagaacttttctttctccctccctctgcctgaaatgcccccatttccatcatgtccagattgtgtctccctgtgaaatcctatgcttgcttctgggcccggttgtagaaggactttcctgagctccaccatcagcggagtcttttctctgcctcagagtatcatttgcatacttttctagcattttacctcttctgttattaatagcagagctatctggatgtttctactagtccccaacttaattacaaacctattgtttgcagggactcttatttcagtaaacaaattgcatattctacaggtcctatttgattgactaaacatccttactaacagaagtgatgcaaaacattattaatgttgggtagatagcttactacacagtagtgggtttgagaaacttaactttgtggttttttaatgtcttagtttgataaacaattcaacttaacattagctggttggtgcaagggttctcgactgtggcaggagctgaaagaagactcagtcaccacagcagtcccgcctctacacttgaattcctaggtttagtgcagtgagacgagcactggcacaagtcaactaaacaactcgattactcacagacaggcagcagggatcctcagaagcctaggaccatggggaggtggtcccccaaggataaggaaagctgcccagggtggatggagtctcatctgcatgtgctccacttcacaacacagcgagggaccctgaaagcattccactcagggtttgatattgctgggggccacttggctcatgttgcagagcatactgttctaggaggagcatccggctctaggatgaggacaaagcccaagctgtcccagacagttccttcttgtcccaggatattgcagtctcagcacattctgcagttattctgagaactatagcaggaggggtgcagacctgggctggccaaggccattaaggacttgttcttctgcagttggccctggcatgaaatcaggacagctctgtaggaccagtttcttttatggtaagaaatgccctgaatacagaatcctcaaggtaacagagatgatggagacttagatgaaaacataattttccaaataagatggctattaagctgtgggttgaattcttgaagaaattttcactattttttatttatattttttaatgttacattgttatttataatgacttttttgttgttccatatagttggggtcacttcggagacttcactggccataacccctgtgtcctccacacttccatcaacaggtaaagacttgcctgggaaaccaggagatatggatgctgaggtccccagcatcagtccaagctaggtgaaaaggcatagggtcactttgggaggtagctctgtataatagaaagagctgtaaattctttcactttcaaggtgtgtgatcttgagcaatttaggtgttctacctgagtcagtttccttttctaaatcaggtgcagtaccccttttcagcatggtggttgaataccttaaaaaatgagagaactaatatacaagaagtgaatggttgaattctaggcacatgtttatgtttagctctctccaatatcataaattcacaaattatagttctgagagtcgatgtattagaaaatcttaacgccaatatggttatgaacattctggatatcaggaagtaactattacctgtaaacgtgcagttaagccttgtatgcgttgccataaatctctttatattttacgtatctctgtccatgagtttcgtagaataaaattactttatgaataatatggccttgtatgggatccttccagaaacttctaatatagaatggatccttacaaacccatggatccttccagaaacttctaatatagaattcaagataaaaccacctttttctgaggggaggcttataacaaagattggtcatttgaaactgaaggtgattatgtcttgctgtcctggccacatgtgcaacacaagcttatgtgataaacagacttagatccaaaaaggatgagagaaatatctctgtcaccagaggccagtcccagtacttctcctctttgtgccttcccagtagcctggatggaggtgaggctgctgaatggcacagggaggtgctcaggccgcgtggaggttcttgtccagggcacatggaggaccgtgtgttgcgtgacgacctctggaatctggccaaggccactgtcgtgtgccgccagctacagtgtggacgggctgtggcagccccaacaggggctcacttcggggcaggctctgggaaaatcctgctggatgacgtgcagtgtgtggggagcgagagccacctggggcagtgcgtgcatgggggccgggccaggcacaactgtgggcacctggaggatgccagtgtcatctgttcaggtgagggctgtcacctcccaggacttcactattgtcacaggcagccaacactaatagaaactactggacaatacattataaataacctcatagattttgatctcttgattagatgctgatggttctccagcccccacccgcaccacaggggctgaagcagcttctatattggacatgctcccagataggtctaatctttgggtagtttgctttgagtatacttttctttctaaaagtcgttttattaagtcatggtagagctcctccagggctagagtcctctagtcctcttccacttcacagtcggagggacctgttcatgacaagtctggagataagaataaacaaataatggagatatttaggcagtggaatatttgttgcatcaaataaatcccattagaatttctcaatgattttttgccaagagttattgttagaaaatatcaattgttcccaaataattcatgagctctaatctaattcatgaaaccctaggattgtctgcactggtgtgaggctgttacctctcctggatgtcaccgcttctgtgtcttttcagaaatattcaactcatattctcggaagtcatttagcataatattgtaatagcactgtaaaccatagcatgttgatttctttgatcatcaggtgctggcaattcatcaggtcccactccaaccacagattctgaagctgccacgccatcatacacaccatcaggttggtccaatctttgcttggttctttcgcattgtagctttcctccatagaatgtctctttcttaagccaagatggcagggcctttgtactgcacaacttccagggctccaccttgctagaacgcattgcgcattgcatcctcatgcacatggtcacatgccatgagggaatggtggtccctggggtcatggagctaggtggtcctacatggttgagtcactctagggttaagatagttaacaatcattccacatcacagcacaccatacagaggggcacagagcagaagggaaacaagtttctcattcattccatcacctagatttcttaaataattcctgaacttgcccaaactatgcctgtgcattggaaattttagttgtctccaaatggtttaggagctcagtcaattgaaacaaaataagttaggattggattaatatcccccaagagatacatatagtgttcagaccaggtattaaaaaactgcttatagattcccaaattggtaaatatttgcatcattattatgtagcatcctcttaattttgagaatctgaaaaaagcagaaataagtggttagaagaggatgcaggaaacaaaaacacattgttcctccctctgtagatatttgataggagagcaatgaagcccattccctccagcacacgataacatggacaacagaacagaacgatggttagtgaaattcccacggtgggggccacacactcacagtagtaccttcttggcccagaccagagctgactgccagctgcttcactttcaggaaaaaactctgtacatttctttctttttttttttttttttgagacagagtctcactctgtcacccaggttggagtgcagtggtgtgatctcggctcactgcaacatccacctcctgggttcaaatgattctcctgcctcagtttctcaagtggctgggactacaggcgcctgccaccatgcttggctaatttttgtatttttagtagagacagggcttccccatgttggccaggctggtctcaaactcctgacctcaggtgatccacccacctcggcctcccatagtgctgagattacaggcgtgatccaccgcaccccgtcaactctgtacatttctgacatattaagattgattttacattgtattatatgaccaactgaaaaaaatgaattacatgattatttctttttctactccaacccactttaaacaaccagtttgatgatttaaccacttctggacagtctactcccaaactattttaaatgatcacaataatagagagggtattcaatcgttttgatttacatacatatataaagactattatgaaaagtatcaaactcactgacagatgctgaaaatagtacaatgagccccagtgtatcaactactgagttttatgaaatcctaatatttgccctaattgtttgagatcctttttaaaaagaaacaacacaatacctgactgctatttaggagttaataagatgaaaagaggtgtcttaatgctccgtgaaagcctcacgtggcttagctactcagagtccagatacagccaccaaagatctagatggaaaccaaaacattcggccatttcattgactgccatatccatggattgctccaaaaagaaaaagaggaaaccatccacaaatggttttgtgggcacttcacaagctacagtgtacaaaccaatggtgtgtcctcaaagtattagcacttttcatttcactgtggcatctgatatctagtgttgaatgaggtggcaggaaggagatacaggggccaccagaaccctgatgggacacctttggaaccagaagttctctttgggcttatagtcagaagttcacactcccatgtatagccaggaggtgtctagcagtgaacaagggctctctttgttttgcattcacaggtcaagcactgtcattaactaccacagagcccactgtgcttcccccaactcctccaacaggtcagttggcatttgttttatggagaaagggaaccatgtgcccagcactggcctggtgccttcccagagctgaagccacgctaagtgctaaccatactcctgcaaattctccttgcctctggaggagctgagtcaggaactgatgctgcatatttgactgtgaccttcaggccatgtgtattttctttttttaattttttttttttgagacggagtctcgctctgtcacccaggctagagtgcagcggtgtgatctcgactcactgcaagctccgcctcccaggttcacaccattctcctgcctcagcctcctgagtagctgggactacaggcacctgccaccacacccagctaatttttttttttttttttttgtatttttagtaaagactgggtttcaccatgttagccaggttggtgtcgatctcctgacctcatgatccacccgcctcggcctcccaaagtcctgggattacaggcgtgagccaccacagctggcccaggccgtgtgtatcttcaaacttttgtctttctaaagttggttttaggggatgtcctaacaattaggtctgcttctgtttgtccctgtgacaggtgctgggttatctgcaaccatagccacaacagagcctgtgtccctgccatccacacccatgcccctggcaggtaagtgcttgggaaaatgggggaaggagctcacacttatgaaacaaccataatatgataagcaaagaatcagacgctgtcactagtctatgctcaaaccacctacaagtgttacccttccccccacctcacctcactgtttcataaaatgagacacagaaaattttcctagtgtcacccgactagaatgtggtagagccaagatttgggcacaaatatgtctgactccaaacccatatgactctgcttagccagttacctttcatggtgggacagtattctccaaagctacctttgggctaatgggaagagaacatgcttgcaagcctaattgctatgtcccaggtacatcaagactataactaggaaatcagagagtcggctgcgagttgtcacctactctatagcttttaatataaaattcctaatttatattttccactgtaataattaggcaagacttatccttttagtttacctgatactgtatatcaggtgtaaacccaaatcccagttctttccttctaggtgggcaggaaacatctatacatctgctttacaaagaaagaaagtttgttgtagcattctgacactttaagcctggttctgcagtaactcacatcagtagtaactcaatttgtctaggccaagcctaatggtgtgtgtgcatgtctgtgttttgaataaatactatggtggaagtttaaggctgtgtagatgtactaagctagccttacagtcattctgctacctcctcaaaaaacactacacagcaggcagaggtctctcctctgtttcaggccttcacttgggccactttttgacattctgggcccctaggaacttttgccttcagggacccctacctccgttaaaaaaaaagtatatttatatacacacagatatgtatgtgtatcttctattttatggttgtgttggtataaagactatattgtagtcatttcttctgattttaaaacaaatgaaggcaggtttgggagcccttaaaagtcacgtggaccccagtcactgtgcctgccacatctgattgaggcatctgtcctgctcttctgtgttcttccaagtaatgaacacgtgcagacccgctagactccagcaccacaaggacatttcgggaggaagaatacgatgcatttcccctgatttgagactgcttcaaatcagggtgtgggggaggattctgatttatttcataacctcctcggggtagaaccgatggactgtggtaagagctgtcctaaccttatgccctccttagggctaagccataggcagtctgccctgtcgatagtgctgcacagagagctggccccattttcagacacaggttgctcgcaggagctttgttgagaaaagaggttcattttttatgcatagttcctggcagggttgagttgagaacagtagttaatggtcacactgaataatgcaagtaggagtgggttgtttatgaaatggaggctgctggctcagaagaactggagcctgtaaaggggggattgacctagaatctctcggaaaaccttcccttcccttctgagcataatctacttatgattatcataacgactcacatttccactacatttttcctcacatatattttctaacttggtctcaaaacaacccatatgttagatatgaaaaatatttctgcattggattattgacgttatgtaatattgtattgtattgtactaccactcctattttgtaagctagagcactgttaatataatgagacacagactctcaaactttttgtttaagaaatctaatggagtagtaggttctattttttacttctcctgttggcttaagaaaaaagcctcaccagtgtttctagaaaattctagaacacagaatgtcaatataaatatcatgatcagggcactgaattactaaataaaacaaccatcagaattccagatttttgagaggtttaacaattactttcactagacatagaaataatctgagatgatttctcctttgttttctccatcctatcactgattaaagcccttaaggtgtaaactcttccttatagagccttgcacataataggcattaagtgaatattctgtggtttaaagtataactgtgttggcagcaaagaaaagaaatgtctttagtgctagaaagaatgcgctgtaatctccagtctgggacattcccccatagcaaggcgacttccacagaaagactagcaagcgtccactggggcatggctgagaggactccccccccaggtcaggggtcctctggagttcttgtgccatgtgtaggcttaggcgacatgtgtaagttgggagcccagggatctagcattacctctctagatgtctaatgcaactgctcaccagggtcttctggcctccttgaggcacttccagggagtaggagttccagcccagattttccaagacccatagaaatttctgtctgcctaacccagaggaaatacccttttagttacacataaaggtagaataagcacttctctccctcaaaccttattctcttccttgatctcaggtctttgaaaccaaagccagaacatcctacaggctatatcagctctctactctgtatgtaacctgaggcacagggctcagcttgagagaaggaaggagaagggtaacttcagggagggaaatacatataaaaaagttcactggccttagaaagctgtacaaaatactaatcaaactacccagttccaattcacattgccactttggccctgagaaagctaacttggactttctgagtctcactttcttcatgtgaaaaacagaggtaataatagacccaaaagagagatgtaatggtcaaataagatcaagcttataaagaacctaggatggcacctgctattggtaatcacccatgaaatgtgagtggtagaatttatgattattattcttactattattcttcctatgaaataatatcatatggaagatataagtattatgacatcagcaatatatcagcacaacataataagactaaggcaatgtcctgacaccaaaggccactccccagtgtccctacttcttgtgcctccccaggagcctggatggaggtgaggctgctgaacggcacaggaaggtgctcaggccgtgtggaagttctcgtccagggcacgtgggggaccgtgtgtgatgatctctgggacctggctgaggccactgtcgtgtgccgccagctgcagtgtggccaggctgtggcagcccccacaggggcccactttcgggcaggctctgggaagatcttactggatgacatgcagtgtgtgggcagtgagagccatctgggtcaatgcatgcgtggggaccaggccaggcacaactgtgggcacctggaggatgccagtgtcatctgcacaggtaaggggctgttttcttaacaagaagtcacttctttgttttcccttcgaataatacttaatgattgattttactaagcattatattataaatggcactgtaaatgttagcatgttgatttttcttttgatcatcaggtgctggcaattcaccaggtctcgctccaaccacagagcctgaagctgtcacttcatcatacacaccatcaggttggttcaatctttgccaaagcaaaagaaccaagcaaagatttctgtctcttgcataagccaggatagcacggcctgatagagcatggtgttacttttaacctatctgtgtctttaaatttatttatttatttattgagatggagtcttgctctgttgtccagactggagtgcagcagcgtgaactcagctcactgcaacctctgcctcccgggttcaagcagttctcttgcttcagcctcccgagcagctgggactacaggtgcacaccacaacgcctggctaattttttgtattgttagtagagatggggttttgccatttagctagctggtctcgaagtcctggcctcaagtgatccactcatttcagcctcccaaattgctgggattacaggcatgagccactgcacccagccatatctttaaatttaaagtagagttcttttaggtaggatatacttgggttttgcttattaaaaaccctatttgaaatctctgccttttatttgtggtgtttagaccatttatatttaatatgatgactggcagatacagcttactaattatccattgttgtataacaaattacacaaaatttttattttagaatgacagatatttattagctcagttcctgtgggtcacatatcttattagcttagctgggtggtcctggctcagggtctttcatgaggttatagtcaagcagtcggccagcggtacagttaagaataggcttttttctgagctcactcacatggtttattggtgtcttctattcctcatgtgctcttttacttaggacttgagtttcttgatggcttctaactgtaggcttctctgaattccttgccccatgggcctgtccatagggccatgaacaaaatagaggctgacttccaccatagcaagtgatgagagagagacagagagagagctcaagacaggacccacagtcttataattcaatctcagaagtgacaagtcataatttttgctctatactattgatcaaaagtaagttattaagtccaatccaaaacacagggagggaaatcaaaccctagctcttgaaggaaggaatatcaaataatttatgagtatattttaaaaatcaccactgttaagtttaaatctaccattgtgatatttgtttaaatttaccattttgccagttgttttctattcattctacctgttcttttttaccacgtttttgtcttctttttttggaatttattgttccattttgtctacttttttgtctgctaggtataattgcattttaagtggttactttaggatttataataaacatcttttctatgtggcatcctgtttcttctgcctgaaagactacctttaatacatcctgtagtgagggtctactggtgacaaattatttcaccttttctgtgcctgaaagcatctttatgtcatcttcatttttttaaagataattttcctgggtatagaaatctaggttgacctttttgtttcaatgctttaaatatgttatttcactgttgtcagaatttcattctttctgtcaagaagtctattgtcattatcaccttttttctctgtatacaatgtttcatttctggctgcttttaagatattctatttatatgaattctaatctatttggttataacgtaccttgggatagttttcttcatgtttcttctggttagaggtcattgacgttcatgaatctgtggttcacagggtttttttgaatcaaatttagaagtttatctcttcaaatattttgttcccatcttttcttctctcctttatgaactccaattaaacatacattaggttacttgaagttgtctcacaattccctggtgctctgctcattttttttttagtttttttttttccccatggcatttagctttggatatgtcttcaagttcacttacttttttctctgcagtatctaatctgctgttaatcatatccagtgtatttttcatctcaggcattattgttttcttcttgagaagtttaatttgggtcttttttatatcttccatatctatacttttcatgttccatctttcctctaccttcttgattgtatgatataattattgttttcattctctagtgtaaaaattatattatttttaccatttattggtctgtttccactgatttattcttcccatcatgggtcatagttttctgtttctttacagccttggcaattttctattggatgccagatgttgccatttaccattttgagtatgagttattgtttattttcaatcttactttaaatcactcaagttacttggaaacagtttggtccatttaagccttgtgattaagttttgtcaggcaagagtagagagaactttagtatggagctaattttccccactactgggaaatacccttctgattaccataccgaatgcctcatgtattgcctggtttcactctggctggtaggaaaaggaactattcccatccctgtgcaatcaccaaagattgttccctctactccttttaggcagttcttaccttggtcttagatatttgctccacacacgtctgctgattagtacttagataaaaacttgagagagactctctgaaaatctctggagctctctctgtaggcagagaggtgagcaacctccagtacttcccagtgaactctagccactttgttttccctgaattttcagatctatcttttgaaggagtctgccaggatccacctgggttcctcttcactctgttgtgctctggaactctaattaataacctagggtaattataggactccccatgctcattcactctctcttagtgattgctctcctgtgctgcctgttgtccaagatcagaaagccataatttaatgtattttttctgatttcttagttgtagaatggtaaatctgtacccaattatggtagttttctgttgctgccataacaaactgctacaaacttagcagctctaaacattatcaatgcgtcatttttataattctgtaagtcataagtccagcgggcttagctgttctgtttcaagtcttgaaaggaaaaattaagatgccagtagaaatctgaaggagaatctatttccaggcttattggggttgttggcagaattcagttacatgcagttgtacaactgaggtccctgtttccctgctgactgctgggtgggggttgttctcagattttagaaaccactcacattccctagctcatgaccccttcatcttaaagcttgcatcagtgagtcaagtcattttcatgctttttaaatatctcctgcctcttcttctgccatacctctctatttcagccagaaaagattctctgcttgtaagagagaattagattggatgcacccagaaaatccaagataatctcccattttgtgacctgtcaccttaatcacatctgcaaagtctcttctgccatatcatgtaacctatttgcagattccagggagtaaaacatagacagcttaaggaagtcaatatttaacctcccacaccagttactacatctgagatggaaatcgaagtcagtttattttattataaaatgtattaaaaccaatgaatacgtcaagaatagtgtaatgaacaattgaatactcactagtagattctatcaaatattaatatttattataattattttagatttttaataaaacaatacagtaattaaatgatattttatgagttaataggatacaaatggaggcttattttgttatgtgagcctcccatggtttaagctactaagagttcaaataaattcagcaaacatctagaaataaaccaaaagctttagccatttaactaaatatatctggtttgttcctaaaaggaatttttcctttcagaatttattttatgggtgtttaaagggttagaatgtgctaactaggtgagagttctaaacgtactggattttccatcccattatgctctaactagcgatagatgaatgtggtagagaagggagagtggatgatcctccctacctgaatctgcctcttggggagccaaccaaaacactgactggacacatttgagcccagtcattctctttgggcttgttgtcagaagttttcccttctgtgtgtagctaggaggtatctagcagtgaacaaggcctctctttgttttatactcacaggtcaagcactgttattagctgtgcccaccacaaagcctgctgtgcttccctcaaccccctttccaacaggtcagttggcatttgttctgtggggaatggggaaagggaaccgtgttccaagccctagcttgtcccttcccagatctaaagccacactgggtgtgatcatactcctgcaaattctccttgcctctgagaagctaactcaggagctgatgctgcctatttgacggtgaccttcaggctgtgtctattttcaaatcttcatctttctaaagttgggtttagaggatgttctaactattagggatgcttctgtttgtccttatgacaggtgatggattatctgcaaccatagccacgacagccatgaccctgccatccacacccatgcccccagcaggtaagtcttttggaaaatgggtgaagtagctaacatttatgaaacaaccatgatgtgataagcagagaagtagatgctttcacttaactaacatctcattttatgctcacacaaacctacaagtaaagttactcctgacccaccctcatttttttacatagaaagacagaggaaaattaatttacctaggattaattgactagaaaatggtagagtaaggatttgagcacatactctcaggtcccaatcccatatacctctacttggccaaagcttctgagggagacaatgctagagggacagaaacttccggcagacctaattgctaagacccagatacatcaagaccttaattcagaaattgtaaagtctgatgtctttcagatcgtctgtgtgttgtcttttgttttctctgaaaccttttaggacctttctctgttcttgtgtcttgagcttccatgatgttttaccttggtctgagtcttttttcacacattattctacatactccatttaagcttttagtctagagatgcatattcctcagttctcgcaaattttcttgaattatttgtttgataatttcctcttgtctgttttccgccttgaaatcccttagacagatgttggatttcctatattgatcagctaaattttgtaatttatttgtttttaattttgcattttaagatcttttgctgtgtattaaagttttattcaacattatcctttaagtgtttggtttttaaagaaaattcagccattgtattttttaatttccaagtgcattttcttattgcctggcttttcctttttcataactttctgttcttgtttcacagatgcagtaccttttctaactgtctcagtatacgtattataactctactcaaaacttttttctccttttgttgtccctgtttcttttctctgtttttctagttgttctaatttatgcctcttaggctggatacttttcttaaagatccaggcattcctggctatctgtttgcatttaagaatgaggcactaaggagctgatgcaagttaggtgatgtctctctgctggttttccagcagcagaatggggaaagacagctaacacgtccagatctcagctctaccctcagttcacctgatgtctgcaagaatggaccttcgggatttaatttctccagagaataaattccctggctgtgagcggggaaaaaaataaaaaacccttctacagattttcaaccaacaaccctttttagcatggtagtgattgaccagtattggaaaccaggtgagttattagaagagtcagtggtcgtgtccttaaaacacaaatccatgcaaagatactatttaaaagcagcttgtttatagttttatcatggaatagatgggactataaagctgtttagatcatttgtcttgcatgttgtagttttgtataatacaacttatctgttttacaaattagtttacttcattctgcaaattatggtgcctgtttctgttggggtgatcagacctgacaccaggccgtgggggctacagagtccagcagagtcaaaggaatgagaaaagacaggttaagagtacataaggtgggtccagggggccagtgctggtatggaggctgcaaaggcccccaagctctgggagcctacactatttactggtgatcaacaaagaaacagatggtgaggacgtgcggatgtgggggtagaaaggtagtggtgcatcaagtgtagctgtgtcggtttcgcattttctttgatgcatatagctgcttgagatgatggagaacatgtttacgagcctgggagagcaaccaataagtctgtgcacattccagaggccatgaggggttttatgccctgagccctggattccatccaagccacgaggggttttatgccctgggcttagatttgtggtgtggcagggcagccttccaccctttggcacagagcttggtgttccaaaggccacaaggagttttagaccctggaccctggacatcttctaagactcttatattatgacagacaagccagtcctgcctcagctcttctaccaacatgtttcattcctcagtagcaagtaaagtctcattttcttaatttaaaatttaaagttccatattggaatgcttgtgttcaaatttgagaaggccacatagaaatgtatgaccttgagcagattacttgaactccctgagttgcagtttctttattagcaaaaaggaaaaaataattaaagcaatatcaaagactcattgtgagggtcaagtaagattaaacttgtaaagcactcttatggtgtctataaggtggtaaaccctatgaaatattagtattgttattatcattatcatgactattttgtggtatatgaaagatattaatatatatataactagtagtataagagctcaatataacaggatcaaggcaatatcctgacacaaggagcccagtccccagtccccttccccttgtgcccccacaaagaacctggagggaggtgaggctgctgaatggcatgaggagatgctcaagccttgtggaggctctcatttagggcacacaggggaccgcatgtggtgatctctgagatctggctgaggccaccattgtgtgccaccagctgcaatatggccaggctatggcagcccgcataagggcccacttttggtcaggctccaggaagatcctgctagatgactttcagcatgtgggcagtgagagccacctggggcagtgtgtgaacaggagctggaccaggcacaattgtgggcacctggagaatgccagcatcatctgcacaagtgaaggaatggctctcagtcctcacttagatgtaaaatattattccccaggatctttctacagaattggcagtgctgcagatagctcacacatgagagtatatagatgatagatgttctctctttactggtaggtgccaagtcttcaatcacttctccaacaggtaggaccaacttccctttgttaactagatgaaacacttgtggatattttctactgatcttaaccaagagccaaagatcacctcctacctcatcttacaagtcttctttctagttcatcttgcaagatatccagctgacctccctgaggaaagcaatgtactctgcgattgcctccacagagccttcttaacctgcaggctcaaactgcagggactggcatgcacagcttcttacgaacaaagagcagcatccaagctccctaagtggtacaagcctgcaggaacctctgtacatcaggaaagaaaataaaagtcaccttgaatatattagtcctcgtctgtgttaggactagttccattttcttgccctttactgcatatgtgagttgaaaggtatagaagaatgatcaacatcacctttctttggcatctgtaacacctgaattgctagcttccaggcaatgaaaccacatcattaacacgtgattgaacctagttagtcaatttaagaaaataatactctgtgattcaggacacttgatatttacaaactgccaccatacacgtgatttaatttgatcctcacaatatccagtgaagttgccaacacagagactatctccatttctcagatgataaaactaaggctcaaagaagcaaaagagctttatttgtttttcttacatcttatctgctgtactcctttagaaaacatattgacacatagtagttgttcagtaaatggtgccaatgtttatcccggtatttcaaacatccaactacctgacatggaattgaaaaatgggaagtcgatacaagccatgcaacatttatgcttggtaataaatcatcaggctgattgctgccagattctaaaccacatgttcaaataagtgtgatatcagtcttctgagaaatgtcacacagataataaagtcagtactttcatatttttcacctggggacactttctgtccatagtacttcactcctgagataatttggctaataaacaccaatcatggtggtccctgatgtgtgtctttgtacagaatcaaagacatataaagtttaaatttggatggatacttaagaacgtacagcaaaaattctgagtttaatttcctccttattcccatatttttacatcagaaaagaagacaaaatgagcaataaaaatgtagacttcatacagttaccttattttacctgaatcttgtttcagtaagaaatgagctggttagggttaggatctttgaaaacaagtagacctggcttcatatcccagttcagacacttccaagcactgagcttctgggcaagcaactcactctccctgagtcttggtttctgcatttgtaaaataggaggaaatagtccatcccttacttggtggtcaagaagttaaaacaaggtcacccaggcagagcatttgacctagtgtctggcaaagagatagcatatgataaatgcgatcctagctaccgtcttgttttgtctccgttacagctcctgagtcatttgctgctcctggggcaacaaaacccacaatttatggtaagcccctaccacaaggcacacaaacacctggacttaaagtgctagagcattgggctggagaggactttcatgaacatctggtctacctcttctgacctcaccctacccccatgtccccaacatcagcctgaacccattgagtgtctgagtcctctctgcaatatctgcccaagtcatagactgtgagacatctgtatattgcacttgaatgttatcacttagctaagtgaaatacctaaaagagtagttagggattacataggttactatatgtaaagttcttagcaaccagtcccctgactatcctggcgcgtgtgtgcatattcacacacacatacacacacacacgtgcgcacagagacaaacttaattattccattcactgaggtagtcagatttttaccatggccatttagtgagcacttacacatgtgccaggcgtggtgagagagcacagaaagaagtcagacacagggacagcagcagcagcaatggcacctaacattaactgagtacttactatgcaccaggccctatgtcaagcttatatcatgcattatcttatttgttcctcttggttattattcctgttttacaagctaggcacctgaggcttagggagcttgcataacttgtcctgttctaactctaaaactgatgctcttacccactccatctgttggtccctgccccaaatgtgtctattatccagtaaggatgtcagacacacactaggccaccaccatcaatgtagatgatgggaagtgccatgaaaggtatacagaacatagaagggagaggattacaactgggggattccaggaagggtcgatggaggtggcaaggggaggagagctgtaggatggatagaattttagcctgtggtcctggggatagcaacagcttctaggagcaaagagaaggacaatgcttgaaggaacgatttacagccaggggtcctgtaagtaccttgtgagggtgcttgaggtgcatgcatcccatcacactcacaggagaccccacagctcattggttattccgtgtcttcctctgaataggcaggaaagaggtaatctaggatttgactttgctgcgttgattatctgttggacactctcattttacccatattcctcagatcttaaaggacatatgagcacagggagggcccctgagccttaagtcttgagttcgttccacaggtatcattggtctgactataactcaattcctaccatgttttctcacttgtcccagagaacaagagtggtaatattcattaaacactgattatgcacatgctatgctatgttagcattttatatgcattaccccatttagtcctcagagcaactctactaaatgagcattattgctatcaccatgtttgcagaggagaaatcaggcaggaagaggaacttgcccaggaccacaccacacagttagaaagcaatgggtgtggaatgcaaatgcaggcagtctgactccagagtccagggagtcatgtctaagctgaactgattccctatgggaggagaaaagaggagaatttctgcccaccagcatttcactctggtgggcagctgctgccatttcagggaaacaggcagcccagcaacttggataacctcagggagaaagcgtttttatatcaaaggcaccaacatcttctaaaattccaccatcagttaccagctgcaggagcctgcatggaggtgaggctgctgaatggcacagggaggtgcttaggccgcgtggaggttctcatccagggcacgtgggggacggtgtgtgaccacttctggaacctggccgaggccgccgttgtgtgccgccagctgcaatgtggccaggccatggcagcccacttcggggcaagctctgggaaagtcctgctggatgacatgcagtgtgtgggcagcaagagccacctggggcggtgcgtgcacaggggctgggccaggcacaactgtgggcacctggaggatgccagtgtcatctgtgcaggtgagggtctggttgtcaatcttcatttggagggctgcttctagttccttcactcctctctcctctacacacacaaaccacaccccacagcttagtccaggaacatagtggagccaggcaggtaactggtactgcctacagcctttcaaagttctacataagcctgaccatctccttgactgcaatgatctgtaagtatgactcacaggctgcacccaggctcagaggtaaacctcttcagtttgaaaatcaggatgaacatgaatttaaaaatcaaaacatttgacgtaaaaattcaaattcttacatgttgtaacaataaataagtgaaagcagaatttcaggcacagaacaatgcatcctttcactacattaactggctggatctgagaaagagctgttcctttggacatggaatatctttgcagttttcacagcacacacctccccgccactctatttagcttacctgcatgatcctcagaaacttttgagcttgtggcatccaggtaacaagccaaaacaatcagctggtgttcaggacctccatgttcctagcctaccaaggttcccacaccaatctgtccccctggtcctccctagtcttttctggtcctctcctgcttgcagctggaataatgtctctatgaatgacaagctctgcaggttgaatctggctcatcctgagccacatcccctctgtggagtatggggccttcctcagcacctgaggcccctggggaagtactggctatcctgggacagtcaacatttgctgcccaatgtcctgtctcaaatcctcaggaaatgccaaaatcctcaagagcaaagcctctgcctctttctcctttccattgccctaagctccctaaatgtaggaagttcccaataaacctttgccaatgaagacaagataacatgcacaattcttctttatgttgacaggtgctgattccacagctgctctgcctacaggtaggactgcatgtcacattcagtgtcaaatactagacttaccctgatgtaaaaaagattgtgaggtttagaatcagatctttatttgattcccagcatcatttattcatgcaacagatattggctgggtgtctaccctgtgccaacttctgtgccaagcactggggatggggatacagcggtggtcaaaactgccctgtttcttcttcttctcttcttttttttttttttattttgagatagagtcttgctctgttgcccaggctggagtacagcagtactatctcagcttactgcaacctttctctcccgggttcaagcaattctccctgcctcagcctcccaagtagctgggattacaggtgcccacgaccacgcctggcaaattttcgtgtttttagtagagatggagtttcagcgttggccaggctgctttcaaactcctgacgtcgggcctcctgatctgcccaccttggcctcccaaaatgctgggattataggcatgagccaccacgcctggccccctgtttatttttttaatggggtttatactccaacaggagagatacatgtgatatataatcaccctcagttacataacctcagccaagttatgttatctctcatcctattttcctcttcatggaagtagggacagtaaagagctttgaataagggcatgaatagggcaatgcctaagggtacctgttacccagcagcacttatgcagcaatggctgcttgttttgggcacatgtggacctaaggaagtaggtgtgagggatggtaagggtctggcctgcaggaatttgatccaggctggcctctcactggatgaatgaccttagccttcagtctcctcatcattagaacaggcttgttggattctatgttccctaaaattctaatcctttggctttctgtgactaataaggagagagtaagcagctacatggtctagctacataatgcctgtgccactgtggaaagcaagaaattgttgccaaaaaccagagacataggatttgtaataggaattaagggagacttcctcccctacaacattttattatggaaatttttaaatatacaacaaagtttgaagaatttaacaaggaactcctacctagattccatgatgagtctataaattcatctttcatttctgcattcatacatcgatccatctcattttttattaaagtttgattatataccataaaatgtgcccattttaaggtccagtttggtgaattgtggtaattgtatccagttgtgtaactactaccacagtcaaaaacagttcccatgccgtgcaaggcttcctcatgccaattcagagcagattccaagtcatgacagtggcatatgtagggaggaggcaacagagagagaggtgctggccaatggatggcctctagacagccagccccctggggccaacggcctatgagcttcgcttttgctgattgccacagggtgcacattagttcatccacagtagcaatgtcatgttctgccctaaaaggagacctcagggatctgagctcatgggcctcagaatgccccctcaccattattcctgctgaatcctgggaggggatgggcatccccttgaagcaactgtatcctctccccatgttgtgatgttccctgatgacagtccttcctttttgcccaccactagcccatgagaacctgctccccacatcattggtgatatcagtggctcaacacccaccgtcttctgcaccaccaggtagagctgtgtctttttgtattatgccttctgaaaaacttcattcatttgacaatgatggatagacagagaggcagaacagacagacaagcgggttgagaaacaaacggacaggtaggcagacaggtagatacaaaatcttatcagtattaggggtattccaggagtggatgactaatggcaacttctttgtacttaacagtgagtttttaagaatgcaatttgaataaattacaactgatagtggatggactctgtcatcttcatatacacagaagctccacgttggctcagattaattgggaaaactgaagcagtactttactcattactactagtgactgggcaaaagtcaaagctacagagcccacaactagccagagaaaaacgttctggctgatatcgcgtaagagctctttccaggccaggcgcggtggctcacgcctgtaatcccagcacttgggaggccgcggtgggtggatcatgaggtcaagagagcaagaccatcatggccaacatggtgaaaccccgtctctactcaaaatacaaaaattggctgggcatggtggcgcgtgcctgtagttccagctactcagaaggctgaggcaggagaataacttgaacccaggaggcggagccaagatcatgtgattgcactttagcctggtgacagagtgagactgtgtctaaaaaaaaaaaggaaaaaaaagagctctttccagcaagcccatgtagatggcagaattctcaaaagagatgagaaatgtttcaaaattcagatgcatttatcccttaatttctaagtttgcaaggctttttagactagttgataacttctgatatgtcctaagacataatcacaaagtaatgaccagtaaaatcctttttggaaaaagagtttttttaaaaaaagatgtgaattacaaaattagtaaactgaacaatcaaacaatcgaaattctaaaatatatttctgcatttagaaaaatctcggtgtggtggcattattaccaactcatctggagcgattaggaatcccccacagaatgaaatgcatgacaacatcacttgtgtgtgggaaatcaaggcaaatgcatctgatcatatactgctggcatttccacatcttgagtaagtcataagctgttactaatgtactttgtgtagctttttaactttcttattttgtttttgacagataataattatatatatgtatagggtaggatgtgtgttgtgacacatgtatacattgcagaatgattaagtcagtctaattaacatacccattgcctcacatacttaccatttctttgtgaaaagaacagttaaattctacttttctagcaattttggaacatacaatacattaccattgctaactacagtcaccatgacatgcaatgtatctgttaaacttattcctcctatctaactgaaactttgtaccctttgaccaaattctgtctctccatgcacctccacccttacccccaggctctgttaaccatcattctaccctctatttttatgagtttagctttctagattctgcctaaaagtgagatcatgcagtgtttgtctttccatgcctggcatatttcacttaacataatgtcctctagattcacccatgttgcaaatgacagaacatccttcttttttgaggctgaatagtattccacaggcatatacaccacatttcctttatccattcatccattgatgaacacatagattgttcccatatcttggctattgtgagtaatactgcagtaagcttgggagtacagatacctttttgacataccgattttaattcctttggatttgtacccagaactgggattgctgaatgatgtggtaggtctatttttagttttttgaggaacgtccaagctgttttccataatggctatactaattgacgtttccatcagcagtgtgtaaagattcccttttctccacatcattgacaacatttatctttcttctctttttataatagccattctgacagctgtggtgatatctcattttggttttaatttgcatttcactcatgattagtaatgttgggcatttttttcatatactcattagccatttctatgtctccttttgagaaatgtccattcatgtcctttgcccattttgtaatagagttatttggtttgttgttgttgttgttgttccaacaactgttgtatcaacagcttgttcctttttgttattgagaagtattccatttgtgtggatgtaccagggttagtttgatcatttccccactgaaggacacttgtgttgtttatagtctttcacttttacaaatcagtcttctatgaatgttcatacacagttttttgtgtgaatataagcttttgtttctctaggataaatcccaagagtacaattgctaggttgtacggtaagtacacatttagctttttaagaacataccaaactattttcctgagtgacgaccattacaaattctcaccaacaacatatgagagatccagtttctccacatctttgatagctagtatggggtattatattttagctatttgtaatttgcatcattcaaatcctatgtatcttttgtgaatttatacttaggtatttcttttattttttattttttggggtgattataaatgacactgtgttttccattttagtgtccacatgtttgttgctagtatagagaaatacaatgatttttatgagttttcatgaatttttaattaaaatgaaattgaccttttattcttcggataagtgtgtgtgcatgagagagaaaaagagcagagaaagagagatagagaaagagagagagagtgtgtgtgtgtgtgtattctggactgctggttacagatataaattctagggtaccccagacgtaataaatcaggaaattttagattttaatgttttaaatggtaattcactgatgacaaattcatggtgaattttttgtggaaatcagcccctacgaacaagttaaattatttattatgcttgaattttgtttaatcgaaatatggcttggaacagatggctcatcagattgaagcatgaaagtggtttttggattctagcactgggaacatctgaacaaaacatcagagtaaaaaacagtagctgacaaaatcagataacttccacagagcaagtggtacccactttcctctgggtgggtctactgccaaacacttgtaaatgcattatttacaacttggaaccacatcctactggcaggcccatgagaagcaagcagcctctcccttttcccgggcccctcaatcaccacatggtgaaactgccttgatttcccaggcccttcccttggccctaggctgtgaagtactctgccatcttgggctgcttccaggagcacatttcgtgccagcctcctctttcctcttccaattaaaatcccattcccttaaagcaatgtctcttagaaaaagtaggatcaaaggaacccatgctatgtttaaatgactgccacgcttttactctatcgccaacatctttgtagtaacaaagtgaagtatctgtctcacagcatgcctcaaatgtcttctaatgaggaaactgagaggcatccatggtgtttgcttccccagccttgactgcaccaatgaatattttgaaatcctggacggtccaccatcctcagtaaagtcattggggaggacctgctctggcttccaacacacctacatctcctcctccagctcaatgaccctcgtgtatttccgaagcttcaacaacctaggataaaacttcattgcttattattactctgcacccaaaggtaagaatagtggtaaagagcaacagttccagagctggactctctggctaggagcgagtcacagtcctatcacttactctgtgaccttgggcaagcaacttgacctctcccagcctcaattcctttcctgcataatggggacaacaaggaacccttactttctaggtttattgtaagggttacatgcaatgaggtaagtaaaacactttgcaaagtgatggcacgtcataaatgcttgataatgggctgctttatcatgagctttttccttttacatgaacatctcatcacagtcagcccattagaaagtcatttctgaagttattctgaatctagtactaggtaggtgttttaggacctgcagaagaaatcatagtctcagcctgagagaggctcatgtacaaccaagaggaagtttaaggcaaacacaaggggtatgcatagaggacaaatagaaacactagaagaaggcaaacaatagaacagataaatatacgagaatatactaaattgacatatgcatgcacctgtgcaaaagacattaggaaagagagagagtgctatataggttacaagtattaaggaaacattgaggggaaacggcttctaaagctggctaggctataggtagagaaagcgagatagcacatcaggtgaggtaacagcatggcctagagataggatatataaagtgtgtggcaagaaggcagatggactaagccaaaggtgcctgttgaagtgctgggtactcagggttaggcaataataacaacaacagtgatcaaaatgctcaaaatatcagctaacatttactgagtccctattacatgccaggcagcattttaagcacttcacatatgctatcctcacacagacccatggttcttccccttttacagatgaggaaactgagacttatgaggttcagtaattatccaaggttctacattattcaccactaaaagaaaacgggcagagctcatgaaactgcaaataactagtatccactttttccaagacattgttcaaaacagtctcttgtattttaccaagtgccaggttgactcactaagcaagctttggaaacatgctataaaacacaaaggagatgctctgtgcaccaaagtagatcatgaaaaatcaccgtaattgatgttaaatggctattgacgatgtatttccttgtacttgcagaggcagtgttgcagaccccacatctaatcagtgagtcacgttcatgctgttactcaaatttcacccctaatttcttcttgtgtcccctctcccagtgcttttactctcattatttgctctgtctctcatagatgattccaaattccctgtataaatcttctgtagatgagagattctgtctgcacagtttctgcacaaatatgatgcccatttacactggaaccaagttatgcctatcaacgattgagtctttgcatattgataattttttatttgatctccttttttgtgtttatcaaagccagtgactcacttaatcagatactcacttttagggaaagttaacaaagcagaagcaagcagaagaaacagctgttttccccaggacactgatagtgaatgtttgcatttttgcatagaatagcacaatctaaatattgttatatttatggtaactgagcagaaaaagagaattttttttttgaccccacatacctgagaaacataaagacacacgtgaaaacagagtttgatttgggagatcacatgttacaaagattacagggaaaaagaatcagccagaatcttggcatttactgaagactgatcccagaatgctgccctcttgacttgcccaagtcgtcccttcttaattatgggagtcttcttgtatccacagccatcccgacagcaacacccagaacagtaacagcaagagcaggtaagccctgaaatgcatttattcatttactgactgtgtcctttcctctcagcacctgcatttgtatcctcacctgtatctgcttcatgcacagaaactggaccaactgcaaatagtgcatctatttgcaaatgggacatttgattctgcccaaacttttagagacattcaaaacttttgggatcttttggctctagcatcccaggatgagtaaacttcattttttggtacctttcagagtcatcaaagcttgagcagcttacaagtactttctagtggggttctatctttccaccttatgaccagtactgatcatggttagctccccatcctcatcaccaatagactttagcaaagtaagtggagtgtcagagccatttcagaggcagtgagatagaatagcagagaaaaaattgtgaactttggaaccaggagaccggactttagatctgctgcttaccagttgtgggattgggagtgaatcactttgcttctccaactttcagtttcctcatagataaaattggtacaccaatactcttctgtttaccttcctgagttatgataaaggtggaggtgaacacacacacacacacacacacaccacactttctaaaatcacaaatcactgtgcaaattatttgtttttctgcacttagccaaaacaaatgggcacatacctctggaaaaatagatactcaattaatggacttttagtgctacagacaatcctaatggctttgcaacttccaactaagaggttgaatagttgaccaagtacaaggttctccactagtagtagtatggggtggggagctcaacactcatgggaagggtgcagtgcccccagaggacaacagtcaccagatctctctctgcaggggactggctggagctgcagctggtgggtggctctggccggtgctcaggacgcgtggagattctccaccagggcgcctggggcaccgtgtgtgatgacctgtgggacctgaacgaagctgaggttgtgtgccggcagcttgggtgtggtcgagccatgtctgcccttggaaaggcccactttggccccggctcaggagacatcttcctggacaacctccagtgcgctggtgtggagcgctacctgggccagtgcacccactcgggctggtcagagcacaactggccaccacgaggatgccagtgtcatctgctcaggtatcttctcccctctaatatgggcactgccagtcctagagtgcttcaaaatctccctgccagtgttcagagtcagcctggaacaaaaacagaatcctcaaacatttagcatttgatttttgctgtagcttttctaacttggttaaatagatgaggttttatccgctagcctccaatataaaacctcgttttctaatttggtagcaagtattaccaaaggtgtgtgtgctttactgaaatatgcaaataacatgtttaatggtgagaattttttaatgatgggaataaggagctcattgaaagaggcagcctgcagtagccaggctaggggagactttagagctaggaagacttgaatctggcttccagagcctgtgctgacacacagactgtatgtgagcaacacttaaactctctcttaaacatattggtaactcttattgccatgtcctcactcaatcaccacaccaaggaaatctgtgcactaacctgacttatttcaattggcttgtgacaatttttaaaatattttctgaattttcttgtgtataaacagctacgagtaagttagccacctctggaatgtctatcaataatcctttctgataatgagatgccttttggtaaactaacagctgtaatagctgatgtgatttgaaaaaatcagtaatcataactcaaaggaggagggtttgttgcacagagttgcccacatgagaagcaactcaattgcatgtcagtacctgctaaccgtgacctgtaatttgaagtgcatacttaaagacattgtcttatgtgttggtgcattcatttgtctatttaccttgtgacatcttatcatgggtgacatgtatcctagtgacagcctcctgggtatatgttattcccacgtctcaatcttccagaggatgattgtctaaatctgaggtccccccagagacaccaaaagtgaaacacctgctgcaaaattgatggtttaagtcagatcatcccaaatgtacctttgcatccggccatttttacataacttggtacaaaccaacaaccagagagaaacttactttcattatctacagatgaatctgcttctcccagtactatgttttttaaaaggactaatttttcccacatcagattaataaatgcgtataacaatggaactaaaaccttcatcttcagttattaaagtcaggatttccaaaaaatactgatatacttattctctctacaaacagatgctgaagaatcacttgctaacagtccaggtcagtcacaccttttgttgacgggagttaaatatcagctgttcttgattttgtccttaagctatttgttttttcagttttaagttcactctttatctaaactgcagggtttttcacaccactgatattctattagaaagtcttatttaaaaatacttttgattttttacatgtgatgatgatgatgatgtgtgtgtgtgtgtgtgtgtgtgtgtgaagtctatattttttggagatgcatgcagagtgaaacggtgtttcatggccttttcgcatacactattcctctggctcagggcactttttcagctcttcccctgactagctccttctcagtttttaaagaggtgtcctccagccctttcctctctattgtccccttcatagcatcctgtttttcccctctttggcccatttatcacagtatgcaatgatgcactgtggcagtgcctgcatttgactaataaatagactccaggctccctgaggacagaaatcacatccctggtttagagctgtatcatcagtgcctaacataaaagacaatcaataagtacttaaaatgaaattaaattgtctgaagaccccacaacctgcaactcaggaacacgtgagaaatctgaggaaaaagccccaaggctcaagactggggaatgtccctccctaaccctctctgagctggcactggtggacccaggcggggtcttttgggaaatcacatgctgtgtctctgtctgcagagggctggccggagctgaggctgatgggcggctcaggccggtgcttggggcgcgtggagattctccaccagggtgcctggggcaccgtgtgcgacgacctgtgggacctgaatgaagccaaggttgtgtgccggcagttggggtttgggcaggctgtttctggccctggcgaggcccactttggcccaggctcaggagacatcttcctggacaacctccagtgcactcgggtagagcactacctgggccagtgtacccacttgggctggtcagagcacaactgtggccaccacgaggatgccagtgtcatctgctcaggtaacatatcccctctcagccagtgatttctgatgctgcaattgtgacattttgaaattctgcatcctgggtggcattttcatccatccatccatgtgtctgcccgtttctgaagcatctccttgagacgccatgggcagctctggttgcacaggaaattactaattacttggcatgagcaccatctgggcattacaatgtagattctagggtcccacctccagagattatgactaagtaggaaaaagtctctggaatctgcatcttaacaagtggttcagggattctgcataagaagggacaaaggcaatccagccctggctgctatgggacagagttgacccagctgctgtcccccagcctcctaggccaaggactctgccagaggagggttgaagtagcccaaggggtaattccagtattctggtttcctataccttgtcaccccaaatagagtaacctgtcacctttatgcattcagatgcggaagacctacctccacccacacctccaggtatgtccatatttttttctaattcaggcaacttactactactactactactcataaaagcagcaaatacttataagtatttgctgtaataagtaataagtaagaaccaggcactgttctgagcccttcacatatataactctttcaatcccctcaatagccccttgaggcaggttcttggattattcatattttccagataacctgagacattgaaagttagcaaggtgcccagggctagccagggtatctgaacccaagctgtcgatgctcttggccattagccttatttacccattccttggctcagctacacaaagaccagggaaaactcgagtaaatgtggggagacgttttgctcagatcattgctaatcatcaggacaatcctgccaaaaggcattatctattatattttacagaagagaaaattgagacacagaaaggttaagtaactttctcaggatcactcagtaagttaatgacccaaattttgacactgatcagtctggccccaaagtcatgctcttagggatcttatgacttttacctcttttcaaagatcttacaaatgaattattgactaatattcatctgtaataaaaaccaaatattagaaaaatcagaccaactacatgcactgtgaattctgaaatgatgctgaaggtgattgaaaggtgatttcacagctgaggattagggagatcaaaaaacctaccgaagataacttgattagaaagtggcaggactggaatttacaaagccatctctcaccctttgaatgcacctggctgtcccctacacagcctcagtgaacacagataagccatcatccattggcagaagcatctctcttgggcacttgcctggagaagacctcgatgtgtcctggtgttcttgaaggaaggccagctttacccattggtaccatgagtgagaagggagggactgcctaaagttaaagggccatggttagggtcaagggcagtggatattccaatgaagatcatctgtagttttctcattttatggacagcagggaaatgagaaaaatgagattgagtgaaaggagccattctggttatctattgctcaccgaaacttagcaatataaagtaaccaccatttagatgtatgttatgtctttgagggtcaggaattcaggcagggctcagctgggagacccttctgctccacagagcattgagcagggttgctcaatggatttcatctgatgactggtctggagaattcaagacagcttcactcatatagttggtgccttggtgggatcagctggaaggaaaggctcagccacagccctcttcctttttaggtggtctcaggttacaagaagtctgactaccatgctgagagaccatgcacactcagacttctttttgtttgtttgtttgtttgtttttgagacagagtttcactctttcgccaaggctggagtggagtggtgctatctctgcttactgcaacctccgccccccaggttcaagcaattctcatgcctcagcttccagagtagctgggattataggcaccatgccctgctaatttttgtatttttagtagagacagggtttcaccatgttggccaggctggtctcaggtgatccacctgcctcagcctcccaaagtgctaggaatacaggcgtgaaccactgcacctggccacactcagacttcttgtaaggtgggttagggctccatgagcgagccagtgttcccagagatgggaggtggaagccaccagtctcttaaggtgcagagccactgccaccatattctgttggtcagagcagtcacagaacccacccaggttcaagggaggttacctagaccccaccttgtgacaggaggcatgtctaagaatttgtggccttctctaacctgccacagaaccatagaaaatattgactcagcaccttcagtgcagactcttctcagtttgcactaagtacattgatgtttctaaggaaaccctttacattttactgacttatagataagactaaatattttcatctggatgtcatcattttctgccttttttccctttcagattcttctacagcttctcaggatcacataaaaggtagccttttattttaaattgaaatgctcattccatgtcaagagaactattgtggcaaatgctgggcagtatgcccaggacatagcacaacagagcctggcacagtgtgggcaaggggtctgcttctctgctgccactctgtgtaatatagtctgtaaaaaatactgactttacaacaaaaggatcagactgggaagggggatgtgtatctgcccaggtcagacatctggcccatactcagccttccctctttgggtacagtcctatagaaggaaccagcccattatcccttgccacgtgtagagatttcagaaggtccaactcccagaggtttcagtgtcagcctgacctggcctcattattgtagcttataaatgtggtcagtgataaaactaccagatgaccaggagcatcatcgcttcctgccgtccatctcaggaaagacgaggaatctgtgggattctgggaggatcacaagttgtccaagaggaacagaaagtagaaaaattaagcaacttcatattttagggacaaggtcaataaagaatattgtactttcacatttcctccaaaataattttgtgtgaaatctgctttctttgtgtgaaatcctgttttaaatacatacatgtatgtgtgtgtatctatctatgctaatatgacaacatacatgaaactattagatttcactgttaccttgtttaacccttataaatccaaaatcctgcaagttccagtctcagactaaatatctgagttaaaggaaacataatctacccagcaaaagtgaggcagagtacttaaagaaggtgctggtcataacatcccctgccagatcagtgtccttttccctttacctacagttcatcagaacccaaagttgttctagaacctcttgctccccaaacctccccaaactctcccctttcccaagcacatgtggcctctgtttcttcatctctccttccagtctctcattactctgtccctccccagcaagcagaacccctactttagagagggggagaaaactgtaagcagaaaggacaaattgcacattttctttatcaggtgctgagagagagggaaaagcagggaacattcacacattaatactttttgcttcatcagaattagatttaatagactctccttcccaagaaacatttaagctaaaggtctgctcagacagcctgtgcatgcccacccaggccgattggcgcccaattctaccagaccactgcatgtaaactggtctttattaggattacacaatgatgccaaatggacacattctgacaccatttttcctgttgtttcaggaggaagtaactcttgtggaggggtcatttctagtctctctggctcattttctagtccacagtatccagaaaactacccaacagatatccagtgtgtttgggagatccacatgggtgcaaaatttcacatagaactcataattccaagtttgaagtaagaaaacttttaaagagaacgttctatgtaaataagaatattgatttgtgaaatcatattaaaggtatttcttttagtgggaaacatttaagagtgaaagcagaagcacccaacattctatagtttttccaagtcaaattttgggttagctttgtagcactatccaatgagttacttcttagttgaaaaattcagtaagtgatttattaacatattttgatagtgtttcttttttttctaaaaatgtcacaaaaatcctcaacagttttgcccttattgtacactgggtatcaatatttgtcctcttagactttcttatttgaatccaaattttaaacggtaagagaattttcatacacacattagccaactactccagctttgggtcctgcatcttctaaatgttttgcaaagtaagaggagacattaatgtcattgccttatctctgacataaagagaataaatgttcgaaagtcactgacatttttatctctatgacataaaataacagctgatgttttaatgctagcccagactttgtatgctttgtcatattccagggttatacagtccaaagatagacgtctttgtcatctccattagagatgaggagtctgaggctcagagaggataactaatttgcccaaggccaacccatctagatctgtctgatgtcaatgacccatctgttcaccaatatgtgggtctgtaaaagagtctgcatgaagcccttcttcttgtgcatgacacacatcgtgttacaaacacagcaagactgtagaattccatgatcattagctccaggcatgcactgaattgcgttccatcatgactgtaccacaaccatggattcagacatgcactaagccaaaaatgcctcaggatatatttgttgactaaaactttagggacacaattagccacaatgaggtaaggaccttgaacccacacctccaaattctattatgttatccattgtctgttccttcaaaattgcttccccttacctttctcgtgaataattgccatactattcttctatatcctgccaccacttttattttaaaatcaagttttttcctacccaagaattcgagtatggcaattattgtgaaacacagaagtaggaaaaatctggccgtgatgtctgttacatgctgatctttggggtgatctgactgttatgaatttagttgcagtgtaaattagtatttcctaatgtcctatgtaggttgtgattggccaaaaccattataatttttaaacttctgttatgagattgtagctgaaagccccacacattccttagccaaagaaaatagagttgtgataggtcatctgaaaaaattaattagtattttacatttcagtgtgcaatttaaatataatccaaatatgtaatctctatgattgtcacacttttttagcattaaattttaggaagtttctaatctgccactacccctccatgtctattcaccccaggttggaagatatccttggatgtccctatgactccgttgaaatcttcaatggtcccaggattgcctcgctctccatggggaagttctgtgcccctgaaactgtgatattcttctcctcctcacacatcatgacagtggtgttccaaagtgattctatgaaaaccaacactggcttttatgatcttttcaatgccattcctcagggtgaaagggagtcaggtaggaaacttcaagtagtttttggtggttaaaagacagaacagattctaacttcagagtctcctttgccagtagagccctaggattcagtcttttaagacccccacactagcttcattaaccctgctccatagctgctagattttcccaccatgaaggccacatgggaagctacaatgaggcagtcatgtgcattctgtgtgtgagtggccaggctgctactgcctgcagggaaaagctgggtgctatgaaccgtcctggggctgcatccaccctccacagcctcttggtaactgtccagagtgctgaaatgtggaagttcaacactcgtatgacaagactccacttcctccacgagctggcccattttataccttgcatacattgaaacctagtctcacccaaatgagagccttggggatacctgttagccatgaccctgcaggcagtcatgaccctgcaggcagtcattccaaagccaggtccaatttgcaccctgcaagcacactgcctgccaagtgtgagacttctgatgctgagaggcccctacagaaaccccagaaattcttttaggccaccagaaagccagatagtaagtccctggatgtggtttggggtttgcttgtatcggagtaagggaatttcttgtatatttcacccctaaagcaatgttcgaaactctgccctggcaaagcaaggtaagctccaacatttgaaatccagacactcattaactcaagaccaccatttagccatttaacaatagttacagaggtcctattatataccaggtccagttgtaagtgtgggagcatggtacagctccgtgccctcatggagtttatactctagtgtggacgtgggtaagtgagagaggatcaaaacacaagaaacaaggaaataaacaaactggttttggggtaaggatgataaaggacaggggtgaaggctgggaataaggagtcaggtgggagaatagagggtgcctgagtagagtaggtgctactatgggctggatgagaatggatggtatctctgaagacgtggcatgtgatgaatgacaaagaaaagcattacaggtggaggaaagacttgggcatgttgaagcaacagaaagaaggccaaagtgacagagccagtggacacagtaagggaaggctgtccttacagtgcctccagagatagcagataattcttttttttttttttttttttttgagacggagtttcgctctgtcgcccaggctggagtgcagtggcgcgatctcgactcactgcaagctccgcctcccgggttcacgccattctcctgcctcagcctcccgtgtagctgggactacaggcgcgcgccaccatgcccggctaatttttgtatttttagtagagacggggtttcaccgtgttagccaggatggtctcgatctcctgacctcgtgatccgcccgtctcggcctcccaaagtgctgggattacaggcgtgagccaccgcgcccggccaagatagcagataattctaatcggccacagcccttcagtccagatagagcattgccactgtgttctatgaagtcacagtcacccttgtggtccaggtgcgtttcaggggattaaatctacccttattcaagacacatataaaaaagcagctgggaacctgctctcctgtaacccagcattgtgacacaaaaaccatatgtcaagttctgcagtaaccctgacgtgctgggtgctgagcacactctcattggtagcatctcctccagatgctgctagagtccttattttacaggtgataaaactgagggtcagggagacagtcacttatcaaaatttacacaactaggaagccatagaacaaggattcaaacccacttcctatctcactctgaatcccttaagcctgattaaatcagttggctttaaggttttgctcttgtggttgccttagccacaaacacagaagccagaaatcacttgctacttaaaacttatcaaactcaaaaataaaattttgctctgtttagaagatggaccagagttgcggctggtgggtggctctggccagtgctcaggacatggggaggtcctacacaagggctcctggggcactgtgtgtgatgacctgtgggatctgaatgaagctgaggttgtgtgccagcagctcgggtgtggtaaggccattgctgctcctggaaaggcccactttggcccaggttctggagacatccttctagacaacattcagtgttcaggaagtgagaaccaccttggccagtggcccagctccggctggtcagaccacaaccgtggccaccatgaggatgccaatgttgtctgctcaggtggcctctccttccatgatagattccttctgatctttcacccaaagacatcctagtgatggatgaaggccatgcatgaagtggggccagggaattttgggacagtggcccaacagatgaatgtccctttggccaggtagacagagaatgctgtgagcctggctccattctgaggacaaacacagcagagccacacaattggctgcttctgttctctgcacctctcccatttctggaactgcttttccaggtctaaccatgccctcgtttttgtttatgtaacatacgacctgcctgcttgagaactgcccacactagaaagccaccatttctttgtcttcatagaatgtaatttagatttttctaaatttttcttgtatgcatgcagatgctggggactgggctccagatgtgattcctccacccccaggtaagtccaacactaaatttgcactatcttggcaaagttaaaaaaaaagtaacctctctcctgacctagacactggtcaacaatgactaggctggtgattcccaattctggctgcacaccagaatcactcagcaagcttttgaaattcctggtgcccaggctgcatccctgacctgtcaccttagagtctctgaggtcactcccagacatcagtgatatttgaagctccctgtgtcattccaatgtgcagccaaggttgagaactagtgcttaggcaaggagctaagagccatatttcccaaatggaatcacattcaaaactctcttctggtggcagagcaagggagggcaggaggagaaagactgagtcactatggctgagaagaaggtcgatagggagaagagagaccctggaaaggttgtctcttaggtacatgggttagaaaatgaaagtatgcaggaaagaaaagatacatcgagtgtcaaactgtctcccagtgagtcaagagcagactgctgatgagaagtaaaccatttagggctcttccgtggccctcctggcttagccaacacaacagagtggacttactggtaaactactcaaagtcagtgtgcagcagtgaccttctcccgaactcaagattctgaagtatgtggggtcctgcctcctgcagcctcctgcttcccagggatgggttctcagctgcccccttctctgctccctgggcccctgggccctgcccagcctcttccctaaccctgcccagtgactgatgccacactctgtccccagcaggggcctggacactaggaagctattgggatcaggggtgcattttgtggcatttcggggcccaacaaggtagatggcagctgtccgtaccctgggctggcagaaccatggcacatttgccaggacactctgtggaggtctcttgcccattccagtccaggtcccaagtacgtcccaagatggagacctccattccttgtgggttgcccagctgccatgggtcagggcagtaacctgtaggaaggggaaagtggtttccccacccctggccagggccccacattttcattttgcactgagactcacaaattatgtagctgctctggaggggaggcagagtgcacagaaccccttctcgggtttaacaagcagctacactctctttgattccctctggctttcttcctcttccccagtgaggagtctgttctggcctgggccctggaaggaggaaaagacagcaggaggagaggggatggttttcagttcatcaacagctctaggcccaagtccccttggagcctggggtttcaaacctcagaaagcctttctgtcttctttctgctgtaatatccattttctgaggcagaggtgcatagctggctggaaaaaagaaggggtcatgggattaaggaaactatggagggaaatacaaccacttatgtctaaatagtatcccactgtaagcatgaatcaaaaaaaattcttattgatagaacattatatacctaccaagacacaaaaatataaggcttttgccatttaatactctgagataaatatcacatatcaagcattttaacaaaagaaaattgcttctgagccactttaagttagtgaaaatgtattccagtgatatagtgcacttcttcaggcaaaggactgatgacaggttaagttgaccgtgtccatcactttcactgctctgcacattgctgcagtgctggccaaggagcaaaacaatggggataaaggaattctcaagtacatctgacatgtttgcttcaaattcctcccccaataaaccgttggtgtaaaatccaaacatttaacagcattctcatgatcaggctttcatagctgccctcccctcagcacctgctatgcagggggtattgaggacacacatagaatatagacgtgcagcaggccttctgtatccatgatcccacatctgtggattcaaccaactgtggatcaaaaatattcaggaagaagaatcaatagttacatctgtattgaacatgtacagactttttttcttgtctttattccctggacaatacagtgtaactactatttacatagtgttataatacattgtattaggtattataagtcatccagagattatttaaagtataatggaggatgagcataggttctatgcaaatactcctatgttgtatatgagacttgaggatccgcagattttgatatccttggggagtcttggaaccaatcccccatagacattgagggacaactgtgtatgccacatagaaatcaaagccaagaggaaacaataaaggaaaaagaagggaccttaaacactcattggacctccccattaaggtccgtatttctccaatggaacacttatccaacctgcctttctccaccctggctctcagatttctggtttttagttttctgaatttcagtgcttagtaaatttctataggcttagtggtatggtcataagcccagtgatgtcactgtaattcctagtaactggtcaacccaagtataacctgtggagtgtggaacctagcatatgagagaaaacaagtcatgtaactgtgtgtggttggtgatttcctcatgaatcagctgaaagaagggcagaggctccattccagatcagggagaaaagacaaatgagcatctacaccatttattaaaactcaagggtaataataggctcattcatttgtgcttaagtataagatggtttatgatgctaagctctctcctgattttctttggttttggtttttgcagatatcattcctccagcccctataccacaaggtaactctctttcattgaaagtgtaacctatacagtattaagttgcagagaattatttttgtaattcataaaagcagaatggacttctgtgcgcactggctaccacaggggcaatgggtgggatggagccctcacaaatgggtgggttatccacatctgagctgagctggtttgcatggcaggagacttgaggagagcatcaaagaaatacaggctgccctcactatacacatgctacatgcatgtgtcaaatcccatttccaatatcgcttacaatcaattgtagggtcgtgcctgtctgtcatgcatcttccatcctccctcatgccctctcagtggcacagtcactcacaccagccaagctacaactgtgtctacaccagcatgatcactccccatttagtgactccactgctgagcttgatggaattctggattctacatctggaaaaatgcaacgtgcatgcctagtgaaaccaaccaagggtctctcatctgcttttacaggaggaagtaactcttgtggaggagtgatttcaagtctctcaggttccttctccagcccttggtaccctacaaactaccccaccaacttggagtgcgtctgggtgatacacgtggctgagaaattccacatagaactgatgatcccaagcctgaagtaagcaacattttctttctttacttttaaggccagtttagatttgaatccatactttcctcaatgaggtaggcttttgtgggataaatcctttcacattttaggcgagaattgctctgatcatctgagctgtggagagttatttaatcagttagctcaacttcctgtgcaataagagaacactccatgggcctccctgacaccagcccgttgagctgtagctggggcaacccacacatgaagacctcaccccatcacttttaaccagttccgtttgagacacaggcttcctcctccatctgaacccagatctgttcttcttcatcctcatggtctgatcttcattcttccctctgatgctacacaaatctgcttcctgttctcttcaagaatttctatcacgtccttaccaagaattttcttgtacagattaaacagttaattcattcccccattatgcaccttgttcttcctacttctttctttaactgtcactcatttttaaggaatgtatcctattttaatgtacatttatatgcatgtaggtgtatatacacacacacacattttcatatatgcatacatatacatgaggaacacttaaacaaaaatattacttttcctgataatgtttaaccccggtttcatcttgctctactgcacctaggtcattctctcttccttactttgtcccacagtatgccccagacctctgccactgctttccatctgtcgtcattgaccacagcatttgagaatctgaatggttaaatgctgcttttaaaaatgtaaaatggtactcggtggcggaggggcgaacttcattggctttacttggtagctacatattttttgatagaaaagacataagctaatgtcaggggacattatgcagtaggagcaaaatgcatttatcattcattgattcaacatacatttattcctttgttcaacatacatttatctgttgaaagcaatgtgagaagagttggtaccatgtatttcagatctatgaaattcacagttctaatgttttagggcatagtttaattttatcacttctgggaaatggtgattccaaacagttgtaatggcccacatcccctgtaatgtcaaagttattgttctaacataagtttcgtactataattttggagtgcacaaattaaggagtttttaaggtgttgcccaaaaccagaccatagtggctgatttctgaattttgatgttaaaagcctagatttattgaaatttgcttttttgttactcagaagataaagttggttatcatttactatttattgttattccagttctcaactggaagtgattatatacccttacaagacatttggctaggtctggagacattttttactgttacaattagaaggcaccactgtcagctagtgggtggaggccagagatgcagctaagtgtcctgcagtgaacaagacagctcccccaactccttgtccagaaaagaattatccagcaccaaatatcaatactgctgagattgaaaaaccccgacttaccctgactcttactttcattttttaaaatagttcagcacctacaggaccttgcttcacgctcaatttgtaaaaattatatccatatttaaactattaggtaggggcaaaagtaactgcaggttttgacgttactcttaatgctgttttattcttgctaattaaagcatgtcctgttttctgatgaaatgatttctcaggttgcagtgtcagctgttactgccacactgttgtcaccttacacacaaatgtgatcacttactttaagaaaacaaaaataaaaatgggttattttaaggtacttggcttttacttcactggaacagatgtgttctgcaataagcaggttttcaaatgcagtatttagtttgtgtacaactgtaattatgtctatcttgtatatatcatgcaatgagaatgtatcatataggcatcaaaggctgcttactattgtttaaatccaaatatgtatctctcatacttgtatcatgttagatcaatgttgatgttctttcaacatgtatttattaagcctctactcaatttattgagcaggccctggactagaatcagactcatagtgccaaccaagaaagacgagatctctaccctcacagagtttatattctagatgatgagacaaatggtactcagataaaccaatgactcaatggacaatttcaactagtgataaattgaaaaatgctatgaagaaaaaaatatacatacatgataataggatagaaaataaagaaggagaagacagcaacaggtaggatggccagggtcagcttctctgatcatccaggttggatgaaacattcacgaaacacttggtttgaacagggcaggtcggagcattggtgggaggagtcaacagacccttggagctcttacaactgtcaccatttctgcctgctctgggtctcctggagagtttaactcaatgaggcactgttagatatttgccaccaccccagagagtggcaagatttgaattaaagagttgggggacacttgaggagacactcgaggtagagaggaagaggataggagagactgaaggccagaataccagaagttactgaaatagactgggtagaagatgagaacccaacagacctggggcagtcccagtaggaaaggacaggagggcagattcaataggtcaaatgatgagtagggggtgtagcagtgatgactgcagtttttggcgggatgctatgcaaaagatgactctaaaacatcttgcagatttccttggagatattaattttgtcttcatgtcctcagattagaggacatctatgggtgtccttacgactttatcgaagtgttcgatggacaacaggctgcctcactctccatgggcaggttttgtgctgggacagagctcacgttcctttcttcttcaaacatcatgaccacagtgttcagaagcaacgccatgatcaccaacacagggttttatgctctgtacaacaccgttcagcaagatgaaagggagaacggtaggtactctaacacataccatgggaggaagttagatctgatatatgatctttccttttaagagagaagatgctttctaaatctggccctcattaatgacatctggagtgacatccatgcagacactaaaagctccccacctcactctaaccctgctctgccactccctgtcacttttctccaccaaagcatcctggctgaagaaacagatggcctgaaatctcatagtttgcatcgactgtgtgtgtagatggatccaaaagacagcccccttcttctccaaagaagtaaaggaaaatgcaatagaaaaatcattctgggacaaaactatctcaactagccacctgcttcaagctgaatttaatacaaaaaccacctataacacttagaagctgtgtgccacatgccgagtgacatcagaggacagggctggggctataagggctgtgaggtttggaaccagggccctgggcagagcatggcagtgggtcacaggtgcccggatggaccaccaagcagaagctctgagccttttttcatcctggccctcagctcctggcccagctccacggcccattcaggggccttttggctccctccttgcactgaggtgactggtgtatgtccttgagataaatgcggttctgccctttatgagctgacacttactcagaggcgagactcacacatacacccaggaagaattagaaaaccaaaccaactgctccatgccaggggccgtccctggagccacagtttgccaaaaacaaaaaagataggaaggagggaaagggagggaagggaaggaaggaaggaagggaaagaaggaaggagagtgagggagaggaaggaaggagagtgagggagaggaaggaaggagagagagggagaggaaggaaggagagagagggagaggaagagagagagaaggaaaagagaaggaggagagagaaggaagaagaaagaataagaaggaagaaaagagatgacatcacgtctggcaacagaacagacacaagcatggtgatccagggcatctagtagttgtaaccaaagtaactcagggccatttttagatgccagattgtgtgcaggttctccgccaaacaagacgtggtacctttctgactgaagtaagcaagtctacctctctctcaggcttaggagaactgaagagagatgagctacccacaccttctatgtcttccactgcctctctgccttacctaggagcatctgctgctgtgagttacccaacctcaggtaatttgtgttgttttgaattgatgagctataacttgccccagcaaagccccctaggcagtagggtagttatttagggtccaaatgccctgggcttatcttcccagcctcttcatttactgtctgtgaggcctctagcaaatctctgagctgcttcctgcctacattttctcccctggatgaggatgaggaaatccagggggtttcactgtgtgaatatccagggcagcccttgcccagtagtgggcggggcatactactcacagagtcagccactatctctgaccctcacctcatccaatgtcaaagcctggcaggggtttatctctgggtactgccttcttcttgacagaattgttaagaatggagaagctgaaagcatcaagttatagtttgctcccagctctatttggccagtagtctttacacttccaattcaattcagccagcagctcttccacgacaggcccttagaagagtaaagtacaatatgcagagaggagctaggaaagagagaaatgaccccaagcacttagaagtagcaccagggtagcttatactgaacaacacaggcccccaaaggatgttttcttgaatttaaaacatatctattggccaggtgcagtgactcacgcctgtaatcccagcactttcggaagctgaggtgggctgatcacctgaggtcaggagtttgagaccagcctggccaacatggtgaaaccccgtctctactaaaaatacaaaaattagctgggcttggtggggcatgtctgtaatcccagctactcaggaggctgaggcaggaaaattgcttgaacccgggagatggaggttgcagtgagctgagatcatgccactgcactccagcctgagcagcagagcaagatttcatctcaaaaaaaataaaaataaaattaaaatatatgtattaaaaaaaaaagatcagccaccaagccacggttttcctgagcttatatttcctaacatgccagttgggtgatggaaggagtactgcccacagagaaaggccatgagaaggaaatcccattcagaaccagaaggtgtctgtagataatccacagagcggacagcccacccacgatggactgaaagttcgatgtttgacgtttacctaagatgtataattttccccttttgcagcatcttttccaaagccaacagaggtgcccacatggacaggtaaccgtttcttctcacttctctggccctccctctatgcagtttgaattcacaaacatcccagcaccggggaggaagcgtcctgacttccaccctcctccatggcctcaggctgccggaggaactgctggcaatgtccaggttcacctggaaaatctgtgattggaaagtgacaggaaagaagaggctgtgagatgtaagaatggctcttgggggctggtttggaagaggcccccaggaaggccaggttgcctgctcaccccaaatctccacacatccccacctgtgggctcaccttatctgtgttgcaagcacaaccagcttctgctcccttttataacattgtcctttgaacataggaggcagcctgcaatgatggctctttccaatccctggaatgtcttcacacataggttatgcctgatcccaggaataacagagatgggaggtattgttaccgtctcttgatcaacgtgtgcaagggcacatagaaactcacacccacacacatatacacacacacatacacacacacacagtgtatgcacgacagcttcttgtgaaaaatccaacacaccctgtgaatgtcagaaaccaagacttcaccacacacagggaaagaacagttatgcctttgggcaggccaggtccagccaatggcgaggaacaaccatttcttaaccaatcacaaaaaatacacagagtagtaccaaggcaaacatgaacaaaatgaaataaaggagggagtgggattcattatcctcaattatcagtgcacaattcccaggaaattgtggcttctctggtggcctttgtggatgtgacttcatgaggttgttctttggaatgtctgcaaggtctgggactgcggctggtgaacgggtccagcagatgtgagggccgagtcgaggtctaccatgccaatgcctggggcaccgtgtgtgatgacagctggtctatagaggatgcccacgtcgtctgcaggcagctgggctgtggcctggccgtgtctgccctcccaggagccagcttcagccctggatcaggcagcatcctccttgatgacgtcaactgcacgggaagggagtcctccctggggcagtgccctcacagaggttggtacacccacaactgtgggcaccatgaagatgctggcgtcatctgcttaggtgagtgaaggtccgccctgggccagtcttgcagctgcctggaccaagcccgagatcctcagatagagtctgaaaatgcctctgtgccttaaacctttccccacatgcagaacagtggatttctgctcagactctggaaaatatgaccagctgttcaatacatggtaaggtcccattcaacttgagtacctgcaaagttcaattaattgtaaaagaaagaaaatcatggcatttattccacggagttattgggaggattaattgaggcaacccatgtagaacatttagtcaagcatcagacaaaccataaatacacaaaaatattaccattttgttggtgttttagttactaaggcaaattctatcagcatcactacctcaaagtttgtagccaggttagacatcccacaacctacacctggctgtataaacccagaggggagaggcctggatgcttaagactggttgtttatacccagcttccttgagtcacatttaaactgaaacaatgatctttaaaccactctgccattccaatttctattattaaaccaccctcatttcctttatctctgcagattctgcagctgctggacatccaggtatctatgagtttgtgtccattttatttgctgactggtggctagccgtcacctctaattggtctcccaaccccagcctatgctgggtctcccttatgagctttaactttccttgacaatgctctgagctccagaccctttcaccctcccagaaggtgaagacccagggctgtttcccattcccttggctggatgtcagcaggttgatgtgtcatcccttccacagatgagagcatttcaacaggactctaagatacttgaaccaaagggttggttcatgcaacagacgccatgacaatccagagaaggcaggcggccataggggaaggagacctggggcagaagggcctgggggcaggagagcctggggcaggagagcctgggggcaggaaggcctgggggcaggagaccctgtgggcaaaagggctgggggcaggagggactgggggcaggagggactgggggcaggagaccctgggggcaggagaccctgggggcaggagagcctgggggcaggaagggctgggggcaggagggcctgggggcaggaagggcttgggggcaggagggcctgggggcaggagagcctgggggcaggaagggctgggagcaggagaccctgggggcaggagggcctgggggcaggaaggcctgggggtaggagagcctgggggcagtagagcctgggggcaggggagcctgggggcaggaagggctggggacaggagctgctcctctacctgcagccccacctgggtcccagcagcagctgctgaactctgtgattctgacaaggcacccctgtctatggggccaaatgttcacaatcccaacatgaatgttatttcttttattttcttattcttaatcagaataatacacacccatgtacagggtgctatcaaattttaagtggtagctattagataagagcctggatagggttgtttaaaggcagactcatacatgtgatttagatgatatttgagaagagtattaaatatcattgtgtgtgtttggaatgtaattatgctaactatttttcttttttacgccatagcttcttcaactcctggggagcacccaagcgattttcatctaagaggtactttccccattcttatattttgtaacagtttttctgaggctgagggtctgaccatttgtgactaatggaaatgtagcaaatgcgatttccctggccctggtgctgtgtgcaataagaactgtgctcatgagaggcaagctggtgacatggaggattctcgtggagtaggtgtctttccaagaagagagcccactcagccaccgccctctgcagcaacagcagcagcaggctactgctcctgcaggtccttctacaggggcctcgggaaccagccccagttcctggggatgcagatcctgagagtcagcttcatctgctttgggcgcaggggtccgtttcacttggtcaattttttacttgcttgtcacagtgatgttctatcttctgctgcttgattttccaatcccaaccaccttcatcatttctcaatccatactttacaattttctaaattcaagtaaagcaaaattaattttgtaccaagaatttcataatgttcttggagagacctgagttaggaatgcaaaatctgagctccaagcattcaactctatttcttggaatttttagaaaaaccacctggaaaatgacgctttttttttttttaatctgaagacttagtgttcagtgtttcaaacaagtcatggtgtgtcagcaaaacaactctgagttaaagtggcatcaaatgttcatcatccatccttgtagcttcaaatcccccaggtgaccatcagtgatgctaccctgacaaagttcagacagatgcttccaattactgtcagacagtgagggtcaccaccatgggagggaaaagtggtgcagagacattgtgtagtgtggggttaatcttttaaagtgctgatgtgcttgtgatgatggcttggttttccctttcagctgttgaagttgccccagcattgacagaaatgggccccagcattggtaatcctttgattgcttccctcaaacttcctaattattgaatctgtctaggggactccctgtaatgtcagtgcccacccagattcatgtctctccaggactgagaaaatacagagctgatacagagggagaggttacagaggtgactgccacttgtctaatctctggatcctgaaaaatgtttttaactgtgaacctgggccccagtaataatgaaataatgaaaggttgagtttgacatatccccatgctattgcctatcagtttgatggctcagcttcaaaacagatatttatccttatccgtgtaattgccatgtttctaatccaaagatgagaatgagggaacaaaatattggaaatcacaaatagcctcaaaaagtcagttaaggaatttgcaagcactagtttgacttagtcctatgggacccagaagcaggaagcaagagtgtctagagttttggaatttagagtgtgtattattttaagaactaaagaaaagtcccactagtgtctgccagaagagctgatcacattccagtgataacctctgggtctcccccagccttgcccattgtcaagttggcagatgagaggagccaatgcaaagggcacattgaagtctaccacaatggcacatgggggactgtgtgcgacaacctctggggcgtcaacgctgcccacatggtgtgccagcagctgggttgtgggaagggtgttggccaccccagggaatggccacttggttgcaggggtggggggtggcggcgtgggacacatcctcctggacgatgggcagtgtcaaggcatggagaccacactaggccagcgtggctatctgggtctgtccatccacaactgtggccaccatgaggatgctgggctcatctgcacagatactgacttccagctttctcctgaggctgccagagccatgactctcagtgggggacctggaaaccaatgtgaggaagtttgggtctcactggcatcctctaaacaaatgcccaaggtccactctcaacactgagctccctggggcaaaggatacataatgacatataatacaaccctgggtcagccccaagtccctcagccccacatcctgccctgatcttggttccggaggcctcttggctattctcagcttcccttaatttgttgatctacccagtgtttgactcaaggcctaatgagttcaccttaggtccctctgtctctgcagtcttcaaggaattaccagatcctttctgtgaactattcactagggtaatggcacttcctagactttgtcccaaagttgtctgttttgagctttaaagctgactttgcagtgctgctccaggaaattccatgaacaaaacccagatcttcccatctacatactgtgtgaaagcttcaacactatcttcttttggcctctctggtttgagatagtttcctttaaaaaaaaaatcagcccagtttgtgcattatctatgtttctttctcttgccaaaaaagcaaaatagaaaaggaaatgaaatgtaatattcactgcttagcttatcttaattttataggacaaagactacactaaaaggattgaattcatccatttatttaacaaatatttattgagcacttcatatgtgccaggcacaattctaggtgctgagaatgtagcaatgaacacaacagacaatcctgccctcatggagcttgcattccagtgggagggttagagtcatttgtgcatttaaactgtaatggataattaacaaaagtaaatgaatactgaatcaagggtcataatatgctttattatgttaaggaatcactttcctttagtgctcagacaacttagtattgtgttataatttggtgaaaatgggaaatcaacattagaaacctaaagtcagaattaggaaggctcctagtactttgccattctagaaatgatgtcctcttcagtgcttcagtgaaacagcctctctgatccatcccagggggttctcacaaccaataggtgtttctcactttctgccttttgcatccctgtcactctttcagtcttaacaaagaaacctttgtcatttttaattttacatctcaaaagttgttctgtatctaattttaatgtatctgagatataaatttttaaaattaaacaaacctaaattcctgtttgttttgcaatttcagcatcagctacagaaataaccacttcacctggtaattttagtttctttcttgctttctataaatcagatatgtgtagattgttttgcatatggttagggttggagtttatatctcatataaaattaaatatcagctcatgtcaatgtataagttgcttatatattcattaaatgaaggagtacattgacagagattgtgtgccttccatacatagcacataatatgtctagtttgtttcctctctctttggtgcaacagctggtctttgaaatcaagttttagtgactggcttcacttacatcctcatcagtgtccatacatttgggtgtccagtgagtctgggttttttttaacccccaaaccacaggacttcagatatctcaggcaaaactaccttaatctgcattttcagaaaataatggagtaccacatctctcgtgtgttccacattacagtacattaatctattgatatgcaaattttaaagaaggattcacacagctaagtaagttagggaaatgccatatccctctcttgaagattcactgcctattaacacattaaagtctctgacaagacctgtagtaagggatctttaaaaaaaacaaaaaaaaacttggtttaatccaatgattctcaaacttctttgaccactgaagactttcgagtggcaatgcagcctcctcgcaggatttggagccagagaacctgggattacgttctggctccagccttaaccaattaggtcacagcagtcaaatctcctcacctttcagagcctcagtttcttcatgtgtagaacaagaggatgaaaacagccacctcggaagcttgtcctggggactgagtggtcaggtcacacttgtgtaagaacacggtgatgggagcttcacagtcacctccttagggatgtgtgtgctgccgcctgctgagttccggcttggctccctaatgtaagcaacccatgtgtccttttataaaattccttcctctggacactttggggatcatcctaaggcttaagttaaccactgtttggctaaataagtgagtgaaataccaaatcaattcaagtcagctcaactcaagttttctctgaactgtccatatttccatggtccttatttccaaaaatctcaaagccttctgccagaattgatacacactaacctctaaggaaaatcaaacaaggaaacatgctgctcttttggtgattggatctgtgaaaattgtccaccagttctttcaggcaagaacaagtcatatggcaccatcacagtgtaacatttttctaaaagttggaagaaagcttagaggttgctcatactgcaagtcacaagtgggcagttttggcctgccatgtgtttggatgcagacaactcagttttacctatgcatgtttacattatttttaatcccacctcttaataatggaatatatcctacaaaaatccagattttcagctttgattgaaaaatctgagaatggtcaacgtgaatttcagcagggcaccaattggttggggctgagcaggaaatgactgcctcctttatatggcacatgctctttctcccatttcttcctggccgccgtgcatgtctaagcctatagacatctccgtttgcacgcttggtgcttctcaaaccttaatgtgtacatagctgtcatggagatcttgttaaaatacagattctggttctagtggatcctgagagcccatatttctaacaaggtgatacagatgctactcctccacggactagcccttcagatgtagtagctgaagctcagagatgcaaaggagcttgtccaaggtcacatactctgttccacaaagactagagactagaacccaagtctcttgagtcctagccccacgacccacctgccccattattaatccccttagcttaataaacagagaataggagaatgaaacaggaacatggctggggcataatttgtaaacagtgtgatttaaaaaaaaatctttaccaataaacttgattgacaaggatggcatttaactataattttctcttaacttttgcttgtcttgacagttcctgcttcaatttcagccacagattttgcccttacacctggtaacaagttttttcctagtatgtcctttattacctatattagggatattgctatgttgaaatttacctagctagtacaattataccactatttgtccaggagtcacttggctaaattaatcccctggaaaatagactagaacccagaaatagacagagtgcctcatgcgcccaaactgagatcctagcattcaagctcaagtgtttgaatacctacagaggtataccacagagcctgttactgagagcttgttcttactttctacacactcataacatctggctatctggtctccctgctgactatatattagtagagacaacaggctggggagggagtgcagggtgctaggaggtatagacctaatagagaagctacattggcaatggcaggaaatgctagcagatgctctgatagccatagaagggttcaaaaaaaaaaaagcattcagtgtcactttctaaatggagcaaaaatgcccacttatctcagcatcctttgagagagctctgtattgaatcctggaacaacaatgatactcttcctaatgagtccaagttcatgcaagttcaagtatgatcagtatctttttttttctttttttaatttttattttattattattatactttaagttttagggtacatgtgcacaatgtgctgattagttacatatgtatacatgtgccatgctggtgtgctgcacccgttaagttgtcatttagcattaggtatatcccctaatgctatccctccccactccccccaccccacaacagtccccagagtgtgatgttccccttcctgtgtccatgtgttctcattgttcaattcccacctatgagtgagaacatgcggtgtttggttttttgtccttgcgatagtttactgagaatgatgatttccaatttcatccatgtccctacaaaggacatgaactcatccttttttatggctgcatagtattccatggtgtatatgtgccacattttcttaatccagtctatcattgttggacatttgggttggttccaagtctttgctattgtgaataatgccacaataaacataagtgtgcatgtgtctttagagcagcatgatttatggtcattggggtatatacccagtaatgggatggctgggtcaaatggtatttctagttctagatccctgaggaatcgccacactgacttccacaatggttgaactagtttacagtcccaccaacagtgtaaaagtgttcctatttctccacatcctctccagcacctgttgtttcctgactttttaatgattgccattctaactggtgtgaggtggtatctcattgtggttttgatttgcatttctctgatggccagtgatgatgagcattttttcatgtgttttttggctgcataaatgtcttcttttgagaagtgtctgttcatgtccttcacccactttttgatggggttgtttgtttttttcttgtaaatttgtttgagttcattgtagattctggatattagccctttgtcagatgagtaggttgcaaaaattttctcccattttgtaggttgcctgttcactctgatggtggtttcttttgctgtgcagaagctctttagtttaattagatcccatttgtcaattttggcttttgttgccattgcttttggtgttttggacatgaagtccttgcccatgcctatgtcctgaatggtaatgcctgggttttcttctagggtttttatggttttaggtctaacgtttaaatctttaatccatcttgaattgatttttgtataaggtgtaaggaagggatccagtttcagctttctacatatggctagccagttttcccagcaccatttattaaatagggaatcctttccccattgcttgtttttctcaggtttgtcaaagatcagacagttgtagatatgtggcattatttctgagggctctgttctgttccattgatgtatatctctgttttggtaccagtaccatgctgttttggttactgtagccttgtagtatagtttgaagtcaggtagtgtgatgcctccagctttgttcttttggcttaggattgacttggcaatgcgggctcttttttggttccatatgaactttaaagtagttttttccagttctgtgaagaaagtcattggtagcttgatggggatggcattgaatctgtaaattaccttgggcagtatggtcattttcacgatattgattcttcctacccatgagcatggaatgttcttccatttgtttgtatcctcttttatttccttgagcagtggtttgtagttctccttgaataggtccttcaagtcccttgtaaggtggattcctaggtattttattctctttgaagcaattgtgaatgggagttcactcatgatttggctctctgtttgtctgttattggtgtataagaatgcttgtgatttttgtacattgatttggtatcctgagactttgctgaagttgtttatcagcttaaggagattttgggctgagacaatggggttttctagatatacaatcatgtcatctgcaaacagggacaatttgacttcctcttttcctaattgaatgccctttatttccttctcctgcctaattgccctggccagaacttccaacactatgttgaataggagtggtgagagagggcatccctgtcttgtgccagttttcaaagggaatgcttccagtttttgcccattcagtatgatattggctgtgggtttgtcataaatagttcttattattttgagatacatcccatcaatacgtaatttattgagagtttttagcatgaagggttgttgaattttgtcaaaggccttttctgcatctatggagataatcatgtggtttttgtcattggttctatttatatgctggattacatttattgatttgcttatattgaaccagccttgaatcccagggatgaagcccacttgatcatggtggataagctttttgatgtgctgctgcatttggtttgccagtattttattgaggatttttgcatcaatgttcatcaaggatattggtctaaaattctcttttttggttgtgtctctgcccggctttggtatcagaatgatgctggcctcataaaatgagttagggaggattccctctttttctattgattggaatagtttcagaaggaatggtaccagttcctccttgtacctctggtagaattcggctgtgaatccatctggtcctggactctttttggttggtaagctattgattattgccacaatttcagagcctgttattggtctattcagagattcaacttcttcctggtttagtcttgggaggatgtatgtgtcgaggaatttatccatttcttctagattttctagtttatttgcgtagaggtgtttgtagtattctgtgatggtagtttgtatttctgtgggatcggtggtgatatcccctttatcattttttattgtgtctatttgattcttctctcttttcttctttattagtcttgctagcggtctatcaattttgttgatcctttcaaaaaaccagctcctggattcattaattttttgaagggttttttgtgtctctaatcacaggatcaaattcacacataacaatattaactttaaatgtaaatggactaaatgctccaatcaaaagacacagactggcaaattggataaagagtcaagacccatcagcgtgctgtattcaggaaacacatctcacgtgcagagacacacataagctcaaaataaaaggatggaggaagatctaccaagcaaatggaaaacaaaaaaaggcaggagttgcaatcctagtctcggataaaacagactttaaaccaacaaagatcaaaagagacaaagaaggccattgcataatggtaaagggatcaattcaacaagaagagctaactatcctaaatatatatgcacccaatacaggagcacccagattcataaagcaagtccttagtgacctacaaagagacttagactcccacacaataataatgggaggctttaacaccccactgtcaacattagacagatcaacgagacagaaagttaacaaggatacccaggaattgaactcagctctgcaccaagcggatctaatagacatctgcagaactctccaccccaaatcaacagaatatacatttttttcagcaccacaccacacctattccaaaattgacaacatagttggaagtaaagctctcctcagcaaatgtaaaagaacagaaattataacaaactgtctctcagaccacagtgcaatcaaactagaactcaggattaagaaactcactcaaaaccactcaactacatggaaactgaacaacctgctcctgaatgactactgggtacataatgaaatgaaggcagaaataaagatgttctttgaaaccaacgagaacaaagacacaacataccagaatctctgggacacattcagagcagtgtgtagagggaaatttacagcacttaatgcccacaagagaaagcaggaaagatccaaaattgacaccctaacatcacaattaaaagaactagaaaagcaagagcaaacacattcaaaagctagcagaaggcaagaaataactaaaatcagagcagaactaaagcatcttttatttaaaagaacaggaaagcatgtttcagttcaggaaggatttaatttataacgtgcatatgtttttaattcaggaagatgggaatttgagagggtgtaaaacaactagtcatcataggtgaatttttctgacaacaaagcctcctagtaaatgagaccaaagtaaaggcagaactgtgtataatcagaaaatgaataaaaattttctgatcaattgactaacatttctgctcatgtttcatattcaggcataatttccacttcagaagaagtaactccttcacctggtaatgccctctgcccactgcactacaaatgtatgcaaatgggacaccaggatcacctctgtccaccactggggccaagactaggcaggcttgggggcggtgtggtatcaagttatcatcgtctttgagcagggtgcctcatccaggccagaccctctgcctggcatgaggtggtggttggaggatggtaagatagagagaggactttcctggctaggttcgatcacctgccatgggctctggtaccatcgtgcctctctccttcatagcacttgctacaattgcaattttacatttatttgtataatcacttgacctcatctgaatttcccatgacacagtcctgtctttgaggacagaaagaacctatgtagttttgttggctgttttactccagccctggcacagtccctggcacagaggagtgggcagtcaatatttgttaattaaatcaatgaagaccatgatttccgtgttctagggacacagagaagaaaacaaattaactatgaaacaaaatttgtttgccatttggtaggttttgaccaattaccttttctcatttccagtgtctttgaatactgctctaaccacctcaaaaggtaatttaagtgttattttgggttccatctggcttgctataattttttttgtttggttttccagtgaattgattaaacaactttttatgtcctggtcaaattctttcatttttagtcatcttttgagttttaaaatatgtttatattaaccttactcttaaaggccatctctgatcccctgatgatgatcagtgaattctgggcaactcagctcaatgcataagccaagggaaaaatttgttcaacccattaggccaagttgaatccatgaagacattcactgactggtagtctaaggcagggatcctcaacccccaggtcacagaccagtagggctctatagcctgttaggaactgggccacacagcaagaggtgaatgatgagcaagtgagcattaccacctgagctctgcctcctgccagatcagtggcagcattagattctcacgggagcacaaccctgttgtgaactgcacgtgtgagggatctaggttgagtgtaccttatgagaatctgactaatgcctgatgatctgaggtagaacagtttgatcttgaaaccatccaccatcctccccgccatctgtggaaaatttgtcttccacaaaacaatccctggtgtcaaaaaggttggggaccactggtctaaggtaatcacctacttgagtctgtggagagaacttctcctggagaccagccaccaagtggtgtttccagaatggaaagaagtcaagccatggttttccctgatcctccttgacgtttgccagcattcagtgaggatggccaaggcagtaagagatgcagagttgaccaagacagcaagtaacttgcctcttatacaacagatttggagtgatgctggttggaattatctgaggagtttctaatgtgactctgggttcgagaacttcacaagtagagtgtagagggatttgtgggtttttttttttttttgtgagggaagggggataataagagggtggtcttccctgctctaggtgttgaagcaaatgaggtataaaacatcagattcagcagcaaaatgaagcctttattactgataaagctggattggcgggaaacagtacaaaagacaaatggacctgccacccctccccactctcagctagatcttaggacagcccactagggaaagttccagtctgcagagctgaccctttcctgggtcactgccaccaatcatttgaaaggaggagaaaggccgggaaagcaagtacccactcacagaatctttgttagattaactccatgccactgagaaacctggcccatggctgtggccccccccagacagtcacctctacctccatgggaagaagtaacatgttggcaagaggaatggagacccacaagaaggaatggagggctggcttggaggcagtggggggtctggagatgccttgccacggctcctggctgcagagcaggaggacaagcctggcagtcactgatccaggacaccaccttcctgtctcctgcatcttgtagaggcatgtgtgcctgacgagacggtcttattgctcccttgtcctttgtgttcacctgcagcttccatctccactcccgtgacctccacaccaggtagaacactctgtctgctatcccatcagtgcctcttcttggagatctgtttatcaaaatgaaactcaaaaattttgtccccaacatagcctcagtaaaaacagaaacccaggagtcccctccactggtgtatgtctcttcttccttttatctctagagatctcttcaacctcagcagaagtgacctttccacctggtaaagtctcctttgtggtactgtttaagttaatgagactggcttcgtatgtgtcatgttctattcagaaaataagcctcagttatgatcatttttactgcagagtaaaactcaatgaaaagacacagctggccttcttccactcatgtttgtgtcctgctctctttgttaatacacagatgcatcttcaatctcagcagaagcggacacgccctctggtaatgttttctgcctgtcatatttccaaagttcaatatgatcaactttttccctttctctgtggcaaatcaacatatataggtactggctattctgtctatggtatgagcctcagtgtaaacagaaaccccagcatccttttcacagaaactgaggttcatgttctcttcatccatagacacaaaagtggcccccgcaccagggcacaccttctgcttgctgtactggttttgatcagatgtgcccatgggaggccagggctaggggttcacacttctcctgcttggcctgtgtgtgtcatgcactggtcttgatcagatgtgcccacgggaggccagggctgggggtccgcacctctcctgcttggcctgtgtgtgtcatgcactggtcttgatcagatgtgcccacgggaggccagggctgggggcctgcacctctcctgcttggcctgtgtgtgtcatgcactggtcttgatcagatgtgcccatgggaggccagggctgggggcccgcacctctcctgcttggcctgtgtgtgtcatgccctggtcttgatcagatgtgcccatgggaggccagggccgggggtccacatctctcctgcttggcctgtgtgtcatgcactggtcttgatcagatgtgcccatgggaggccagggccgggggtccccatctctcctgcttggcctgtgtgtatcatgcactggtcttgatcagatgtgctcatggaggccagggctgggggtctgcacctctcctgcttggccatatgtgtcatgtttcaggtgatgctttgacccagcaagcacacctgaacacacacatgaaaaaactgggttgtgatagtgttagttctatccatctgcccttatgttttccaccatgtagttggtcaaaccaaaacattcctctgcatttgcagatacgactcccactgcagctgaagccccttcttcaccaggtatgctctctgctccttgcaacagccctcatgagtggctttctcagaatgctcagcccagcaagagtttacacacccagaataaacacttctgtttctccaggtgaggtcaggggagaagagaggagaagtcaggggaggccactcaactccccagaggatttcaggccactcccctatcactagtcatgaaactgcacgcagtgaaggtggatgctggggacaggataaataggataaaatagcttaaaatctcaagtctagagtagggattcccaaatgcttatatgtgtgtgagcctcatgtggaacttgtgaaatgcaaattcagtggctctgggtggagcttttctaagaggctcccaggtgatgccgctgctgccggtcatggacccggttgggggagtaaggtgttgaaccaccaccctcattttggaggaaaatgaggcccaaagaaggaaaagatttgcctaaagtcacagagctagggcaaggcagagccaggtgtcctgacttctatccaaagtcctttctgctctcatgctctgctgatgaatccatctgtgtgattctcccaaatccctatgacattgacgtcttcagtaacaaggctctgctgctttcttctcttttatttattttcttttttcccccaagtcctgggtactttgaagacatatgggggtaaaattcaatgaaaccaaagttcagcactttcttttcacctatgtttaagtatggccggcctgccttcttgcctgcctgcctgccctccctccctccctccctccttccttccttccttccttccctccttccttccttccttttccttcctttctttctccctccctccttcgctttcctcctacctccatccctcatttcctcacttccttccttctcacccacaccatgactccacttttgccagaagattcctttgcttgtaattctcactggctcttgacatcacatgaggcaaccttttctctgtggatctggttgacggtaattgggttgctttggtcacagattaggtgacactcagagggttttacttcctttgtgaaggcatgacagcgaaatcacttcctgtttgctcgggaagggccaccttggagtgggagaaaaggtgtggtggccattaaacccttaccttccttccccttcatccctgattaaccacatggagcccgggtgaatgcgactcccacatgttatactcctgaaaggcaaagtgcttagaatacatgctttggagcctcacgggcttgaattgtggataacctgagcatgctataaaacccctgagtctccatttcctcatctctaaaataattgtcatgaggaccagagatgcaaattatctgacacattgtagatgttcaaaataagaattgtcaatctccctcacaaaatgccagcctctcgtactccagtttatgcctgaatgtgtaaatccacaagatcagtgcacgcggtggatttctactgcatatcacagatgaaataggctcgttttcatacacttatagtctacagtgtaaaatttcaatgaagccaaattttaatgctttcttttcaagagaatatttttttttgaagccacagatctaatttcgaccaaagtgacaccatcactctgtaacaatcttatgtctgttgctagattaatgcttcattttattatttgcactactatattctttcataaaatccattgctaatttttctaccaggctttcctctgtatatgttactatggaattacatctctcagatatgacctttttcttatctaaaaatatttcagaggaaactaacttgattttcttggcttcattttcagcccctataaaaatgttttctacaaaatatgtttttttaattcttcctttcaaaattcaatatatttataaagtttttttctgaccattgaatacattattttatatctggagaataaacaggatacagcactgcttattacatttatttatttatttatttatttatttattttgggatagggtcttgctctgttgccaaggctggagtgcggtggtgcaatcactgcagccttgacctcttgtgctcaagtgatcctcccacctcagcctcccgagtagctaggaacacaggtgtgcaccaccctgcagctatttttttacatttttttaatacatactggatctcgccatatcgcccaggctggtcttgagctcccggatgcaagtgattctcccacctcaacctcccaaagtgctgggattacaggtgtgagcgcaggcacctggccatttaatacattttgatggcaaaaaaagtaaaacttaatggataatatttctgcacccaaactaaagtaggaacttaaacaatgtattgctatctgaaattacagaaaatgtttggttctttttcaggtttgaatataaatatgaacacatatttttgaagtttattttttttcttatttacagttaaaatttcagttgatgaaaagatggtccctgtacttggtaatttttgtctctaaacactaaaatgatcataactctattaatactgttaggatcatatttatttttcatttaacttccttactctttacaggaaaattttatgagcttgtaggtgtgtatgtgcagacacaggtgtgtgtgtggatacacatgcactttgtgggttgaaatcccaaaattcactttccaaaaccttacccagaagatatttacccttattcatagttcaaacaagcatggttatcttgcttccaatattacagcaataaatatgatgaggagagtgaccagcctagaccagcatactacagtcacagagaaacagaagcctgtggtgtttaacattcactaagcatcttctatgtgtcaaacagagcagaaaattgaaagatgcagtcaccacaggctgatataaaggcaaatcattctacacatgtctgtgggcatgataccaccaacagaatatagattttattttttattctttttatttttcaaatcaacctttttgaagtataatttctatacaataaactgcatgcatccatgagttttgtctaacatacacaactgtgtagcgaccaccaccatcaggatagagagcatttccatcatcccaggaagttccctcatgccctttctcagtaaatctctcccaccttctccaggcaaacactgatctgccttctgtcactatagaataggtttgtttttctagaatgtcatataaatggaatcaaataacatgtgctgtcgtgtttctaactcctttcacttcaaatgtttttcagatccataaaggaacaaatgtattggtcatttgtgacttttttttactgcgcagtgttattccactgtgtgcctataccatgatttaccccttctcctgcagatgggcacctggatggtttctggatttgggctgttgtggaggcttctgctgtgtccaaatctttctgtggacatgcacattcgttcatcttgagtaaataccaaatggaagagctgggttgtacaatatggtttttagagcgaacgtatgagctcttcaccatcaagagtaaaagtaatttcactggatacatgtttgatgagtcaaggcagtgcctcgttttagaacaactgtctcctaaatatttggaagtgttttggttttttgttttgcctgtttgctttgttttctttgggtttttatatttttgcttgaagactaagttcttaggtacctggaaaactaggcttgcccacaaggaccattccttgagggcttcagataattaaggctttactgtatgagagaaagtgtgtgtgtgtgtgtgtgtgtgtgtgtgttggagaacaacaaaaccagaaacagttcgtattgcaaatagcaagtggcaccctgcgatcctgtccaggatggaaacctgacctcgagtttcttcccacctgaccgcttctctcaccatgcagagccgcccctgcgcctggcgggcgggcggagccgctgtgagggccgggtagagctgcggcaccagggcgtgtggggcacggtgtgcgacgaccactggaacatcaggaacgcccgtgtggtgtgccgcctcctgggttgcggccgtgctctgggcgccccgggccgcggccgctttggccagggcaccgggcccatcctgctggacgacgtgcgctgcaccggccacgagaacgcgctggagcgctgcacccactcgggctgggcccggcacaactgccagcaccgcgaggacgcgggcgtggtgtgcgcaggtatcgcgtcctctgcccaccctgcctttcctctcctcacattcctggggtccaaattcaccatcctggggatatcaggtgcggccagggtcccagatcctatggtaccgagggcatgttggttaggtacacttgctggtaaacgttttaatcatccaggcttgggggcgcactcgtcacttttgtccaactccacttcagctcagtattggttctgaaatacagttaaacgatgatggggtcaaaggaaggagtggcggtgtaacaaaatgactaaggccgtcgaacttgctgctgtttgtctacgatttgtccagtccctctttccatctcggaggagggcttcaagagcatagtcctggttagacactcctcctcacctggccctaaccctcagaagtcagaaagacaccccagggtgtccctggctcctctgatgtccctttcatccaagatttggcctatacctttcctggaatgtattttgtcacccaatatctgtctgggcattctgacttcaagaggttgactaccttctgtatggagcagtgcttctttatatgtgccctaaacttaccctaaacgtcaaggagttatggaattctaagatttgaaacacaagtctgagctcaacttgtctattccattcttagttttttatgggtaaatcaaaggaattgttgccattgcttttgcctttgtagatggtgccttgttttgcatagacatgggacccaactagaaaagctgtcagaggcccctgaagacagacatgaatcacacccagccaaggagtatgaatgtgtgctagggtcatggggccctcaccttccagatccttgttttgattatgtcagttcctggttccagctattcctgatgctgtcaggggaccgattctaaatgacgatccattttccattcttggattatataccaagtggatcctttggacattcactgaggggttaagtgaacttagctggccatgcttcctgggctgggtgttggctctggggtactgtcctgccttgcttctgagctggagaagactttgatatctgcaaattacatctttcccagcttgaggctccaagcgtgtcacgtgcttgggaaaggacaccaatcagtgttcatacacaggatagcattataaccttagaagccatgtgtctactattctcttgctccaataaatcttggaattgatgatatatgtattctcaactctagttcacacatgccaggctccagctccctcaggaggccctgggccctcctttcctttgcatgctctggaaaattctcatgccactgtaccccagctttagtagtgaaatcaaatgagcccattcccctacacttcatgtctactaccagctacattatcctcttgcagtgttccaacacagttgacatttgttttcatccttctctcaccaggtctggctgactctcttgtacctaaggacaatggtaaagtcttccctctagcgtctgaggctaaggatgctgatgggggagctgagagaacagccaagcaggggagaaagaacaggctgtgatggggacccgcttctgtgtttacactgagatctctggatttccacccactcgctgggttttaggaggttgggaaaaagcccctttgcacccaggctccctttcttcaacttacctccatacaaagacccagatagatcgtgttcaggtgcacagttctcaacatgagaaatgagccatgcatggaatgtgggctatgggtaggattccccatgggtgtggggtgacctcaaagccttcttggaaaagggttggtataagtaaaattaatgaaagtcaagtcaagggtgggatatgaggagagctgagccagctccagctcagggcattgttcatggtagtttaatgaagtaaagatatacacgcacccaggacctacatgaccagtgaaccagtttctctttgtgaggatttcttcatcttcccctcctgcagcccagctatcctgcttgcctcacctcttccaagccgtcattgaccgaggctatctccggaggctgggctactcctcctgggacatccacttaaatgatgagctatgtcgccccaaagtcatgggacgctgcctgatcttcaacattccctatggccactgtggcactatccagcaggtaggacacttcccaggtggtgctacccttctgcagatgaggcccaggtgaaaaatttgggaaattcaaccacctattaaaaatctgtgtaaggacagaggaaaagtgcaaaccataacttcatttctgagtttggtaagacagagagcagctcattagtttgtctgaaactttccttcctttggggaatttgggatacacaataacaagtattgagtgctgatgggctgatggatgtgtggatggatggatggatggatggatggtatattcttttcactccagaggcaatgtattttccacacatgcctcttgattgagcattggtgtacacctaccatgtgcaagctatggtgacaggcatgagggaagacagattgtccacttgcccatctgactgctaggtttctaagcaggtaactgcattccatgatcaagaaagcaaacctttaggacatttataaatcatgacatatatatgtttatttagttttccttgactactggtttatttcacaaaacaatggtattgaaattaaggaaacaagtacacgagagatatagggagagtgtataaccacagaatatttttttctcagtatttaaacaggataacctgttcccaagcaagatccccatactgcttctccattcttgtacatcccctgattagacacaaacatgaggccaggaaacccttggcattgttagaggttgaagtcattcacattttatctatttcattgtacagatcgtagtcattcctatcctttttgctttgacaattctactttttaacctcagaagtttctgccccaggatccatgccccctgtgtctgggaagtgggcaccctcagggaagcctctgggccatcagggaagaccctgcaaatgttctctttcgcctggctggctcagcttcccctgaaaaccccatgagctgaccagggtgctggggtagcagtcagcaggatcagagagcactgataaggaaaacactgctgcacagaggtccatgtctgctttcagagtcagtggatgggtcaccttctaggtgctggggacacagcagccgcaagactgacagagcccctggtccatggcccttacattcacgaaaagggggacaggatcagaccaaacacccaaaccagggtcctttttataccaaaagaggttacgaagacagtaaaacaagggaggggtagaagagtcatttggggtggaagggaagccgtgttgaataggctggtggctgggaagctgagcctgccctggggtggggcagccaggcagaggatgtggggatcagccagggctgaggtcctgaggcagccgcagccttggggctttcaagaagagactggaggccaggaagcccaagatcagagtggaagaagggcaggaccatgtgggtgaggagtttgacttttattctaagtcagagattctcaaggagggtaatgtcacccttatgggcagcagggaagatagatattggttcttagaggcaaaaattataatatctttctttctagctcaagcacagatacacatctggtatataaacactatacttgtattacaactcatagtcagggtttgagagaggccaggatgagtaagatgtctacaaaggctccttagtgggaccatggtggaagaaagttgacaaacattggtctaagctgacagggcagttcttggagtttccaagcagaatgtcacaggatctgagtcccacaagctgaggcttctttgaacaaatgttcccgggcaggctaagcctctaggcatctacacagggcatgagaggcagggacccctgcctgttggccccagcacaaccttacctcctgcaagtcctgttggatttgaaggctgggagtgaagttcagcagggccaggcccacagctcacatggagccagtactggtctggagtcaagggcaaggaagagaccaaagagaggacaagagctctggggatggtggggttggcctttgggagcctgcaggaatcgagcttgtgggggaattcagcagaaggggagctcagagcagctggacctgccaccccagctcacagctagcacaacagcttaatcctcacaggatggcagggacagtccagacttgcccactgggggctccctgcgtgcaccccacatgtcatgtcacccctttgtggtgttaagtatcacagaggtctggccccgggaggtcttccctcctgcaggtcagcaagctggtgccaagtggggtgggaaggagaggtctcagctcatggaggcaggtgcttgtcagggagccaagagtgctgcccacaactcttctctcatcctcacaggagcaccttggctccctcagctactctaactccatcagaggccggaaacggggccaccctggccgagtcattgtgcggcacaaggtgcccaagctgaagttcacctgtagggcggacggcccatccacagttgaaatcattcatggggatgacgccccaacagagggtgctggctacaccgtgtctatatccttcctccagtcccctgagtcccagcatgtgggaggcatggtgccctactatgacagccagaggaaagaggtcttcctccaagccaccctccacagccccaatcccaacctgatgctcttcgtggatacctgtgtggcttctcctgatccccatgattttacagccatcaagtatgatttgatccggcaggggtaaggaagatggaaggccctctggggtggactgttatattcacctgctgtgcctttagggaacctgtggcttctcaagtggtattcctacatcagaactttgtgcagactcctcactgtgtctcaggcacagtgggggccctcaacatcatctgatcacaagtggggacaaatagttataggcaggcagttatagacaccttcccttaactccccacagtcctagggagggctcttgctgccctgggctctgctgcctcacttcaccctttcatgtccatgcctcctttccttccagccccttccagccgtatgacttcactggactccccattcatagtgcaggccctcggggcattggcctacactgatgaactaataggttatcccaagctaagatcttagttatacttgtgagacttattctggctcctttggttaaccaaaagatttgccaagttagaacttcggccagttgtttgcgtttatagctctcttgtcccctaacagaggcaaagtgcttatagatgggcagttcgcaacaagtttgaaaacaacaaaaatccatcacttactactcaatggcagttttagagtggtgaggaccacggcaccctaaagtccatggagagcactgtggtacctgtttccaaaagccaggggacggacaggacacagcatcttccacaggcagtgtgagccatggtgtgagaggtgcacagaggtggcactaaactgcattgagccacagagtgagaaagctcttccctttcaaccccacttataaatatatcaggcaagaggctctgtttggtgccagaatttaacaacggacatttttttcttctgctttcttcagccttaatttgtgcttcttcctctagttttcaaagcttagactatagattttagatatttcttcttttctaaaatatgtgttttataaatttccctctaagcactgctttagctgcattccacaaatttttgataacttgtatattcattatcacttagctcaaaatattttttaatttctcttttgagatttatttgacccatgggttatttagaaatgttttgtttaatttccaaacatttgggaattttccaggaattgttcttattcaattttgagtttaattccacgattctgataatgtattttgtgtgatttttgttcttttaaatttgttaaggtgtcttttatggcccagaatgtggtctgtcctgatgaatattccatgtgggctcgagaagaatgtgtgttctgctgttgctggatggagggctctataaatgtcaatttgatctagtggattgggagtgctgtttaggtcatctatatcctcactgattttcttcatgctggatctgtcaactactgttggaggagttttgaagtatctggctattatagtggatttgttgattttctttgcagttctatctaaaactgtgttacgtgcttacataagaaaaattattgtgtcttcttggaggactgatcactttgttttcatataatacccctcttgcttcctgataattaccctggctctgaagtttattttcttctgaaattgatgtagctactccacctttcttttgattagtatttgcacggtatatctttcttcatctctttacttttaacttacctgtgtctttatatttaaagtgggttccttgtagacaataaatagttgggacttgttttttaatctactctgcttctaaattgctatatttagaccatttatatttaaagtgattcttgatatcattggattaaaatctaccatctcagtaactgttttctattagttgtatttgttccttgtttgtctcctcacactctttttgctgccttctccagttttaattgagcattttatgtgactcattttttctcctctgaatgcatcacttcttaattttttttttttggtggtttccctagggtttactgatgtacatttttaaataatccaagtttgccttcaaataaaaccaccaacacttttcatctctctttggacaaaacagagtaggccttttgaagacaagagttctacctagaatttaattactttttttttggttttattgtgtttattttctagttcctttctatttatgtccaggaatagtggtttttccactcatagcagtgttaaaaagtttctttatgaaagaaagagtgggtagtgggaagaactctatttgcaaatcagagatctgggtccatgcctgattatctgggttgcagtaaactcatatcgtgctttaagttaatctttttgtcctggggtttttctccccatcaggtgcatcaaagacaatacctacatcaacctccatccccgccagaagaacatggctcagttcaagttcaatgtcttcagctttcttgacagctatgatgtggtatatctgcagtgtaaggttgcagtgtgcaaggtgggggattatgcctctctctgctcctggggctgtacaggacagagtaggagaggtgcaggccccatggaggccaaggaaaagcagactgagcatttccaaatggtggggccactggagatccacaaagtcactgctcagaggaggactcttgagtgatttctgcaattttcatgtaaatctgtagaaagcaaagtctatttctcttcagtaatgtttgaccaatcagacgctatccgcatagagacaggtcaaagaaacagccagaggggattgcttctctgaggtttgttactaaacaaatcttctctgattactaaacttctaaggcaattactctctttgctgccacaaatgctacattttctaattcttgtcttaaagtgtacaaaatgttacaaagagcagggttatctctctataccgcattgtcaatttaaagattgtctttttaagttgactgtttaatcatcagatgctattaagtggatctctgtttttatcctctgacggtacgaggatttattttcaactcttgccaagagtcttaggtaaaataaaataagtgtctgtcactcattttttttaactccactcatttttttaaactctactcattttttaaaactctaactggttgcttgaatcaagcatgtcattcactcatcacaacaagctttgatcattttgttttgatgggaataaattggacctaggctttgttgggtttgggttatagcttgcaaatgaaaggctgaaatgcaatcacaggaaccatgtatctgctgtctgagctgctgatgcagggcaggcgagccccaaagtggagcttagcctgcgaggattcttggctttgcccacgaaagaattcaagagcaagctggaggtagaagaaaatagctttatcaaagaggcaatgttacagctccagcggtgttacagctctatgactgctcctgcagagcagggctaccctgtaggcaaaaagtagcagctcagggcagttttgcagtcatattaatattaatacttacttttaattgcatgcagattaagggttggtttatgcagaaatttctaggcaaggggtagtaacttttgagttagtgggtcattgacatggaaaggggcagtaactcccaggtgctgccgtggcaacagtaaattgacatggcacactggtgggcatgtctgattgaaagctgcttccaccccagccctgttttagttagtcctcaatttggtccggtgcctgagctcttcctctagagttgaaacccgcctcctacttcactaccaggtgtttgtgtggccatgttctcagtctgtttcccaaatcctcaaagcatttgggaaacttgaaaagtacacataaaacctgaaaagcaaacaaggaaagcttagcttattcctgcatcctcccagagaaggagagcagcatccactctcatctcactttctaccttaacaggaagagacctgtgctagactcactatccttgaaggtgtctttaaaaaaacagacttgaacatagtcagatttttatttttgcttgtcaagaaatattcagtagcaatatttaaaagataggtccccatctccaaggactagttcccctctttgtcaacaaatgacctgcacaggatgggactacagtattttcaagtcccccatggaggagggcagttttgggtagagcctaggagctaaccctgaggtcctcaaggttaaaaatctgataaatgacccaaggaggtgtgtagcctgtgagctgaacatctgtttcattacaaattttcccttcatcaacaactgtcttggtaaaatatactggtatttattttaatgaagttccctgcttatacacagaaattgatgaaatgtgattactggccagtttggtgaaaatgctatctttaaatcagagtcaattatttgtccctgagtagctccaactttagtcacatgaaacaatgattttagtatctgatgtgtatttcatgcaagtgcttcaaatgaataaaggagcttttccaagtaattgtaggctgctagagtttctactttcaaagtcatctccctattaactgtatatattcatagcccatagcatgttgaggaagtagaagataacagctaccaaaacctagcattttatgacttttaataaatccctaatatgaaacgtgttgacaatgaaagaactaacattttaataaacaagggtccaaacgaacttccagatcagttcctcttggtgtgtggttcaaaggatgggatccaggaagcaaccttctccaaaagcattccaggtgattctcagaaaggctgaagtttgaaagccatggccaccgttcagttttccacacctcatggatcaaaatgcacttcacagggaaaagcctgcaatcaggaaacaccaatggtacagaccaaaaagaaccaagaaaagcctgctctctctagccaaaggaccagcaaaggagcaacttagcaagacagaaaacacttagatgaaaactgtccgactctagctaactgccatgggaaacactgtggccccaccttcatcccagccagcaaatgttgagtggagagcctagacttctgacctcccccagcactccttctcttcccctccctcatcctgagtgatgtcagagaaggcaaagcgggcactgggatgctcatcacctccaggtagtaatgagaccctcacctccagccctcatgtcaggtgcagagcaggtagtgaggctagacttccatttttacccctacttggaagagatgaggcacccttttattctatcctggttagaggaggcccagtggagagccaggactttcaccccaacccagcagtaatgaggtgaccccccctgccttgggaaagcagaggtagcctggattccaccccaccccgcccctctagtttgcatgtgcctggtattccattgcgtatcccttcgtttttagcctctccaaaacactttgttaggtaagtcttttgaatacaacgtacagttactttgtaaaatattctgaaaagccatcccttttaggagttgagtagaatgaccactctaggggtgacacccagatgtcccctcagagaaagtcactcatatccagactgctgggagtgttggcggctggcggctctcagtgccaccgctcaccaggaatttccctcagctcaaggctttgtctaatccaagttcacagcccctcagtcctcaggcagccctcaggcaacgactgatccacagaagcatagacaggtctgagcaccttgcctcagtggggcacctctgaagggcagagcggccccaggacaccctgggggagtggctggaccctgctgctgctgcagctgcttctttgtgggccaactcccctgcttggttctgcttccctcctaggacacgggggctgatcccgagcacacgcctgaggaagcctcctgtacatcagcctctgcgtcagagtctgtttctcaggaacccaatctatgccaggtgtggcccaagcatattagaagcagattctagaacgggattttggagctggcagtgagaacttctcactgatggtaagtggaacatggatggctcctgactacaaacacattctctcttttttaatcctcaccacagccccggggggtggtagctgctaccaacccgtttattttatttttatttattttttttatttttttatttttatttttttttattatactttaagttttagggtacatgtgcacattgtgcaggttagttacatatgtatacatgtgccatgctggtgcgctgcacccactaactcgtcatctagcattcggtatatctcccagtgctatccctcccccctccccccaccccaccacagtccccagagtgtgatattccccttcctgtgaccatgtgatctcattgttcaattcccacctatgagtgagaatatgcggtgtttggttttttgttcttgcgatagtttactgagaatgatgatttccaatttcatccatgtccctacaaaggacatgaactcatcattttttatggctgcatagtattccatggtgtatatgtgccacattttaccaacccgttttaaattatggagaccaaggctgaaggtgacctagctcatgtaacccaccaggtaagtgagaagaactagaacccgggccacccactccagacctaggaacttttatcacttctctggagtcctttctaaacaaagaaaacttaaatagtagcatacatattgataatgcatatgcactgatattgcagatatacctcaatagctccactacaagtgatcttatgattcatggtaatatgattttacaccatctagtgagtcacaatatttgatcattttcgtagtgttacacttttgtgcctgatctgcatcggaatccctaccatgttggccagcagggaatgtccagtcagttctggatagagagatggctgaagggctgtgaccagaccagactgtttttaagcacttaacctgatttgcccattctaattaaatgtttaggggttttcacgttaggttaaaaaataactttacagtcgttcaacttaggctacctggatgaacatagaagagagtcactgtgtggctgcctgacaaagtattaatatttaggagattgacatggagatattgaaaagaaaatggggaagatctgctgtgatttggagctggaaaatcagtgtcctaagggcatgttctgtgagggcagagattctatcacatctcccgtgtattctcttcagcatcctgtagatgcaatgcatgttcagaaggaaaaatgcctttgggcatttgggaatgtggttacctgttgggatgcatgttacaacctgaaactatgtgtgttgttagatgatgagaaagagttgtgttgattgatcatctagggtgattagattctatgttttcatgtgtaaaatcagtgcacactggggtctttcattgtatttgttcagtcacagtaaatgggaaagtgtaaacccaaactggctactccttgaggacaatgaacctttggcttaggtgcttgatggtgaagggggaaaaaaaatgtttttatctcattaacccagaaacggtatgaagtctctcgttttatagtcacatttgtctatccaaagccctttcctgaaatgcttacagtgagaaatgctgaggctctgcatgaaagcaggaaggcatgtgaatcaaggagactgcggttctccttctcacactttagtttcagaaattctaacttttgatgtttcaaagagtagcatatttgcatctaaaaagtaaacacatctatctttgaaggctacttttcttaagtaaaaataacctttttcttttcacctaatatttggttaaaatgttttgtatttataaaaggaggtgttaattcgtgtaattttttgtttgtttgttttttttttttttacagagtttcactcttgttgcccaggccagagtgcaatggcgtgatcttggctcactgcaacctctgcctcccaggttcaagtgattctcctgcctcagcctaccaagtagctgggattacaggcatgtgtcaccacacccagctaatttctgtatttttagtagaaacggggtttctccatgttggtcaggctggtctccaactcctgacatcaggtgatccacccaccttggcctcccaaagtgctgagattataggcgtgagccactgcgcttggcctcatgtaatatttttgtatctttagttcgtaaaatgagagccaattgacgtggtatttatttccatcgtcttgtaatgaaacacaccgacacagtgacatgcaggcctgtgtgtcactttcaggcccttcctcatttattcataatatgtgtagccacgaggtagcatttcctttggcatcctggagaaacatgtctcacttagggttggacctgttagttaatagttctgcagcttctggtatttgtagtctgcccgttgatttacaaaatgcctcactgtgattgtcgctacagtcaccacattcagagctagaaccatgaaggaaaacagatgcacactgttgaaaggctggtttggagtttcttccgcatgtgtttcatgctgaaatcctaaaattggaaacaagatgaaaatcactttttaagaagtgttcacattataaaatgttggtagcttttataatacctgtacatatcctatgaatcttatatatgaattaatgtataatgcataatgccaacacaatatagaggaaccattatcaaatagttgaatttatttatatttatatttaattttgaacttgtttcaaattgttgacttggtttgatttctcggtatcacatgaaaaacgtgtaacactcaagcataacagtcaaatggaaatgcaggttcacttactaatggtcactgttgctcattgttgccaaaatacattttgtcaacagaaaaaaaaaatttgttcattcccttgaaataggaaaaagatacttttctcatattgatggtatttccataatgacttccatttataaattttcaactaatttcaaaccagcgtctatagatacactatgtaagccactagtgaatgcgtttataaaattactgaatttaacttttgtttttctgtttttgccatagaaatattttgctacaaaccagaaccatactcctttatagtgctaacaaaaatgaataaatacagagatcataaggtcctttaatgccatttacaactaaaataacttcttatagtttttctttcattaaggcttatcttaagccatttaattatgaaccttccttgagtatttaccatcattcctttcatgcatctgggcagatctcaggtttcaagcctttcaaaagaagcagggttagcctatgttaatataatagattctttgtctttttttttaataactttttttcaaataggctattatgtggaatgctggttcattttgttttactcatttaggagttaaaacacattgcttttgattcaattatctgctatgccatctataataaggagtcagaaaactaaaagaaacttgtttttagagatgaggacattacacttatactcaaaatccaaatgaataatggcaaactatcagtgtatcatctgcttacactgtacatggtatgcatattatcaactgatggaaataaatactaatcctatatacttaaaattcaacttatttgctaaagctactattataaatctctaaactgtacatgcttaagagttactggatttgagcagcattttatgagccatgatgtgcttttggatcatggaatagcttttttcttacctgaattgccacttgcacttcgatcccttttcagacgaatgggtcctatgatggaatctgttttccatttatatgaagaaatgtctcgtttgcttctggagacacaaccttgattgcagcgagactggtggtcactgctatcacatatcaaaactttacactgcagatacacagagctcatacttctcaagaatttaaaggcattaaactggaatctcccatagtgtccaaataagggatacaccttacaagtttcatctcgactacatctggaacagaatttatgaacatgtttagaagatacagacaaattcagtcttttccatactaaaaagttttctctcaactaagttgtgaatccaaaaatctctctcaaaagactgtctctagttcacactacagtgagttaagactatagacctgattcctgggtgagatagcaaggttctttctagctctaaaattcctggtccatataacttaatcagaaaaccaatacttacgtattggaagtcaaacttctttccttacgtgcttatcattaatgtatcagtacgaatgacgtagttaaaatccaacaaattgtaaggaaaaaaggaaattgttcctttcaaataagaacgttatactttttctcttaagaatgctacatatgttttactgatggcgttatattttaaagataacgcacatgaaataatcttctagatttttgttgaaaataaccaaaacgtacaaaaaccaaaacgcaaatagagcttttataacagaaaataaatttgtttctaccagcaaatattttgtgaatacacttaaaattctagatataagctgtgtctgcataaatgtttaaatttaaattattcataattagtacatagtaactattttataaaatgattagaataaatgtaatgaaatttcatgtagtgctaggaaaaatgtatatatacacaacacaaaaaattactttattgaaattattattccacaggaaggaatatcatacatacatcagttacattaatacatacccactcttgattaggtcgtaggttggagatgcaaagtcagaggtgggagaggctctacaggtatcaagaaacaccaccaaatttggatctgaggtgtgcagactaacttgaacaaaaagagtttggttcaaatccacataatatggtgattcaagtatagtcttttcaaatgaattggattcaaaaagagccatgctggtgttatatttgcccagtgcattttgactttgtattacatcatcttctgttatgtatattatctccactgtagaattatgtcccatttcacacttcacaataatctggagttgtttctgacgggtgatcacttcagaagttgaggatgcagaaaaggtgattatattggtgtaagtaattgactgatcttctacctgcagaacgagatagaattcaatttttatattttaagtccagtaatattttagagcatagatgtggataacatttgcaggtacagacataattttcttaaatcacgaggtaacagctttcatgtcagaatactataaaccttaaatgtatttcattgaagaaatattctaggaaagaaagtatgagatgagaaatacagcttgtattagaaagacctgaagatagaatcagacaatttttttcagttacagtaaaatccattttgattgcaaatttccagtcttaaaaagacattacaccttactatatattgctttccttaaagagctttaagttagtgtggctaactgggcagtttccaaaatatatgtagaccaagggtctgcaagaggaaggcccttagctgccttccctgggggttcacagtgtaataaagactgtgcgttcatttttggcaagatacgatgatttacttctgtctttatcaattcctctggattaacccccattcttttcaattaggttactgtttaatgtctgagtgaaaactttatagtatgtatcctaaagagaccaaaggttgaaaatgtttgaaatcttgaatgggacttctagaaaatggagaacaaatcacaaacttccagtaatatccttcatgtttaaatgggtttttttaaatgtttttttttcctgtctttaaaaggaaaagaagaagatcctaaaaatttagctagattttcactaaatacaaggtgtaaacattttctgcataagtgttactggtaggctattaagccaactgcatatagatgttcgaactctctttagtgagttttcagagttctttaccttctgggaaagataactatcccccacttatcctgaaaatgaatgcagcaatttggcagctatgtatgaatgggtatgtgcacttatatgtcttcacatgcttatcatgtggttaagccactaaaatttgggggtcgtttgttacagcagctagcaagcattaccctgactgcattgctcaacatgcactcagcatttgacaaaatccagctatcagtatttcactttacctttctgattgtaccacatccattaagagggacagaaaattccacaacatttgataattttggtctgcaagttgggtcttttagttgcaagttattcccattagagttaaaagcctctaggtaggatttgcttataataactctcatcctgtcagaagagcaagttaaagatgctgtcaggaaaaaaaaaaaaaaagaatggtcatgtttatgccagctaggaatgttggatcttgaagagctacgtgtgcaagtaaatatataaaaagtcaaaaccattttgccctaaacagtaatcataaatttgagatagccaagcaattgattcaccttttactgtgttcattgtgaccttgtttagagctagaatctgcaaacctgatgtttttaattgtgtctttgcagaaggaattaagggaaacagtccatattatctgcataaatctttttcaggttaataaaatcattaatttcctcttgcattaagcaatgcacagaaatgattgtcaagcttaagattatgaatatgttcccaactacatgtgacatgcttgcaaataggaatagccacaggtaggctaaaaattaacaatttctacatatgcaatcttcgaagagctcaaaatagctaagaatataaaacatgacttactagtgttgatgttttctgcataaattgaggtgtaggaagcagaaaatccccggtaagaattggcataatctgtagacaacacgacagtcagagagtttgatgacgattcgaaggtgggagtcacacggccacagacttgtccaatcaggccagagttggtggaggggccatcatagatggcaagaaaatcaaatttgcactgtttgtctatttctaggctagagaatgagggcctctggtgaaaaagagtttcaaaccaattcaattctattttctaacatcccaacaatcctactcttaagtgattatggattttttttttccttcaatggtatctcaggtttacgaagacaaacctggggttttgatagtctctgacaaggacctcagaatcttcagaaaaatagtcaacttagttcaatggaatagtatcactgttttcctttctacat

SEQ ID NO: 85 - DNA, 7995 bp, Homo sapiens
tttatagcagcagcagaaatataccaccctagaggacacacctccttttagctaggtacctataaatgtccaggattttctattcaattgagaagaacccagcaaaatggggatctccacagtcatccttgaaatgtgtcttttatggggacaagttctatctacaggtgggtggatcccaaggactacagactacgcttcactgattccctcggaggtgcccttggatacaactgtagcagaaggatctgattctggtttggccctgaggctggtgaatggagatggcaggtgtcagggccgagtggagatcctataccgaggctcctggggcaccgtgtgtgatgacagctgggacaccaatgatgccaacgtggtctgtaggcagctgggttgtggctgggccatgtcagctccaggaaatgcctggtttggccagggctcaggacccattgccctggatgatgtgcgctgctcaggacacgaatcctacctgtggagctgcccccacaatggctggctctcccataactgtggccatggtgaagatgctggtgttatctgctcagaaagttggcctgtcaggatatcaccacctgtacccacagaagggatggatgaagggttcttgtgttcccctgtaggatctgaatccagtttggccctgaggctggtgaatggaggcgacaggtgtcgaggccgagtggaggtcctataccgaggctcctggggcaccgtgtgtgatgactactgggacaccaatgatgccaatgtggtctgcaggcagctgggctgtggctgggccatgtcagccccaggaaatgcccagtttggccagggctcaggacccattgtcctggatgatgtgcgctgctcaggacacgagtcctacctgtggagctgcccccacaatggctggctcacccacaactgtggccatagtgaagacgctggtgtcatctgctcagctccccagtcccggccgacacccagcccagatacttggccgacctcacatgcatcaacagcaggatctgaatccagtttggccctgaggctggtgaatggaggtgacaggtgtcagggccgagtggaggtcctataccgaggctcctggggcaccgtgtgtgatgatagctgggacaccagtgacgccaatgtggtctgccggcagctgggctgtggctgggccacgtcagccccaggaaatgcccggtttggccagggttcaggacccattgtcctggatgacgtgcgctgctcaggctatgagtcctacctgtggagctgcccccacaatggctggctctcccataactgtcagcacagtgaagacgctggtgtcatctgctcagctgcccactcctggtcgacgcccagtccagacacattgccgaccatcaccttgcctgcatcgacagtaggatctgaatccagtttggccctgaggctggtgaatggaggtgacaggtgtcagggccgagtggaggtcctataccaaggctcctggggcaccgtgtgcgatgacagctgggacaccaatgatgccaatgtcgtctgcaggcaactgggctgtggctgggccatgtcagccccaggaaatgcccggtttggtcagggctcaggacccattgtcctggatgatgtgcgctgctcaggacacgagtcttacctgtggagctgcccccacaatggctggctctcccacaactgtggccatagtgaagacgctggtgtcatctgctcaggatctgaatccagtttggccctgaggctggtgaatggaggtgacaggtgtcagggccgagtggaggtcctataccgaggctcctggggcaccgtgtgtgatgactactgggacaccaatgatgccaatgtggtttgcaggcagctgggctgtggctgggccacgtcagccccaggaaatgcccggtttggccagggttcaggacccattgtcctggatgatgtgcgctgctcaggacatgagtcctatctgtggagctgcccccacaatggctggctctcccacaactgtggccatcatgaagacgctggtgtcatctgctcaggatctgaatccactttggccctgagactggtgaatggaggtgacaggtgtcgaggccgagtggaggtcctataccaaggctcctggggcaccgtgtgtgatgactactgggacaccaatgatgccaacgtggtctgcaggcagctgggctgtggctgggccatgtcagccccaggaaatgcccagtttggccagggctcaggacccattgtcctggatgatgtgcgctgctcaggacacgagtcttacctgtggagctgcccccacaatggctggctctcccacaactgtggccatcatgaagatgctggtgtcatctgctcaggatctgaatccagtttggctctgaggctggtgaatggaggtgacaggtgtcgaggccgagtggaggtcctgtatcgaggctcctggggaaccgtgtgtgatgacagctgggacaccaatgatgccaatgtggtctgcaggcagctgggctgtggctgggccatgtcggccccaggaaatgcccggtttggccagggctcaggacccattgtcctggatgatgtgcgctgctcagggaatgagtcctacctgtggagctgcccccacaaaggctggctcacccacaactgtggccatcacgaagacgctggtgtcatctgctcagaatccaattctggtttggccctgaggctggtgaatggaggtgaccagtgtcagggccaggtggaggtcctgtaccaagtctcctggggcaccgtgtatgatgacaccaatgacgccaatgtggtctgcaggcagctgggccgtggctgggccgtggcattcccaggaaatgcctggtttgatcagggctcaggacccattgtcctggatgatgtgtgctgctcagggaatgagtcctaactgtggagctgcccgcacaatggctggctctcccacagctgtcagcacagtgaagatgctttaatgtgtctttcagatgccaccttgaggttggtcaatttaaattcatcctatggtctatgtgccgggcgtgtagaaatttaccatggtggcacctgggggacagtttgtgatgactcctggaccattcaggaagctgaggtggtctgcagacagctagggtgtggacgtgcagtttcagcccttggaaatgcatattttggctctggctctggccccatcaccctggacgatgtagagtgctcagggacggaatccactctctggcagtgccggaaccgaggctggttctcccacaactgtaatcatcgtgaagatgctggtgtcatctgctcagactggattgctgtgcaactcgtggaaggttctggaaggtgttcaggacgagtcgaggtgtattttgaaggcgtgtggggcatggtgtgcgatgacctgtgggatgagaaggaagtgcaggtggtgtgccggcagctgggctgtggggcagccatctctgcccctggagaggcccactttggccagggctccggccccattcttctggacgatgtgcagtgttccgggattgaggactacctggaggagtgctcccatgctggctggtccacccacaactgtgggcacggggaagacgctggtgtcatctgctcagactggccacaattgcaactagtgaatggctcaggtaggtgttcggggcatgtggaagttttccaccatggccagtggggcagggtttgcgacgaccagcgggacatgaatgaagctgacgtggtgtgccggcagctgcactgtgggtgtgccctcgcagcccctgctgaggcccaatttggcgaaggcagaggcgaatttctactggatgatgtggactgtactgggaaagagagttttttgggacaatgtcctcatgccggctggggcctgcataactgtggccccagagaagatgccagcatcatctgcgcagcctggatggaggtgaggctgctgaatggcacagggaggtgctcaggccgcgtggaggttcttgtccagggcacatggaggaccgtgtgttgcgtgacgacctctggaatctggccaaggccactgtcgtgtgccgccagctacagtgtggacgggctgtggcagccccaacaggggctcacttcggggcaggctctgggaaaatcctgctggatgacgtgcagtgtgtggggagcgagagccacctggggcagtgcgtgcatgggggccgggccaggcacaactgtgggcacctggaggatgccagtgtcatctgttcaggagcctggatggaggtgaggctgctgaacggcacaggaaggtgctcaggccgtgtggaagttctcgtccagggcacgtgggggaccgtgtgtgatgatctctgggacctggctgaggccactgtcgtgtgccgccagctgcagtgtggccaggctgtggcagcccccacaggggcccactttcgggcaggctctgggaagatcttactggatgacatgcagtgtgtgggcagtgagagccatctgggtcaatgcatgcgtggggaccaggccaggcacaactgtgggcacctggaggatgccagtgtcatctgcacaggagcctgcatggaggtgaggctgctgaatggcacagggaggtgcttaggccgcgtggaggttctcatccagggcacgtgggggacggtgtgtgaccacttctggaacctggccgaggccgccgttgtgtgccgccagctgcaatgtggccaggccatggcagcccacttcggggcaagctctgggaaagtcctgctggatgacatgcagtgtgtgggcagcaagagccacctggggcggtgcgtgcacaggggctgggccaggcacaactgtgggcacctggaggatgccagtgtcatctgtgcaggggactggctggagctgcagctggtgggtggctctggccggtgctcaggacgcgtggagattctccaccagggcgcctggggcaccgtgtgtgatgacctgtgggacctgaacgaagctgaggttgtgtgccggcagcttgggtgtggtcgagccatgtctgcccttggaaaggcccactttggccccggctcaggagacatcttcctggacaacctccagtgcgctgagggctggccggagctgaggctgatgggcggctcaggccggtgcttggggcgcgtggagattctccaccagggtgcctggggcaccgtgtgcgacgacctgtgggacctgaatgaagccaaggttgtgtgccggcagttggggtttgggcaggctgtttctggccctggcgaggcccactttggcccaggctcaggagacatcttcctggacaacctccagtgcactcgggtagagcactacctgggccagtgtacccacttgggctggtcagagcacaactgtggccaccacgaggatgccagtgtcatctgctcagaagatggaccagagttgcggctggtgggtggctctggccagtgctcaggacatggggaggtcctacacaagggctcctggggcactgtgtgtgatgacctgtgggatctgaatgaagctgaggttgtgtgccagcagctcgggtgtggtaaggccattgctgctcctggaaaggcccactttggcccaggttctggagacatccttctagacaacattcagtgttcaggaagtgagaaccaccttggccagtggcccagctccggctggtcagaccacaaccgtggccaccatgaggatgccaatgttgtctgctcagtgaaaccaaccaagggtctctcatctgcttttacaggaggaagtaactcttgtggaggagtgatttcaagtctctcaggttccttctccagcccttggtaccctacaaactaccccaccaacttggagtgcgtctgggtgatacacgtggctgagaaattccacatagaactgatgatcccaagcctgaaattagaggacatctatgggtgtccttacgactttatcgaagtgttcgatggacaacaggctgcctcactctccatgggcaggttttgtgctgggacagagctcacgttcctttcttcttcaaacatcatgaccacagtgttcagaagcaacgccatgatcaccaacacagggttttatgctctgtacaacaccgttcagcaagatgaaagggagaacggagccagcttcagccctggatcaggcagcatcctccttgatgacgtcaactgcacgggaagggagtcctccctggggcagtgccctcacagaggttggtacacccacaactgtgggcaccatgaagatgctggcgtcatctgcttagcaacagcagcagcaggctactgctcctgcaggtccttctacaggggcctcgggaaccagccccagttcctggggatgcagatcctgagagtcagcttcatctgctttgggcgcagggccttgcccattgtcaagttggcagatgagaggagccaatgcaaagggcacattgaagtctaccacaatggcacatgggggactgtgtgcgacaacctctggggcgtcaacgctgcccacatggtggaggccagggctgggggtctgcacctctcctgcttggccatatgtgtcatgtttcagatacgactcccactgcagctgaagccccttcttcaccaggtatgctctctgctccttgcaacagccctcatgagtggctttctcagaatgctcagcccagcaagagtttacacacccagaataaacacttctgtttctccaggaaaattttatgagcttgtaggatggaaacctgacctcgagtttcttcccacctgaccgcttctctcaccatgcagagccgcccctgcgcctggcgggcgggcggagccgctgtgagggccgggtagagctgcggcaccagggcgtgtggggcacggtgtgcgacgaccactggaacatcaggaacgcccgtgtgggcaccgggcccatcctgctggacgacgtgcgctgcaccggccacgagaacgcgctggagcgctgcacccactcgggctgggcccggcacaactgccagcaccgcgaggacgcgggcgtggtctggctgactctcttgtacctaaggacaatgcccagctatcctgcttgcctcacctcttccaagccgtcattgaccgaggctatctccggaggctgggctactcctcctgggacatccacttaaatgatgagctatgtcgccccaaagtcatgggacgctgcctgatcttcaacattccctatggccactgtggcactatccagcaggagcaccttggctccctcagctactctaactccatcagaggccggaaacggggccaccctggccgagtcattgtgcggcacaaggtgcccaagctgaagttcacctgtagggcggacggcccatccacagttgaaatcattcatggggatgacgccccaacagagggtgctggctacaccgtgtctatatccttcctccagtcccctgagtcccagcatgtgggaggcatggtgccctactatgacagccagaggaaagaggtcttcctccaagccaccctccacagccccaatcccaacctgatgctcttcgtggatacctgtgtggcttctcctgatccccatgattttacagccatcaagtatgatttgatccggcaggggtgcatcaaagacaatacctacatcaacctccatccccgccagaagaacatggctcagttcaagttcaatgtcttcagctttcttgacagctatgatgtggtatatctgcagtggcaggcgagccccaaagtggagcttagcctgcgaggattcttggctttgcccacgaaagaattcaagagcaagctggaggtagaagaaaatagctttatcaaagaggcaatgttacagctccagcggtgttacagctctatgactgctcctgcagagcagggctaccctgtaggcaaaaagtag

SEQ ID NO: 86 - protein, 948 aa, Homo sapiens
MGISTVIMCLLWGQVLSTGGWIPRTTDYASLIPSEVPLDTTVAEGSDSGLALRLVNGDGRCQGRVEILYRGSWGTVCDDSWDTNDANVVCRQLGCGWAMSAPGNAWFGQGSGPIALDDVRCSGHESYLWSCPHNGWLSHNCGHGEDAGVICSESWPVRISPPVPTEGMDEGFLCSPVGSESSLALRLVNGGDRCRGRVEVLYRGSWGTVCDDYWDTNDANVVCRQLGCGWAMSAPGNAQFGQGSGPIVLDDVRCSGHESYLWSCPHNGWLTHNCGHSEDAGVICSAPQSRPTPSPDTWPTSHASTAGSESSLALRLVNGGDRCQGRVEVLYRGSWGTVCDDSWDTSDANVVCRQLGCGWATSAPGNARFGQGSGPIVLDDVRCSGYESYLWSCPHNGWLSHNCQHSEDAGVICSAAHSWSTPSPDTLPTITLPASTVGSESSLALRLVNGGDRCQGRVEVLYQGSWGTVCDDSWDTNDANVVCRQLGCGWAMSAPGNARFGQGSGPIVLDDVRCSGHESYLWSCPHNGWLSHNCGHSEDAGVICSGSESSLALRLVNGGDRCQGRVEVLYRGSWGTVCDDYWDTNDANVVCRQLGCGWATSAPGNARFGQGSGPIVLDDVRCSGHESYLWSCPHNGWLSHNCGHHEDAGVICSGSESTLALRLVNGGDRCRGRVEVLYQGSWGTVCDDYWDTNDANVVCRQLGCGWAMSAPGNAQFGQGSGPIVLDDVRCSGHESYLWSCPHNGWLSHNCGHHEDAGVICSGSESSLALRLVNGGDRCRGRVEVLYRGSWGTVCDDSWDTNDANVVCRQLGCGWAMSAPGNARFGQGSGPIVLDDVRCSGNESYLWSCPHKGWLTHNCGHHEDAGVICSESNSGLALRLVNGGDQCQGQVEVLYQVSWGTVYDDTNDANVVCRQLGRGWAVAFPGNAWFDQGSGPIVLDDVCCSGNES

SEQ ID NO: 87 - DNA, 5428 bp, Homo sapiens
tttatagcagcagcagaaatataccaccctagaggacacacctccttttagctaggtacctataaatgtccaggattttctattcaattgagaagaacccagcaaaatggggatctccacagtcatccttgaaatgtgtcttttatggggacaagttctatctacaggtgggtggatcccaaggactacagactacgcttcactgattccctcggaggtgcccttggatacaactgtagcagaaggttctccatttccctcggagttgaccctggagtcaactgtagcagaaggttctccgatttccttggagtcaaccctggagtcaactgtagcagaaggttctctgattccctcagagtcaaccctggagtcaactgtagcagaaggatctgattctggtttggccctgaggctggtgaatggagatggcaggtgtcagggccgagtggagatcctataccgaggctcctggggcaccgtgtgtgatgacagctgggacaccaatgatgccaacgtggtctgtaggcagctgggttgtggctgggccatgtcagctccaggaaatgcctggtttggccagggctcaggacccattgccctggatgatgtgcgctgctcaggacacgaatcctacctgtggagctgcccccacaatggctggctctcccataactgtggccatggtgaagatgctggtgttatctgctcagctgcccagcctcagtcaacactcaggccagaaagttggcctgtcaggatatcaccacctgtacccacagaaggatctgaatccagtttggccctgaggctggtgaatggaggcgacaggtgtcgaggccgagtggaggtcctataccgaggctcctggggcaccgtgtgtgatgactactgggacaccaatgatgccaatgtggtctgcaggcagctgggctgtggctgggccatgtcagccccaggaaatgcccagtttggccagggctcaggacccattgtcctggatgatgtgcgctgctcaggacacgagtcctacctgtggagctgcccccacaatggctggctcacccacaactgtggccatagtgaagacgctggtgtcatctgctcagctccccagtcccggccgacacccagcccagatacttggccgacctcacatgcatcaacagcaggatctgaatccagtttggccctgaggctggtgaatggaggtgacaggtgtcagggccgagtggaggtcctataccgaggctcctggggcaccgtgtgtgatgatagctgggacaccagtgacgccaatgtggtctgccggcagctgggctgtggctgggccacgtcagccccaggaaatgcccggtttggccagggttcaggacccattgtcctggatgacgtgcgctgctcaggctatgagtcctacctgtggagctgcccccacaatggctggctctcccataactgtcagcacagtgaagacgctggtgtcatctgctcagctgcccactcctggtcgacgcccagtccagacacattgccgaccatcaccttgcctgcatcgacagtaggatctgaatccagtttggccctgaggctggtgaatggaggtgacaggtgtcagggccgagtggaggtcctataccaaggctcctggggcaccgtgtgcgatgacagctgggacaccaatgatgccaatgtcgtctgcaggcaactgggctgtggctgggccatgtcagccccaggaaatgcccggtttggtcagggctcaggacccattgtcctggatgatgtgcgctgctcaggacacgagtcttacctgtggagctgcccccacaatggctggctctcccacaactgtggccatagtgaagacgctggtgtcatctgctcagcttcccagtcccggccaacacctagtccagacacttggccaacctcacatgcatcaacagcaggaggatctgaatccagtttggccctgaggctggtgaatggaggtgacaggtgtcagggccgagtggaggtcctataccgaggctcctggggcaccgtgtgtgatgactactgggacaccaatgatgccaatgtggtttgcaggcagctgggctgtggctgggccacgtcagccccaggaaatgcccggtttggccagggttcaggacccattgtcctggatgatgtgcgctgctcaggacatgagtcctatctgtggagctgcccccacaatggctggctctcccacaactgtggccatcatgaagacgctggtgtcatctgctcagcttcccagtcccagccgacacccagcccagacacttggccaacctctcgtgcatcaacagcaggatctgaatccactttggccctgagactggtgaatggaggtgacaggtgtcgaggccgagtggaggtcctataccaaggctcctggggcaccgtgtgtgatgactactgggacaccaatgatgccaacgtggtctgcaggcagctgggctgtggctgggccatgtcagccccaggaaatgcccagtttggccagggctcaggacccattgtcctggatgatgtgcgctgctcaggacacgagtcttacctgtggagctgcccccacaatggctggctctcccacaactgtggccatcatgaagatgctggtgtcatctgctcagctgctcagtcccagtcaacgcccaggccagatacttggctgaccaccaacttaccggcattgacagtaggatctgaatccagtttggctctgaggctggtgaatggaggtgacaggtgtcgaggccgagtggaggtcctgtatcgaggctcctggggaaccgtgtgtgatgacagctgggacaccaatgatgccaatgtggtctgcaggcagctgggctgtggctgggccatgtcggccccaggaaatgcccggtttggccagggctcaggacccattgtcctggatgatgtgcgctgctcagggaatgagtcctacctgtggagctgcccccacaaaggctggctcacccacaactgtggccatcacgaagacgctggtgtcatctgctcagccacccaaataaattctactacgacagattggtggcatccaacaactacaaccactgcaagaccctcttcaaattgtggtggcttcttattctatgccagtgggacattctccagcccatcctaccctgcatactaccccaacaatgctaagtgtgtttgggaaatagaagtgaattctggttatcgcataaacctgggcttcagtaatctgaaattggaggcacaccataactgcagttttgattatgttgaaatctttgatggatcattgaatagcagtctcctgctggggaaaatctgtaatgataccaggcaaatatttacatcttcttacaaccgaatgaccattcactttcgaagtgacatcagtttccaaaacactggctttttggcttggtataactccttcccaagcgatgccaccttgaggttggtcaatttaaattcatcctatggtctatgtgccgggcgtgtagaaatttaccatggtggcacctgggggacagtttgtgatgactcctggaccattcaggaagctgaggtggtctgcagacagctagggtgtggacgtgcagtttcagcccttggaaatgcatattttggctctggctctggccccatcaccctggacgatgtagagtgctcagggacggaatccactctctggcagtgccggaaccgaggctggttctcccacaactgtaatcatcgtgaagatgctggtgtcatctgctcaggaaaccatctatcgacacctgctccttttctcaacatcacccgtccaaacacagattattcctgcggaggcttcctatcccaaccatcaggggacttttccagcccattctatcccgggaactatccaaacaatgccaagtgtgtgtgggacattgaggtgcaaaacaactaccgtgtgactgtgatcttcagagatgtccagcttgaaggtggctgcaactatgattatattgaagttttcgatggcccctaccgcagttcccctctcattgctcgagtttgtgatggggccagaggctccttcacttcttcctccaacttcatgtccattcgcttcatcagtgaccacagcatcacaaggagagggttccgggctgagtactactccagtccctccaatgacagcaccaacctgctctgtctgccaaatcacatgcaagccagtgtgagcaggagctatctccaatccttgggcttttctgccagtgaccttgtcatttccacctggaatggatactacgagtgtcggccccagataacgccgaacctggtgatattcacaattccctactcaggctgcggcaccttcaagcaggcagacaatgacaccatcgactattccaacttcctcacagcagctgtctcaggtggcatcatcaagaggaggacagacctccgtattcacgtcagctgcagaatgcttcagaacacctgggtcgacaccatgtacattgctaatgacaccatccacgttgctaataacaccatccaggtcgaggaagtccagtatggcaattttgacgtgaacatttccttttatacttcctcatctttcttgtatcctgtgaccagccgcccttactacgtggacctgaaccaggacttgtacgttcaggctgaaatcctccattctgatgctgtactgaccttgtttgtggacacctgcgtggcatcaccatactccaatgacttcacgtctttgacttatgatctaatccggagtggatgcgtgagggatgacacctacggaccctactcctcgccatctcttcgcattgcccgcttccggttcagggccttccacttcctgaaccgcttcccctccgtgtacctgcgttgtaaaatggtggtgtgcagagcgtatgacccctcttcccgctgctaccgaggctgtgtgttgaggtcgaagagggatgtgggctcctaccaggaaaaggtggacgtcgtcctgggtcccatccagctgcagacccccccacgccgagaagaggagcctcggtaggtggtcgctctcagaccccactgtccaccggggcgcagacccctgactcggggacttgggatgttcctcttggtgtcatattccaactcagattgagccctacattgtgctgcacctggtcatacggagttgaatcagacctggttcccgcctcccccaaggctcatggtccttggaggacccgttgcagggcgaggtcaagagagttctgacctggatggcccatagacctgacgtcccagaatccatgcttctcatctgcaaaatgaaaatgtcaatacttacttcttagcactgttgagagggttacttacataaaggaattttggtgaaactgcctcagcctgt

SEQ ID NO: 88 - protein, 1649 aa, Homo sapiens
MGISTVIMCLLWGQVLSTGGWIPRTTDYASLIPSEVPLDTTVAEGSPFPSELTLESTVAEGSPISLESTLESTVAEGSLIPSESTLESTVAEGSDSGLALRLVNGDGRCQGRVEILYRGSWGTVCDDSWDTNDANVVCRQLGCGWAMSAPGNAWFGQGSGPIALDDVRCSGHESYLWSCPHNGWLSHNCGHGEDAGVICSAAQPQSTLRPESWPVRISPPVPTEGSESSLALRLVNGGDRCRGRVEVLYRGSWGTVCDDYWDTNDANVVCRQLGCGWAMSAPGNAQFGQGSGPIVLDDVRCSGHESYLWSCPHNGWLTHNCGHSEDAGVICSAPQSRPTPSPDTWPTSHASTAGSESSLALRLVNGGDRCQGRVEVLYRGSWGTVCDDSWDTSDANVVCRQLGCGWATSAPGNARFGQGSGPIVLDDVRCSGYESYLWSCPHNGWLSHNCQHSEDAGVICSAAHSWSTPSPDTLPTITLPASTVGSESSLALRLVNGGDRCQGRVEVLYQGSWGTVCDDSWDTNDANVVCRQLGCGWAMSAPGNARFGQGSGPIVLDDVRCSGHESYLWSCPHNGWLSHNCGHSEDAGVICSASQSRPTPSPDTWPTSHASTAGGSESSLALRLVNGGDRCQGRVEVLYRGSWGTVCDDYWDTNDANVVCRQLGCGWATSAPGNARFGQGSGPIVLDDVRCSGHESYLWSCPHNGWLSHNCGHHEDAGVICSASQSQPTPSPDTWPTSRASTAGSESTLALRLVNGGDRCRGRVEVLYQGSWGTVCDDYWDTNDANVVCRQLGCGWAMSAPGNAQFGQGSGPIVLDDVRCSGHESYLWSCPHNGWLSHNCGHHEDAGVICSAAQSQSTPRPDTWLTTNLPALTVGSESSLALRLVNGGDRCRGRVEVLYRGSWGTVCDDSWDTNDANVVCRQLGCGWAMSAPGNARFGQGSGPIVLDDVRCSGNESYLWSCPHKGWLTHNCGHHEDAGVICSATQINSTTTDWWHPTTTTTARPSSNCGGFLFYASGTFSSPSYPAYYPNNAKCVWEIEVNSGYRINLGFSNLKLEAHHNCSFDYVEIFDGSLNSSLLLGKICNDTRQIFTSSYNRMTIHFRSDISFQNTGFLAWYNSFPSDATLRLVNLNSSYGLCAGRVEIYHGGTWGTVCDDSWTIQEAEVVCRQLGCGRAVSALGNAYFGSGSGPITLDDVECSGTESTLWQCRNRGWFSHNCNHREDAGVICSGNHLSTPAPFLNIWNTDYSCGGFLSQPSGDFSSPFYPGNYPNNAKCVWDIEVQNNYRVTVIFRDVQLEGGCNYDYIEVFDGPYRSSPLIARVCDGRSFTSSSNFMSIRFISDHSITRRGFRAEYYSSPSNDSTNLLCLPNHMQASVSRSYLQSLGFSASDLVISTWNGYYECRPQITPNLVIFTIPYSGCGTFKQADNDTIDYSNFLTAAVSGGIIKRRTDLRIHVSCRMLQNTWVDTMYIANDTIHVANNTIQVEEVQYGNFDVNISFYTSSSFLYPVTSRPYYVDLNQDLYVQAEILHSDAVLTLFVDTCVDYSNDFTSLTYDLIRSGCVRDDTYGPYSSPSLRIARFRFRAFHFLNRFPSVYLRCKMVVCRAYDPSSRCYRGCVLRSKRDVGSYQEKVDVVLGPIQLQTPPRREEEPR

SEQ ID NO: 89 - DNA, 5362 bp, Homo sapiens
tttatagcagcagcagaaatataccaccctagaggacacacctccttttagctaggtacctataaatgtccaggattttctattcaattgagaagaacccagcaaaatggggatctccacagtcatccttgaaatgtgtcttttatggggacaagttctatctacaggtgggtggatcccaaggactacagactacgcttcactgattccctcggaggtgcccttggatacaactgtagcagaaggttctccatttccctcggagttgaccctggagtcaactgtagcagaaggttctccgatttccttggagtcaaccctggagtcaactgtagcagaaggttctctgattccctcagagtcaaccctggagtcaactgtagcagaaggatctgattctggtttggccctgaggctggtgaatggagatggcaggtgtcagggccgagtggagatcctataccgaggctcctggggcaccgtgtgtgatgacagctgggacaccaatgatgccaacgtggtctgtaggcagctgggttgtggctgggccatgtcagctccaggaaatgcctggtttggccagggctcaggacccattgccctggatgatgtgcgctgctcaggacacgaatcctacctgtggagctgcccccacaatggctggctctcccataactgtggccatggtgaagatgctggtgttatctgctcagctgcccagcctcagtcaacactcaggccagaaagttggcctgtcaggatatcaccacctgtacccacagaaggatctgaatccagtttggccctgaggctggtgaatggaggcgacaggtgtcgaggccgagtggaggtcctataccgaggctcctggggcaccgtgtgtgatgactactgggacaccaatgatgccaatgtggtctgcaggcagctgggctgtggctgggccatgtcagccccaggaaatgcccagtttggccagggctcaggacccattgtcctggatgatgtgcgctgctcaggacacgagtcctacctgtggagctgcccccacaatggctggctcacccacaactgtggccatagtgaagacgctggtgtcatctgctcagctccccagtcccggccgacacccagcccaggatctgaatccagtttggccctgaggctggtgaatggaggtgacaggtgtcagggccgagtggaggtcctataccgaggctcctggggcaccgtgtgtgatgatagctgggacaccagtgacgccaatgtggtctgccggcagctgggctgtggctgggccacgtcagccccaggaaatgcccggtttggccagggttcaggacccattgtcctggatgacgtgcgctgctcaggctatgagtcctacctgtggagctgcccccacaatggctggctctcccataactgtcagcacagtgaagacgctggtgtcatctgctcagctgcccactcctggtcgacgcccagtccagacacattgccgaccatcaccttgcctgcatcgacagtaggatctgaatccagtttggccctgaggctggtgaatggaggtgacaggtgtcagggccgagtggaggtcctataccaaggctcctggggcaccgtgtgcgatgacagctgggacaccaatgatgccaatgtcgtctgcaggcaactgggctgtggctgggccatgtcagccccaggaaatgcccggtttggtcagggctcaggacccattgtcctggatgatgtgcgctgctcaggacacgagtcttacctgtggagctgcccccacaatggctggctctcccacaactgtggccatagtgaagacgctggtgtcatctgctcagcttcccagtcccggccaacacctagtccagacacttggccaacctcacatgcatcaacagcaggaggatctgaatccagtttggccctgaggctggtgaatggaggtgacaggtgtcagggccgagtggaggtcctataccgaggctcctggggcaccgtgtgtgatgactactgggacaccaatgatgccaatgtggtttgcaggcagctgggctgtggctgggccacgtcagccccaggaaatgcccggtttggccagggttcaggacccattgtcctggatgatgtgcgctgctcaggacatgagtcctatctgtggagctgcccccacaatggctggctctcccacaactgtggccatcatgaagacgctggtgtcatctgctcagcttcccagtcccagccgacacccagcccaggatctgaatccactttggccctgagactggtgaatggaggtgacaggtgtcgaggccgagtggaggtcctataccaaggctcctggggcaccgtgtgtgatgactactgggacaccaatgatgccaacgtggtctgcaggcagctgggctgtggctgggccatgtcagccccaggaaatgcccagtttggccagggctcaggacccattgtcctggatgatgtgcgctgctcaggacacgagtcttacctgtggagctgcccccacaatggctggctctcccacaactgtggccatcatgaagatgctggtgtcatctgctcagctgctcagtcccagtcaacgcccaggccagatacttggctgaccaccaacttaccggcattgacagtaggatctgaatccagtttggctctgaggctggtgaatggaggtgacaggtgtcgaggccgagtggaggtcctgtatcgaggctcctggggaaccgtgtgtgatgacagctgggacaccaatgatgccaatgtggtctgcaggcagctgggctgtggctgggccatgtcggccccaggaaatgcccggtttggccagggctcaggacccattgtcctggatgatgtgcgctgctcagggaatgagtcctacctgtggagctgcccccacaaaggctggctcacccacaactgtggccatcacgaagacgctggtgtcatctgctcagccacccaaataaattctactacgacagattggtggcatccaacaactacaaccactgcaagaccctcttcaaattgtggtggcttcttattctatgccagtgggacattctccagcccatcctaccctgcatactaccccaacaatgctaagtgtgtttgggaaatagaagtgaattctggttatcgcataaacctgggcttcagtaatctgaaattggaggcacaccataactgcagttttgattatgttgaaatctttgatggatcattgaatagcagtctcctgctggggaaaatctgtaatgataccaggcaaatatttacatcttcttacaaccgaatgaccattcactttcgaagtgacatcagtttccaaaacactggctttttggcttggtataactccttcccaagcgatgccaccttgaggttggtcaatttaaattcatcctatggtctatgtgccgggcgtgtagaaatttaccatggtggcacctgggggacagtttgtgatgactcctggaccattcaggaagctgaggtggtctgcagacagctagggtgtggacgtgcagtttcagcccttggaaatgcatattttggctctggctctggccccatcaccctggacgatgtagagtgctcagggacggaatccactctctggcagtgccggaaccgaggctggttctcccacaactgtaatcatcgtgaagatgctggtgtcatctgctcaggaaaccatctatcgacacctgctccttttctcaacatcacccgtccaaacacagattattcctgcggaggcttcctatcccaaccatcaggggacttttccagcccattctatcccgggaactatccaaacaatgccaagtgtgtgtgggacattgaggtgcaaaacaactaccgtgtgactgtgatcttcagagatgtccagcttgaaggtggctgcaactatgattatattgaagttttcgatggcccctaccgcagttcccctctcattgctcgagtttgtgatggggccagaggctccttcacttcttcctccaacttcatgtccattcgcttcatcagtgaccacagcatcacaaggagagggttccgggctgagtactactccagtccctccaatgacagcaccaacctgctctgtctgccaaatcacatgcaagccagtgtgagcaggagctatctccaatccttgggcttttctgccagtgaccttgtcatttccacctggaatggatactacgagtgtcggccccagataacgccgaacctggtgatattcacaattccctactcaggctgcggcaccttcaagcaggcagacaatgacaccatcgactattccaacttcctcacagcagctgtctcaggtggcatcatcaagaggaggacagacctccgtattcacgtcagctgcagaatgcttcagaacacctgggtcgacaccatgtacattgctaatgacaccatccacgttgctaataacaccatccaggtcgaggaagtccagtatggcaattttgacgtgaacatttccttttatacttcctcatctttcttgtatcctgtgaccagccgcccttactacgtggacctgaaccaggacttgtacgttcaggctgaaatcctccattctgatgctgtactgaccttgtttgtggacacctgcgtggcatcaccatactccaatgacttcacgtctttgacttatgatctaatccggagtggatgcgtgagggatgacacctacggaccctactcctcgccatctcttcgcattgcccgcttccggttcagggccttccacttcctgaaccgcttcccctccgtgtacctgcgttgtaaaatggtggtgtgcagagcgtatgacccctcttcccgctgctaccgaggctgtgtgttgaggtcgaagagggatgtgggctcctaccaggaaaaggtggacgtcgtcctgggtcccatccagctgcagacccccccacgccgagaagaggagcctcggtaggtggtcgctctcagaccccactgtccaccggggcgcagacccctgactcggggacttgggatgttcctcttggtgtcatattccaactcagattgagccctacattgtgctgcacctggtcatacggagttgaatcagacctggttcccgcctcccccaaggctcatggtccttggaggacccgttgcagggcgaggtcaagagagttctgacctggatggcccatagacctgacgtcccagaatccatgcttctcatctgcaaaatgaaaatgtcaatacttacttcttagcactgttgagagggttacttacataaaggaattttggtgaaactgcctcagcctgt

SEQ ID NO: 90 - protein, 1627 aa, Homo sapiens
MGISTVIMCLLWGQVLSTGGWIPRTTDYASLIPSEVPLDTTVAEGSPFPSELTLESTVAEGSPISLESTLESTVAEGSLIPSESTLESTVAEGSDSGLALRLVNGDGRCQGRVEILYRGSWGTVCDDSWDTNDANVVCRQLGCGWAMSAPGNAWFGQGSGPIALDDVRCSGHESYLWSCPHNGWLSHNCGHGEDAGVICSAAQPQSTLRPESWPVRISPPVPTEGSESSLALRLVNGGDRCRGRVEVLYRGSWGTVCDDYWDTNDANVVCRQLGCGWAMSAPGNAQFGQGSGPIVLDDVRCSGHESYLWSCPHNGWLTHNCGHSEDAGVICSAPQSRPTPSPGSESSLALRLVNGGDRCQGRVEVLYRGSWGTVCDDSWDTSDANVVCRQLGCGWATSAPGNARFGQGSGPIVLDDVRCSGYESYLWSCPHNGWLSHNCQHSEDAGVICSAAHSWSTPSPDTLPTITLPASTVGSESSLALRLVNGGDRCQGRVEVLYQGSWGTVCDDSWDTNDANVVCRQLGCGWAMSAPGNARFGQGSGPIVLDDVRCSGHESYLWSCPHNGWLSHNCGHSEDAGVICSASQSRPTPSPDTWPTSHASTAGGSESSLALRLVNGGDRCQGRVEVLYRGSWGTVCDDYWDTNDANVVCRQLGCGWATSAPGNARFGQGSGPIVLDDVRCSGHESYLWSCPHNGWLSHNCGHHEDAGVICSASQSQPTPSPGSESTLALRLVNGGDRCRGRVEVLYQGSWGTVCDDYWDTNDANVVCRQLGCGWAMSAPGNAQFGQGSGPIVLDDVRCSGHESYLWSCPHNGWLSHNCGHHEDAGVICSAAQSQSTPRPDTWLTTNLPALTVGSESSLALRLVNGGDRCRGRVEVLYRGSWGTVCDDSWDTNDANVVCRQLGCGWAMSAPGNARFGQGSGPIVLDDVRCSGNESYLWSCPHKGWLTHNCGHHEDAGVICSATQINSTTTDWWHPTTTTTARPSSNCGGFLFYASGTFSSPSYPAYYPNNAKCVWEIEVNSGYRINLGFSNLKLEAHHNCSFDYVEIFDGSLNSSLLLGKICNDTRQIFTSSYNRMTIHFRSDISFQNTGFLAWYNSFPSDATLRLVNLNSSYGLCAGRVEIYHGGTWGTVCDDSWTIQEAEVVCRQLGCGRAVSALGNAYFGSGSGPITLDDVECSGTESTLWQCRNRGWFSHNCNHREDAGVICSGNHLSTPAPFLNIWNTDYSCGGFLSQPSGDFSSPFYPGNYPNNAKCVWDIEVQNNYRVTVIFRDVQLEGGCNYDYIEVFDGPYRSSPLIARVCDGRSFTSSSNFMSIRFISDHSITRRGFRAEYYSSPSNDSTNLLCLPNHMQASVSRSYLQSLGFSASDLVISTWNGYYECRPQITPNLVIFTIPYSGCGTFKQADNDTIDYSNFLTAAVSGGIIKRRTDLRIHVSCRMLQNTWVDTMYIANDTIHVANNTIQVEEVQYGNFDVNISFYTSSSFLYPVTSRPYYVDLNQDLYVQAEILHSDAVLTLFVDTCVDYSNDFTSLTYDLIRSGCVRDDTYGPYSSPSLRIARFRFRAFHFLNRFPSVYLRCKMVVCRAYDPSSRCYRGCVLRSKRDVGSYQEKVDVVLGPIQLQTPPRREEEPR

SEQ ID NO: 91 - DNA, 5474 bp, Homo sapiens
tttatagcagcagcagaaatataccaccctagaggacacacctccttttagctaggtacctataaatgtccaggattttctattcaattgagaagaacccagcaaaatggggatctccacagtcatccttgaaatgtgtcttttatggggacaagttctatctacaggtgggtggatcccaaggactacagactacgcttcactgattccctcggaggtgcccttggatacaactgtagcagaaggttctccatttccctcggagttgaccctggagtcaactgtagcagaaggttctccgatttccttggagtcaaccctggagtcaactgtagcagaaggttctctgattccctcagagtcaaccctggagtcaactgtagcagaaggatctgattctggtttggccctgaggctggtgaatggagatggcaggtgtcagggccgagtggagatcctataccgaggctcctggggcaccgtgtgtgatgacagctgggacaccaatgatgccaacgtggtctgtaggcagctgggttgtggctgggccatgtcagctccaggaaatgcctggtttggccagggctcaggacccattgccctggatgatgtgcgctgctcaggacacgaatcctacctgtggagctgcccccacaatggctggctctcccataactgtggccatggtgaagatgctggtgttatctgctcagctgcccagcctcagtcaacactcaggccagaaagttggcctgtcaggatatcaccacctgtacccacagaaggatctgaatccagtttggccctgaggctggtgaatggaggcgacaggtgtcgaggccgagtggaggtcctataccgaggctcctggggcaccgtgtgtgatgactactgggacaccaatgatgccaatgtggtctgcaggcagctgggctgtggctgggccatgtcagccccaggaaatgcccagtttggccagggctcaggacccattgtcctggatgatgtgcgctgctcaggacacgagtcctacctgtggagctgcccccacaatggctggctcacccacaactgtggccatagtgaagacgctggtgtcatctgctcagctccccagtcccggccgacacccagcccagatacttggccgacctcacatgcatcaacagcaggatctgaatccagtttggccctgaggctggtgaatggaggtgacaggtgtcagggccgagtggaggtcctataccgaggctcctggggcaccgtgtgtgatgatagctgggacaccagtgacgccaatgtggtctgccggcagctgggctgtggctgggccacgtcagccccaggaaatgcccggtttggccagggttcaggacccattgtcctggatgacgtgcgctgctcaggctatgagtcctacctgtggagctgcccccacaatggctggctctcccataactgtcagcacagtgaagacgctggtgtcatctgctcagctgcccactcctggtcgacgcccagtccagacacattgccgaccatcaccttgcctgcatcgacagtaggatctgaatccagtttggccctgaggctggtgaatggaggtgacaggtgtcagggccgagtggaggtcctataccaaggctcctggggcaccgtgtgcgatgacagctgggacaccaatgatgccaatgtcgtctgcaggcaactgggctgtggctgggccatgtcagccccaggaaatgcccggtttggtcagggctcaggacccattgtcctggatgatgtgcgctgctcaggacacgagtcttacctgtggagctgcccccacaatggctggctctcccacaactgtggccatagtgaagacgctggtgtcatctgctcaggatctgaatccagtttggccctgaggctggtgaatggaggtgacaggtgtcagggccgagtggaggtcctataccgaggctcctggggcaccgtgtgtgatgactactgggacaccaatgatgccaatgtggtttgcaggcagctgggctgtggctgggccacgtcagccccaggaaatgcccggtttggccagggttcaggacccattgtcctggatgatgtgcgctgctcaggacatgagtcctatctgtggagctgcccccacaatggctggctctcccacaactgtggccatcatgaagacgctggtgtcatctgctcaggatctgaatccactttggccctgagactggtgaatggaggtgacaggtgtcgaggccgagtggaggtcctataccaaggctcctggggcaccgtgtgtgatgactactgggacaccaatgatgccaacgtggtctgcaggcagctgggctgtggctgggccatgtcagccccaggaaatgcccagtttggccagggctcaggacccattgtcctggatgatgtgcgctgctcaggacacgagtcttacctgtggagctgcccccacaatggctggctctcccacaactgtggccatcatgaagatgctggtgtcatctgctcagctgctcagtcccagtcaacgcccaggccagatacttggctgaccaccaacttaccggcattgacagtaggatctgaatccagtttggctctgaggctggtgaatggaggtgacaggtgtcgaggccgagtggaggtcctgtatcgaggctcctggggaaccgtgtgtgatgacagctgggacaccaatgatgccaatgtggtctgcaggcagctgggctgtggctgggccatgtcggccccaggaaatgcccggtttggccagggctcaggacccattgtcctggatgatgtgcgctgctcagggaatgagtcctacctgtggagctgcccccacaaaggctggctcacccacaactgtggccatcacgaagacgctggtgtcatctgctcagaatccaattctggtttggccctgaggctggtgaatggaggtgaccagtgtcagggccaggtggaggtcctgtaccaagtctcctggggcaccgtgtatgatgacaccaatgacgccaatgtggtctgcaggcagctgggccgtggctgggccgtggcattcccaggaaatgcctgccacccaaataaattctactacgacagattggtggcatccaacaactacaaccactgcaagaccctcttcaaattgtggtggcttcttattctatgccagtgggacattctccagcccatcctaccctgcatactaccccaacaatgctaagtgtgtttgggaaatagaagtgaattctggttatcgcataaacctgggcttcagtaatctgaaattggaggcacaccataactgcagttttgattatgttgaaatctttgatggatcattgaatagcagtctcctgctggggaaaatctgtaatgataccaggcaaatatttacatcttcttacaaccgaatgaccattcactttcgaagtgacatcagtttccaaaacactggctttttggcttggtataactccttcccaagcgatgccaccttgaggttggtcaatttaaattcatcctatggtctatgtgccgggcgtgtagaaatttaccatggtggcacctgggggacagtttgtgatgactcctggaccattcaggaagctgaggtggtctgcagacagctagggtgtggacgtgcagtttcagcccttggaaatgcatattttggctctggctctggccccatcaccctggacgatgtagagtgctcagggacggaatccactctctggcagtgccggaaccgaggctggttctcccacaactgtaatcatcgtgaagatgctggtgtcatctgctcaggaaaccatctatcgacacctgctccttttctcaacatcacccgtccaaacacagattattcctgcggaggcttcctatcccaaccatcaggggacttttccagcccattctatcccgggaactatccaaacaatgccaagtgtgtgtgggacattgaggtgcaaaacaactaccgtgtgactgtgatcttcagagatgtccagcttgaaggtggctgcaactatgattatattgaagttttcgatggcccctaccgcagttcccctctcattgctcgagtttgtgatggggccagaggctccttcacttcttcctccaacttcatgtccattcgcttcatcagtgaccacagcatcacaaggagagggttccgggctgagtactactccagtccctccaatgacagcaccaacctgctctgtctgccaaatcacatgcaagccagtgtgagcaggagctatctccaatccttgggcttttctgccagtgaccttgtcatttccacctggaatggatactacgagtgtcggccccagataacgccgaacctggtgatattcacaattccctactcaggctgcggcaccttcaagcaggcagacaatgacaccatcgactattccaacttcctcacagcagctgtctcaggtggcatcatcaagaggaggacagacctccgtattcacgtcagctgcagaatgcttcagaacacctgggtcgacaccatgtacattgctaatgacaccatccacgttgctaataacaccatccaggtcgaggaagtccagtatggcaattttgacgtgaacatttccttttatacttcctcatctttcttgtatcctgtgaccagccgcccttactacgtggacctgaaccaggacttgtacgttcaggctgaaatcctccattctgatgctgtactgaccttgtttgtggacacctgcgtggcatcaccatactccaatgacttcacgtctttgacttatgatctaatccggagtggatgcgtgagggatgacacctacggaccctactcctcgccatctcttcgcattgcccgcttccggttcagggccttccacttcctgaaccgcttcccctccgtgtacctgcgttgtaaaatggtggtgtgcagagcgtatgacccctcttcccgctgctaccgaggctgtgtgttgaggtcgaagagggatgtgggctcctaccaggaaaaggtggacgtcgtcctgggtcccatccagctgcagacccccccacgccgagaagaggagcctcggtaggtggtcgctctcagaccccactgtccaccggggcgcagacccctgactcggggacttgggatgttcctcttggtgtcatattccaactcagattgagccctacattgtgctgcacctggtcatacggagttgaatcagacctggttcccgcctcccccaaggctcatggtccttggaggacccgttgcagggcgaggtcaagagagttctgacctggatggcccatagacctgacgtcccagaatccatgcttctcatctgcaaaatgaaaatgtcaatacttacttcttagcactgttgagagggttacttacataaaggaattttggtgaaactgcctcagcctgt

SEQ ID NO: 92 - protein, 1045 aa, Homo sapiens
MGISTVIMCLLWGQVLSTGGWIPRTTDYASLIPSEVPLDTTVAEGSPFPSELTLESTVAEGSPISLESTLESTVAEGSLIPSESTLESTVAEGSDSGLALRLVNGDGRCQGRVEILYRGSWGTVCDDSWDTNDANVVCRQLGCGWAMSAPGNAWFGQGSGPIALDDVRCSGHESYLWSCPHNGWLSHNCGHGEDAGVICSAAQPQSTLRPESWPVRISPPVPTEGSESSLALRLVNGGDRCRGRVEVLYRGSWGTVCDDYWDTNDANVVCRQLGCGWAMSAPGNAQFGQGSGPIVLDDVRCSGHESYLWSCPHNGWLTHNCGHSEDAGVICSAPQSRPTPSPDTWPTSHASTAGSESSLALRLVNGGDRCQGRVEVLYRGSWGTVCDDSWDTSDANVVCRQLGCGWATSAPGNARFGQGSGPIVLDDVRCSGYESYLWSCPHNGWLSHNCQHSEDAGVICSAAHSWSTPSPDTLPTITLPASTVGSESSLALRLVNGGDRCQGRVEVLYQGSWGTVCDDSWDTNDANVVCRQLGCGWAMSAPGNARFGQGSGPIVLDDVRCSGHESYLWSCPHNGWLSHNCGHSEDAGVICSGSESSLALRLVNGGDRCQGRVEVLYRGSWGTVCDDYWDTNDANVVCRQLGCGWATSAPGNARFGQGSGPIVLDDVRCSGHESYLWSCPHNGWLSHNCGHHEDAGVICSGSESTLALRLVNGGDRCRGRVEVLYQGSWGTVCDDYWDTNDANVVCRQLGCGWAMSAPGNAQFGQGSGPIVLDDVRCSGHESYLWSCPHNGWLSHNCGHHEDAGVICSAAQSQSTPRPDTWLTTNLPALTVGSESSLALRLVNGGDRCRGRVEVLYRGSWGTVCDDSWDTNDANVVCRQLGCGWAMSAPGNARFGQGSGPIVLDDVRCSGNESYLWSCPHKGWLTHNCGHHEDAGVICSESNSGLALRLVNGGDQCQGQVEVLYQVSWGTVYDDTNDANVVCRQLGRGWAVAFPGNACHPNKFYYDRLVNNYNHCKTLFKLWWLLILCQWDILQPILPCILPQQC

SEQ ID NO: 93 - DNA, 100685 bp, Mus musculus
  misc_feature (1)...(100685): n = A,T,C or G
gaactgtgatggttgtcttggttgtcaacttgactccatctagaattaactaaggtcactaaagtggctgggcacaactgcaaagatttttttcttgattggatcattaaaagtgggaggacccaccctaaatccggaacataccttctgactaaatcagtggttctcaaccagtagatctagacccctttggggatagaatgactttttcacaggggtcccatatcagatagcctacatattagatatttacattacaattcataacagtagcaaaattacagttataaagtagcaacagaatgatttcatggtgctatgaggaactatgatagcagcattgggatggttgagaatcactcactggactatataaagggcatggaaaacaggagctcatgttctgcctgcttgtgcttactcttacttcactggcattagagcctacttcttcaggattctggtgtagcctgaagaccaactgaagcatccagcttatgaactgaacagctattggattcttggactttctgttgggagacagccactgttgcaatagtcagactacagcctgtaacccattctaataaattgacaggattcattcactcagttctgtgtctctagagaacgcagacgaatacagggacccactggaagaacatttgcaagagcatcaagtcctgcctttcactctagctgtttcacagacactgaaggtgagccagagggctaagtcactgaggaagaaaagtcgaggaggagaaagggaggcagaagctggcaatatgaatcctggctctttccacctctctgcagaggataacacaagcctgctcgcgtcatggaggagaacactatgcctaaagaatcacacagggaaatgacaagctgaggaactccgctgtgcctgcaaagccctctgctcaggcaaggggccctggtgccttttattagacagaagaccattctacaataaatactcttcacacaggccaaagaagttaccatggttggctctgtcccagcagagctgagtcagcaggaaatctgccaaggtgcagcaaaccccgtgtcttgtgggttccctgtgttgataatttttaaacccgaggctgagagcttgaatgccaaatgtgcagtagacgcaccgcccttgtgggccctaggtcctgtgaaggggtgagtagatgagtggatggtctagcagtcttgcaaaggggtcagagcaagtttcttattaatgaaataagtcaaagaatattaactcctcaggggtttgaggaccttgagatttcccaagcttcagatttgattttatctgtttatttattcacttgccatactggacattgacccctgaccttgaatatgtttggaaagtgtcctagcaatgagccatatcctcaatcctgcatggtatactgatgagctatggttttctgagtatgatgtctctcttatcttcctctggtgttaactttaccaaacagtgcactgggacttcctctatgaacctctgaatttatgaactagctcaaaggaccagagtgacaaaggaagagtttgtaaactgtaaagctctagagaaaacccaaacataattattttttggcatggggtaggctctgagcagctaagggaccttgtttctctatcaggacttcatagaaaggggctatgtccatgggatgggtcttgttcacaattaatacttgagaattacccaagagctaggggtgcagctcaggtggtagcatgtatgcatagcatgtgtgaactaggtagggtgaggtggtgcatatttgtaatccagctcttgggaggtaaagtcaggaggatcagaatttcaagatcattctagactataaagccagtttgaggtcaacctagtccctatttttaaaaaaatcaaagaaacaatcagtctgtctgtctacctatctacctccttaccttcgtacctacatcccagtagtctctgtgagtatagttctcaaattttccatcaccttttcagttctctgactgaactgcaagaagaaataactttttttttataactgcctagtggttaggctctatcccagcctcaggagggaaaacttgttaggctagttgaggataagaagtgtaggtgggctcagtgtggcagcctatgcctttaatcctagctcttgctctacatagcaggctgaagggcagccaccgatacatagtgagactctgtggaacataaagaggaggaggaggaggaggaggaggaggaggaagaggaggnnnnnnnnnnnnnnnnnnnngaggaagtagtagtgtaggcacatgtcagtgtcagtgggtctaatacaagttatagtcatctggtaagaggaaacctcaaccaagcaaacatccctataagacttgactgtaagcaagcctgtgggatatttagttgagggatgtggaatggcccaacccattgtgggcactgtcatccttgggcaaatggcagtggggtgtataagaaagtgaactgatcaggttaggaggagcaagttgctttgggttggtcttttatcacagtaatagaagctgtaactaagaagagtggcagagtggccaggaatgagtccaaccttgtctttctgaaatgcagacccctggttgctgaggccttccccccactctccagctcccctccaggctaacaccctccctgttcctgtgtatcacactcaccagctaagatgccacagggctggtgggggccatagggcttacctagtccttgggggtggagcttaggggatgtatggatgagcttttaaagatgattattgatacatgcattgagaaattatcttttcagcagaatccttaggatttaatttggattttgtttcattggtttggtgagacattattcagtccaggctggctttgaacttacaacaattctgtctcagtcttcgagctgctgggattacaagcacgtacaatctcctgagaaatcttagaaagttttcccagtgagaaaccccacggggctctggctcttgccctccagtccttgctcacagccctgttctaatgtaacgtctttgtttacttttcagtctgtttattttgcgaaacttttaaatagtaaatgatagtgctctttttatttcagagaaaacaaattatcctttatggatactgttgaagatctcctcatagtggattatttcccaacagaaatgaagctagagatgccttggaaacgtctgccctccagcctaagccaactttccccattcccagcagctgcacagctctctctgcctgtacttttggctaggaatgtcttcctgagaatatgttgatagaatgtgggattggaagtgaaaattgtggcacagggaagtcctggctagggcaaacacctaaaggacccagagttgctgacgttggggacctctgctcaggctagctccttaccaagtctttaagagaggaggcaagaaccagcattagccctagtttgtgcatgttcttcctgactcggggcctctgaggtaagagtggggccctagaggcccctggctgtgcttaggaggaagtagatgagcaaacaggtttacttcctgatacaaaagaggaagtgggccagaagttttaaaacgaaggacccctatgatgatcaatcttccgtggcactgggctgagccttgagatgttgatggtacgctgggtgtatctgtgaggtggacactggaatcagaggactgagtacaggtgattgttttctttagtgttggtgggcctcatccattcagtggacagcctgtatagaggaaatggttgactgagaaagggttctctctgtgccaatcttttcttgacttttgtgagctgttgcatcgtattgctcattatcactgagtttgggatggcctgttacatagccatgggagactggcacaaagagtgagccagtcccacttctctggatgggtcacaaggactctgatgtcaatttgagaccatctagtcctaccatttattttccaaggaaggatgtgagacacagagatatcaagacaaatgaggttcaaaccagagcctaggtgcttttagccattctctgacatattacatgcatctagaaaaccctggtggggtagaggagaggaaaggatcttgatctgggtgcttcccttcccaggtacacacccacatccaaggctatacagacattgggtcttaaatttatcagagtgatttccacccccccctctctttagatgtgtttattttatacatatgagtacactgcagctctcttcagacacaccagaagagggcatcagatcccattacagattgttgtgagccaccatgcggttgttgggaattgaactcaggacctctgaaagagcagtcagtgctcataactgctgaaccatctctctaggcaccatcagagtgatttctaagagggctgagttttctccagttgatatctatctaagatggtttctggacatggattctggtttttcataatgccatcgacacagaggtcctgtctgaatcaatgagagtggatgtgagaaagaaccagtggagagtcagggctcaccattgtgggagccttggcccatacctggctatatagaccttgttggtactatggaggcttgagacacaagtgccaatgttttaaccagaaggcagacaggaccagataatgtctggggaagatcctggtgtatttgaaggaagaatcagaatgtagggaccaagggaggaaaatgatagttggcaggagaatgagctaaagctccaaggaaggatggacatgggtctgagggagcctgtgacatggaacctatccagactcaggtttctaacagtttaaaattccccaaagacacgagacctggatggcagctaactggccctggataatccagtgtcaagacttatgggtgggattcctgaaggcatccaggcaggtgcacttgatagcatcatagaactggggttgtgggagttggatccacagcaaggagaggcaggggagaggtacgcatcacagtcagctcccggcacctgcctgtgggtgccgttccattatcctcccaagcatcctttggactgcattaagcctgcaaccaggaaaaagaaatttatttagagagtacagatatttcacatttagggcaagtgatgatacttgcaatttacatcttgttcctgttgttgggtgtgggttgtagttcttatggcagaggctagtaagtgaaatgctcctggctgtaaacttgatcttattggcaaactgtctattatgcagctaaaaacatctagttaataggcactgtccttcaacaaccagtagcaaccagagtcctgggtggtgataacagtgacattacatctcttttatcacccttgggttctttatgctgccaattatctggcacgtgctctcccctggcttcccagaccatgctctcagcctcatttggctttcctggggctctgtttgtacttgtagcatcctcaagttccactggtggggagaggatctgatttttaggaagcaagagtaatcactggaggcaaaggctggcagacaatcaagcaggtgactccaatagagccatttgccaagcacctagagggtgtgtctgcggcaccagattctgagctctgggctgggaatgcagtaacaggagagactaaaagagcctgagatctcaacaatctgttttttgttgttgtttgtttttgaatcagtaaactgccctcccctccaccccatagaacagacagctttcatgcaagtatgaatgtttggtgaagacgagctctggcctttcttccctgaatgttcaattccaagtcaagtctgctgctttagggaacctcttactatcttaaatcctgtagaaggcttggatcgagtgtaggaaattttcacaagaacccaaatttcacgtcgatttgtgatggattagcataccgaaattggtttaaagtgcgcttaatggatgcattcctgcgggagggatccgcccaaccagaggatttctaaatttataaaattgaaatgcacttcgggttactgagaagtctaaatttgtcaaagtcacagggtgggaggcaggtcgttgcagcaatctgaagccagggctgccaaatccaagagcccaggccatgatatctagggtccctgggccacgcccttttcaggcagaggcaggatctgggccttgtgtttactaagccttggcatgagtgaggtacgtcattggcatcagtatacgtttatggtacagggaatgactttaagtctgcttctgcatgcatgatttctgagcctcagtcttccagccggaagagtgggcatgagcagtgttgatggttggaaaggattagggatgcagaatgagaaagtactgcttgtctcatgaggcctttgaagatctgttaggaccttccttatctcaacgactccctcttcatcctattgtgtggcacacagtaggtgctcaggggatgtttacagatgaaatggatgtgattgtaagggctgtggtgggggtccttgttacaatgctctgaggtccctgtgctgccccttagaaagtctctattcaagttataactgtcactcatttaattcattatcaattatgtggcaactatatgcaaaactttcaataatgatatttattaataatacctaatatgttgattcctgttgcctgataattgcatttatcattttttctatttttagatttatttttattttttatatgtatggatattttgcctttgtgtatgtccatacatggtgtgaatgttgtgccagaagaggacacggggatgccttggaattgttgttacagatagctgtgagccattatctgggtgctgagaaccaaatccaggtcctctgtaagaacagccagcactcttaactgctgagttatctctcccatctccatgctcagcgtgtttccaatgtttgccactgctgtgatgcagcagtcagctcctgccaaaataatgctgtgcaacaaaacagcttacatcaaattagcatttccccctaccgtgtgtgtgtgtgtgtgtgtgtgtgtgtgtgtgtgtgtgtgtgtgtgtggtgtgtggtgtgtggtgtgtgtgagtcatctggagctggggtgacttggctccagggtgcaagctgaactcaggtctgcttcatgggtgttcattctggagccttgctggaagagaaagctcctttttaagatatgctttctagaaggtgggccactaaaatacaacagagcaagccagaagttggaagagcaacctctgactcagttgttcttcaatatcaaaattgtcaaacaaaacaaaacaaccaaattacaaaaaaagaaaaaaagaaaaaaacaaaaacaaaaacaaaaaaccaccaccaccacaacaaaaaaacaacccaaaaaccaagtggaaagtcgagtcgtggagaggtgtagcctgtacaccatggggtggtggctggggagctgtatgtcattgttagcatttggaagtgtgtctgctaagtgtgcatagagtaaaatgtaatccgaattgtgatattaaagagtagaaatttcactcaactataggtgaggcctctgctctgtaatcagaatcaaaaaaggtcataagtgtgggacgtactgtgatcagatacctgtggctttataagagagagaccagaacacacagagacatgtgctccccccacccccaccccctggctgtgtgatggactgagccaccttgggagtctgtcagatagactcttgagcctccaggaacatgaagtaagcaaaccccttttctttatagtgcttcccagcttcaggtattttgttatagtgacacaaaatgtacttgtgtaaccactgtggaagactgaggagctaggagcaataactcaatggcatgagctgctcagcagtgctcagtaggtggtggagatagaatctgaacctaggcaacctgggatgagtgtctggggagggcatgggtgtgcttattgtcttaagctttctgtatttgtttctctctgtttcaggcgttttgtttgtttgtttgtttgtgtgtgtgtagtcttggctgtcctggaactcactttgtagatcaggctccactcacagagatccacttgcctctgcctccaaagtgctggaattaacggtgtggaccctattgcacaccccccccccccgtccacttttgtctcttacgtaggaattgctgaaggcctgagctccagctgtcttcacagacctacccatccattcttctctccctgtcttcattcacacgaggcaactgggtgttgtcagagctttttggaataacaggctaattttttgaagttaatgttgaggggggaaaattaaaaaaaaaaaaaaaaacccttcttcaggtaagctcaggaacatatataataccttggaaagtcctggtggaactcatatcaaagtggcccagggattttacttaaaaacaatttgttcccatgtcagctgtgatttctgacacctgaatttgaaagtcatctgggtgggcccagcgctatccccataatggggcatgtattggaaagtccccatacgtgtggcccagggatcatgttccacacactcttacaggaagggatttcctccttgctgtttccaaagaaccttcactgtgtttgcttaaaccggccgcatgccctggtctgacagctgcctggcccaggactttgcttgtaggcgcctgcacaacccaccctcttaaacagcaacctgcactgtgtcccagtgcaattactcgaatatataaaccttactgaaaggcagtcttttctccggagctaataaataaaccccaaagccacaacgtgtgtaagaccatgaaaaatggcatcattatctattgggaattgtgaactctgcaaaaaccagctcattgtatttttagaaaaaaaaaggtttttgtttaaaaaaaataataaagacctccaaatcactaagccaagtctacatggggggaaaagcaatccagtctaccgactgggagggcagtctcactgcttcattaatctttctttgcagatttttatataagaggcagtatttgttgggaagctagacagtggtttttaagaactcccctgtcatccagggttcctatctgcagtcgtgaccctctgattgtgacctctgactcagtcgccgtggatgctgaaccagaactctaggactttggggggtgaggtgggaacctcaaacaagactgaaaggggctcccgttctctagaatcacctttagcacatatgccagcattttacagttagggagcattttcccggttgcttcaagaaagaagatgctggactctggccataggaacgtgggcagacccaagactgtggcttctatcctattccccagagtctggggtttggtgctccaaaggctgtcccgaacaagtcttaagagtttaaggtgtcatattttatgttaactgatttcatcttcagcccacagccgatcactggagcctttccttgaagcagtcccagtaggccactgcggcagtggtactcggggtcctgtagaaccttacctctcagaagaagcaaacctacagggcccaagagctaggcagcctttgtagaatgcaaaaatacaacagagggcgccgaaaccactcgcgtcagtggccttgaatatcaatgtatgggctgtctctagactgccaagttccttaaaactgtttctggtagccgggtcactgccacacacaccaggtttcggttttgtcttgtcggagtcaccgcaatacacaaactgtatttacttgctgggcgagggggcggggaccaaacccaccgctcagcagggcgcgcacgccttgatcttgcattccagactcgagctgatgtgtgtcagcgcgacatggggcggggggagggttctgttcagaggtttcattcgccatctgcaagtcactcccaaacttttcctcccagcgctcggggagtcaggttgacgcgccctgggtgcggggtgctaggcgcggggctgggcgcgcgctcccgcggagtcggagctgcagaggcttccgagatcgtcttgggcttttcaggtacaagttgggctctgggtgactgggcagggggtggcgagtagcggcgggcggaggtttggctctgggtcccggtgcccctctgcgggttcgcccaggttggcggggaatgggcgctgggagtccggaccgccagggctgtgtgcagcttcactccctgcgcggaggctccggacgcggaggcggcggcggcccaggcagacaatgaacttggagcgcgccgagctccggcaggtttgggcccgcacccctcggtcaggcctcctcgctacaggcacggtcccctgtaggaggcgtccttttcgctgcgcggtcctggccgtgctctaggtgcccagcacgcctggggaccctgcgggaaggactaccggtggcggagccggggctcacacgccccctccctagacagagcgaatgtggtccgagctccaagacagaggaccgggtgctggcgtggtggcgctgtggacagctggaggccggcggaggacgcacgccgcggggcacgcaccggctagctgtcccgcagaaccgccccaaggagtcagaattcgcgcgaccctgggtcggccaggaactgagagggaaggacgactgatataaggccaatgaatagacagatcggcgattttctggagcgagctctccacaggcagagctggggaccgggattcccctagtcgtgttcactgcccctcccccgcacactttaggggaagtttccaggcgtagcctggggcaggtacgtgggcatctgccactgtctctgggtaccaatcggagccgcctcgggaatccgggctctagccgcactgccgctctgggtgggaaggctcgtgtgggtctcggggaacagccccaggcgtcagcgtctgtgggagcaagattcccgaggagacaccgtggggacaggcctgggaggaaccgagggatcagtctcaactttttttactcgccgcttttcccatcgtcgctgtaccctagtccccgaagcggcctgactagggagtctcagctgtgtctcccgccagctggggagcagagagcagaacgaggcagctctgagctaagccgtgggggcggcggtggcgggtggtgatggtggaagccgagaaggcaggggcccggacgcgaggagcgacgctgaggatgttgatagcgtgctagtccgtggggctgtgtgctccaatggagtggaagcgggcgttgtgtctggtagcgggtcttggcgcacttgcccatgtggagcccgggggatcctggatggcggcagggcgaggggagccagactgtgcagggaatgaatggagagcaggggaagcgccttctttctccttctggcgaatcgattggccggcttgcgctcatttgtgttcacgtttaggactccgaggtcccgcgcaccctcgttttgactgccccaccgtggtcgagtgtccacgttgcctgcctgcctgcctgtctggatccgctagagcgagcaacccaatgctagggctggtttgcttactgctaggctactggtggctggacgtgggcacctctagtaagcgcgctttgtccgggttggaacctgggggtgggagtgggggtggggcaccttgtcctaagtcttctaatagatctgctggactctcactgtggcgagtaagttaatggcatggagtttccaggaatgaagttcaggaaagccttgtgacagcctgtggccagcgactctgagctggttactcttttatcaactgctacttcgttcgggccggtggggtgcctctgtaagtgaggactgggtcttcagaacatccactttctgcaattcctgactggacggtgtggatcacttcctgggttagggtgagcatcccaaaagttcatctgagaacatctgtagtcccctctactcaaggtgaggcagaggaaaccgggaggtacagaagctctcccaaagtctcccttggaactcccctgctctccaactgatctttcctgtcagctgtctcattgcaaaatcaagactcccttctgcagaatatgacattgactggttttgcaaagttgatctgttgactgatccacaaacacacacatatggttttgttcaaagtagcttgggaataaaaaatggtttataattgggttggttttgaccaataagtttgcttcccccccgctccccccaaactaaagaaaaactgaggataattttccttttttctttttgtcatctcaagagatggagtttggaggggaagtggcttgctattgttgtttctctactagggcagaggtgaacaggaagtgaagctctgggtccaggcttcctcccaaggtcttgctcccaggtagctatctcagggtctcctgagggaaacagcaccgaggagactggttatcatttgctttttgatgcatgcagaacctggatcactgtcctagccaaagatccagtgttgttacctgccattcttccatcttcatcctttcctccctgtgtctgaagaggggcctggctttccacatttccgagagattaatccttgcatcaggaggaagctacacttgatggaaaggttgggaccagagccaaagggactctgcttattcagaccttgagaaggagctggggagtaatctcagattaacaagttgggccctgggagctggggagctttgaacctggagatagcaagttggagatgtgtgtgtgtgtgtgtgtgtgtgtgtgtgtgtgtgtgtgtgtgtgtgctgggaagaggagggaaacacctttagcaggtgagcaacacaaaggaaaacctctgttcaactctagccagttgttcacggctcttgtaatctcaacacagttcttaaccctagatatggaagcgtgggctggaatctcaggatgatggaggtggggtggtggtggtggtggtggtggtggtgaatgctcttccccagttcaaagctccacgtctggccccttgctgctacttaaagaagacccacactggtacagataaggactaatgtgctacttgtgctacttctcatgcctgggcctattgggcttgcctaggtccccccacatgctgtgtgtcatgtgtccatagctaacccatgcaccaccttaatggacagtgagacttgacataaaactttttgtataccaaatagattccacccttgagcctaaggatggataccttggggataggacagacaaagcgcttgccctcttttaagagggacagacagacatacctgtgtcggacagacaaatgatccttaagttgcaggcctgggagcaagagtgaggcaaagcacgtgcaagaggggggttggctgagggggtggagaggagcctgggctgcagctctttatggccactatgctggcttgggtctcttacaaagtcccagataaagacagcccttggagttggcagctgtcactttgcgcctgttcctcctcctggagcttcagctggcccctatttgtagagacattgtttgaagaccatttgtgtgagagaggagatgtttttcaagagttgtagctggtgtgggggtgtcagtcatctgagcagtcactcaggagatgtgtcctcagtggtgtggggtttagaagcgactgttgactcaatgggaataaacaaccttcgtctctttctgggctgtaagggggctcaggtactgtagatattgagttacttcgaagggcagtttggtcctccagctgggaataaagagatcatgtttgttcttagcttgttgactgtacagacagggtgtttcaacttacacagtcctcaagtattggggtctagcatggtccctgagactgcttctcctctgaaacactaggacctaatgatacacatgaagatctggctctctacatcccgaggtgaacatggaggtggcgggtgcatgcttagcttatccagcctaatatctaggaagaaaagggcttgtgccgatgtgggccaatagggactgtttttctaaaatacgagaactgagcagcaaggctgtttttgataatagctgtcattagctgcgtccctatacattcacagctagccctgcgctaggcaagtcccacagatgtttctatccttttgcctctttcagtggtccggggaagggcaatggaacccccaccatgattttggttatttatatgtgcaaggaaggatgacggaactggagtggggacaggcctggacctagaaggagaaggctgtgcagatcataagtggttgtgtatgtgtgtgtctgtctgtctcagggttgacaagtgggaagcaatttctgtcctttacagaatttgctaggatgccagggaaaggggagcctcctctctgtcatatgcagtagctctgtacagtatttatgcgttccctttaggtgtggccccgggccaggtgcacgggggcagagagtcagctctcagcacgccgtccctgctcagcgatgagattagtgggcgaggcagaacttgtgcaagtcagaattacataatgctgctgacagccgtctttgaggggccttgggaaagtacagtgggagactggtgagtagcttggaggttggagctttggggatgatgtcacccaggtgtcctataaaagagcaaagccccttccaggtgccaggaacaatgcctggcaatgcattcaggaagcactgggtttttgtggtatttttttatttttattttatttttttggttatagaactcatgactgaagatggagagacatctctgaggcctaagattgcatggnnnnnnnnnnnnnnnnnnnnnnnnnnnnnnnnnnnnnnnnnnnnnnnnnnnnnnnnnnnnnnnnnnnnnnnnnnnnnnnnnnnnnnnnnnnnnnnnnnnnnnnnnnnnnnnnnnnnnnnnnnnnnnnnnnnnnnnnnnnnnnnnnnnnnnnnnnnnnnnnnnnnnnnnnnnnnnnnnnnnnnnnnnnnnnnnnnnnnnnnnnnnnnnnnnnnnnnnnnnatggtggagaaccactggcctagagcatcatatcctccctccaatataggctactctgaggccttggccgagaatatagtacagtgatagagggcttgcctagcatatgcaacgaaaaaagagaaaagcattgagagagagacagagagagagacacacagagagaggtcaccttgttccagctatgtttcctgaagctggtctgtaccatcttctcatctgtccagagagggaaagggcctgtgggtgctatttaacactgttatattaagcaaggtagagaccaggtcactctcaagaaaaaaaaaatgctggtttagctggcctttgaatgtcacatcttgagcccttctctgagcttgaaaggggaatgggtgtgggcagggagctcctggatggggcgcgggctcctgacacctcttttacatctcttgaactcatctcagttcaggcattttagctttctgaggaaagtaaggctggcaggtcctcaaaagcagagggtgtcattaaggaaagaaagaaagaaagaaagaaagaaagaaagaaagaaagaaagaaagaaagaaagagagaaagaaagagagaaagaaagagagaaaaagagagagagagaaagaaagaaagaaagaaagagagaaagaaagagagaaaaagagagagagagaaagaaagaaagaaagaaggaaggaaggaaggaaggaagggaagggaagggaagaaagaaagaaagaaagaaagaaagaaagaaagaaagaaagaaagaaaacttgggtactgtacagaattgtgtttgtggtaggaacactgaagcaggcagcctagtcacccaggtgtctggaaaataccccaacatgaacagataattagatacaggctgggcacaattctgttttccttacagtgttctggggccgatggtttcacattttctctggaaatggaatatgtgcctgctgggctgttttgttctttgtggtcaaaaagatagtgtgacggccacctaggaggaagacatgcttttctgtgctcgcttcccttcgggtactgggcccatggctccggcagcacataatccaacctgcattactgagtaggagaggttagagggaggatccttgcagtgtttggctgcacccttgatacgtgggttttaaagcgtgtctgcacattatctgcttatgaatgatctcagtcaatgcaaagaagggtagccggcacttctggtcagcatgtttagggccacagtgcagacattctcctagctcagggcttggacaccctagccactcagagaaaccatgtaagtcccaggcagagcctgtctcggcttcaaggcaattctgattcaagttcctgctgtgttttccctcttattcccgtgaccctggcagcaaggcttaatgtatcatagtctcctcatctaaacacctaagctaacaacctctgcctgtatagtggtttattataaatagtacaagttcgggttcagggatactcccgacatccagctacttttctggtggagatcaaatgtgacttttgttcttatcggaagctgaggttggcaagtctggtgaggcagtatgatggataaggtataccatgagatgctttgactaactcagcaagtctgcacaccattgggtgggtgggagtgggctttccccctcctggacaggtcctttcctccttgctggaggcagcagaagtgtctgctgacgaaaaggcaagcagtgaaggtctatgtctcacttctgtattcccaggactgtatagatactacctggcgtagacactggaggggtgatacgtgttgctttcttcctctgtctggaagcaaagtgttgggcacagtgtctggcccatgataaagggttggtccctgtcctctcttggggatgcagtggacaggatggcccaagtgtgcatgtgatacatcgattctgtgttggtacttgctatgggagactacctggtttgtcattccagggagtgactctatttagattccaggctgcgttcaaagaggaatgcagttcacttgaatggaggtaatggctgactgctagccagggtccttttctttttctttttcttttttttttggggggggggtgtctctcaactggcagtggagttctcccccacctccttcctccgttttgtcttgctatgtagctgaggttgatctcaaactgctgcacttacgtgttatgctgggacacttggcatacggtgtgcctgctattggcttacgctcttaccaggtagagttctgtctttgtgctaagttccctgaccagccagcctagacttagctatactcaggtctcctaggcactgagaagggaagtcttgcatctgctcattcttccttgtgtcctgaccctcacttaggatcactcccactaggaagtctgggcaggcgctgctgccatctcgcatgttcccccttaaccccgccacatacagcatctttcctctgagcttctgtagttccactcttgtatttctcagatttgaaccctttctgtgtgtgctatgttctggttttctaggtaacgtctgcttacctggcctattgagccccttgatagagagaagagggcctgggcccttgtcaatttcttgtcattggaccctactccttgttgagactgatcactatgtattaagttcatgcatcaatttacaaagactcacctgagagctggtctcctggggatgcttgtgtatacttggaagatagggattttggacttggtacaatgacccaggagttgacattcgttgaccttctagaagagcctggtgtaatgaccctggactcctggtatcacatttgaggtgttaatgtaaaagcaattacagctttttaaaatgtgacttgagaatcgtggggagaatgttatgggaatttggttgctgctccaagaatataaacaggagtcatgtgctcgggcaagagccaggggccgttagcattttgtgtgcctggaacatatagcttgtcttagggttccagtctcctttgtttggaatgtaaatatttgcattaaaaatataaagtatgtcctagtgtgtatttttagtgactgtagtttctaaaccccaaatcagactattggtctacagaggattgttttcctccaatttgtgaacctgtttatataaagagtcttccaaatgtacacataccagaccatgtttactttgtgtgcatgacggatctccgggcctccaagaaattagtggccctgatgaatcagggctgctggtgccccttctctacttttttcagttgcagagctatcagtagcagactttgagcccaggtcccatgggatcatctaactctgttttctggtttagtttcctattcatagtctggtagccctggttgatctctgtgtcttctaaccatgcactttgtttcagaactgtttattgttctaggacagaggttctcaactttcctgatgctgcaactctgtaatacagttcctcatggtgtggtgacccctaaccaaaaagttatttttgttgcttcataactgtaactttggtactgttgcaagttgtaatgtaaatatgtgataagcaggatatctgatgtgtgactctggtgggggttgtgacccacaggttgagaaccactgctctacaacagcatccaggagaatgacgttgctaccctgtggctccattgcctggctgctgttgaactgtgcagatctgtgtgacaattttctccatcatcatatttgagacagtgtggtttttcactcgtcctctggaaactaagcccagatctgtcaagtgtttgcttgctgctctggcctgccttgttttctgagttcaaatctagtggctgatgggaactgggctagacctcctgccctgcgtggggggacagtcagttctgggacttcctctgaatcagccttggattgaaagcataacggggtgaaaagtgtcttcccttcacatctagattcttggctgggttacaaattaaactgacacaagacagatggacagaagggggaacatagttgattatacacacatactcacacactagaacgtgggaagaagggggaggatggttgaaggtcatcctgagctagagaaaggagcaagacttgagtctcctgggggaatgcccacacattacaagagcgtagggttaagtcttggttacatggtcaacaaacactgtcttgtgcagctactcaggataactaatgctatcttaggaacaaccaccaaaagacggggtgagtctgcctgagtaggtgcctttcctcactgatgagtgtctggggatgggggtgatgatacacagcttgaattccagtacttggttggcagaggtgagctgatctttgagttggaggctagcctgatctacagaatgagtaccaggacagctaacactacacacagagagaaatcctgtcttgaaaaccccaaaaaaaaaaaaaaaaaaaaaagaaagaaagaaagaaagaaagaaagaaaaaaaagaaaaagaaaaagagaagaaagcacttaagaaataaagccagccaggtgtgttaacacactgctataatccctgcatagaggaggcagaggcaggtggatctctgtgagttcaaggtcaccctggtctgcaaatcaagttccaggacagttagggttnnnnnnnnnnnnnnnnnnnnnnnnnnnnnnnnnnnnnnnnnnnnnnnnnnnnnnnnnnnnnnnnnnnnnnnnnnnnnnnnnnnnnnnnnnnnnnnnnnnnnnnnnnnnnnnnnnnnnnnnnnnnnnnnnnnnnnnnnnaatttgactttgtccaaattgttctggcttgaacatgcaatgttcaagattcaagagctgcggggtcatggagactcgcaccaatgtcaagagctgaggggtcaaggaaactcgcaccaatgtcaagagctgagggggtcatggagactcacaccaatgttccagagaacaattatgaaggacaagcaatgtagagggacaccacattctgagtgtggaattgtgaggatgaagccaaatttgcaacagagacctggggatgttctacatgccaggaaaagggaccatctgttaagagctacaggcagggctggagagaaagttcagtggttaagggcactggccgctcccgtaccaaggacccaggttcaattgccagcacccacatagctgcaaatgtacaaatgtaactccagctcccggtgatcgatggtaccagccatgtactaggtacacatatagacaaaatacccatatacataaaataaaagaaagaaagaaaagctacaggtactgagtgaaaccagaaaccaaagagactacatgtgttacaggtgacaagactttatgggtgggcttacctgagggggatagatatgaagctacaggatttggctttgccctgctgggttttggtcttgccttgagcccttctaccctaatgggaatgtttattccacaccattgtatattcaagacatgttacctggcttttgctattacagggactcatggttaagagattgtatgagttgtagaagaaactttgaatttagtgttagaactctaagactatggggacttttgaagtttgaatgaattttacattatgagatggcttatatagaacggggtagggcaggatgctacgctttgagtgtgaaatgtctcttacagactcctttgcttgagtacttggtcccctggtggtggcactgcttggagatggggtttgagtggcagctgtggcaccctagggacaggtctagaataccatagcctggctgtctttctggtcctagttcttgtctcacggttggctgccagctgtaagctcctgacactgggtggagttgcctgtttatatctttctctaccacaatggacctagagcccaaatacatcatctcttgggttccttttgtcaggcaatccagcatttgtgacgctcatgttgatgatccagtgatgaggaaatctgatgaatcaggtgacatttccttacttctttaagactgagtttcatcctcttaggaggaagaggagggagaggaggaggagaaggaggaggaagagtaggaggaggtgggtggatttcttgaagccaggagttcaagatcagactagtcagtgtggtgaggccccatctcaaatagcagcaacacacaaccacaaacaaataatagctctttggcttggaagaggaaggaagcaggctgctgcagctgctggaaaccaggagctggcccttcatggagcagcctcctcagtgcagggtgaagggcaaatgaagggcaatgggaggaccccagaatggcactttcagggctattgcccccctatgattcccacttctggctccttttgaatggagtgccttatcttggatgagactgccttctccatccactgaacactgacagctttgggcgaggactccctgaggcaggatgatccatctttccttgctcgtctctgtctctcaaagggcatggacttctaggaatgcctcctggtctgcttgggagcttttccttcataactgtcctgggatactgagccctacgtggaaaaggaagtgaatgggaaggtggcccaacatcagaggagcagagttctatgttacccattaccaaacatgcgacttctagttacctaacctcctcacccatgtgataggacttgggagtgaggaccctgggaagggacagcttgtggattctaggtgttgaactaaggaaacacgctactcctatctgtgtttatatttgattcacagtggtgtgggcctcactgtttgtcattgttttaaatgcaaataacccgttccaggcaggcttcagtccagcaatgggagggcattacactgaacatgaggaggtagctgcttctaggatgtgctgagcttgcctaagaaagttatcagaaagacgggatgaggactggaagggtgctcattctgagaactgtaccagcctggcatttacactgtgctaactctgaggagccatgtgacacctccttgacagcagttttagtgaggtgactgggggcggggcacatgaagccagagaaggaagctagtgctccgaaccccttcttcagagttatctgtcaggccaaagcagggagaaacaactgctccctagccaacaatggggggatccacgaatctttcgccttgtgtatgatttagctcagaataaaaatgatgtattaaagagcaggtgaagcacccttgctgtctgagtgggagaagataaatttgctttcagctgctgcaaacaaatcaatgggaaaaccacagggctgctcactctccagtcttcagatttacaagaggaacctctgtctattcacagggcttccccttcagatggcctaggacgtggctggctcccttactcgtacatgcagaacatcgctctcatctggctgatttttgaaagtcatacaacaggccttaaaaaacaaaaacaacaacaaaaaataaaccaacctcattcaacattttcttttaagagcagcctttttgagatactacatgctgtgttagttacttttttcattgtcctgacaaaaatatcagacaaaagtaacaagaatgaggtttattttgacttacacttggagggtacagtttaccgtggtggcgaaggcatggtaacaggaacacgaggcagctggtcatgttgcaaccacagtcaggaagcagacagagggaaacgctggtgctcagtttgcttcgcctttttatttagtcagggaccccagcacgtggtggggatggcttccacccaccttcagggtgggtcttatcttccctctctagttagcgctttcaggaaacaccctcacagatgtgccacaggtgtcttccatggtgattttaaatctagcccagttgacaagtcacacatgctgtgctatatggttcacccaagtatatagtgtgatgttttgtgtatccataggtatgtgcatcatatcgccgcagccgatgttaatggcccttcacccactgagcaagaaagcctgcaccatctttccgctactaccactgttccccctcccaccaccaccacatgtagccctgaaagttacaaatcaacttttggtctctgtcaacctggttcctcaactctgaattgtgaagaacgtggtgctctgtggatgttctgtggtgttctttcactttgtattgttcacgttagcatatgaagtccatttttctaacggccagaggggactgaccacagctctgttgattctattgtcccctggtgctcatttccattgtctccaggtttttggctctcatgagtatcgttattgtaaacattcgtgtctatgtgtttccatttctagggttacatttatttgttttgttttaaggatatttttactttcttccaacaacaaggtttatttattttcctttccctggcccagtcttgctttctttacacatggggtcttggccttgcttgttgtgatgcgtgaaaatatactgaagagtctggattgttgagtcaaaaggacctctgctgaacatagttcagatcctccatatagactcagagctcacacagagtcagggatgaatctaggtttctgagttacaattcagttattctctatgttcttccaaattctttgtaaaaccccaggctgcctttttgaccagcctggggaagaaggtgagggtgggtggacagatggtgactgccctgccccagcccacttctcacccaacaaaggcctgggagtctcatcttctccagattccaatgagagctgcaaaccctggcgccagtggctttctagttctttttccctgcagcagcgagagtccgctgctgatctggaggagtaattaaattaggaaccaattcagagaatgaaattttatctgatctgaccacatccataaacaaggggctgtgattgggactccaggagacattaagaagttgtgttttaaggacttgtgctgggctaaagcatgtgaataattccactggggccaagctggaggcctccctggccaaggttggcagtggacaagagtgtgcagtcctgggggtctggctgtgtccccaggccagccttgcacatgctttgtttccatgcctctctcgagcttcagtgtggtggagctgtgtgttttgtggcagagatggtctctctatttaggagagttctgcctgatctttacgaaacgactctggaggatgctggggaactccgaactggccctttgccacccagaccagcaaacaagatagccacgtggcccaagctgacctcaggaaaccagaaagccagatgcctgctctgcccacttatacacagagatgtacagagagtagagaggcaaccccagaggtaccactcagttttgtagaactttccagtgccctgagtggtggaagacagtgtgtagaaagagaggcctgaatttaaagacgtggccatgctgacaagagtccactatgtggggaaataagggattatggaccaagccagggagacaagcaggaccccgatgcccaacaaagaagcacctggcttcttcctcttctacactaggttcaaacacacaaagcttgacttcgttgttggagatgttggagacgagacaggctggatgtgaaatgacccaagggagaatgggaagctgtcatcagtccctgaggtgggaagctgaagggtgctgctttctgtctaaagggaagcttgccagcattgggcctgtgagatgagcgctgttgacactgtgctggactaggaggcagagagagcagcctaacatagggggccaagccccaggggtccagtgacagttaccctagaaaaaggtgcatgagggaggtggagatgagagagaaacatgagttgaaacattgtttatcccccctctcccaaatgagccaacatagctctctcatggtgtctttgctagcactctcactaatggcctcttaactgtacaaagaggtaaagttgggaggaaagttagggaccctaaatcaggggtgctgcactagaaaccccgcagggctttgaaagacatggacattctttggtttcctattagtttgattgattagattgttgaaggcatctatgtgtatataggtgcacacgtgcatacgtgtatatccatagagctgtctgggtccagctctttaggtagaaagcgctctctggcacttggcagtgattacaaccattctctgaggggcatttgtagtccgttcacattgaagatgagggataggtaaatcagaacaatgattatgggaatgagtctcatctgtcctccgtgtctgttgcgacttcctctgtgactgtcttcatgtctcatgtccagatttgctagagacaactcactttcccttgctctgcagtgtatgtgtgtgtgtgtgtgtgtgtgtgtgtgtgtgtgtgtgtgtgtgctttagatctgttttccttctctttgtgagtggtcccaccctctatttccacagcagccaagccagagacttgggcatcatctgtgacagtgagctgatgaaacatacttgcctttgttttatctctaccacttcctatttcattttccatttgaaataggaaatgaatcttattcaggattggaaggtgtgtattggacagttgagtggatgtgtggccaggctgatggatggaaagaagacagtcgagaatgggcagaagtgtcttgggccacagtgcatggatggcttcagtcttttccatctgtttggttccccaccctgtcactgcctttgtagctacagagacccgctgagatgaatggcttgacttgctctttagcccccttcttaagaaaacgtagtctgaccccaaattgtcacgtgcagtttcatctataggtcatgaacacccacctgagccttgctggccagcagctgctttgaggttcggaaaaccagggagagaagagagattgaaaaaaaaatactgggagccttgtctcctttgtagcggttggcttgtgaacaggaaagagaagggagccatggtagacagctagaacaatagtcttaaaaacggtactgaaacaaccacagagtccagacatgagcatgggctgttaacctgagttcagtggtaattcaggcagcctgggtctagggatgggaactaggcaccttaaacatccacactgattacctcagtgaccaacgctatcttgccttgccctcttccatagaacttgatttgttcttgctctttcccactgctgcttctagagagttctctggagagtcctgccgtgggtttcccctttgctgctgctgccttgctgcctgctagtggaccccaacactgcctgcctatcccatgccctgccgtcgcccacagggaacggtgtctccaggagatgtttctgtggttccctagccctctgtcaggacattctgcaccttgtctacaggtggactgctacagataacatgtagtagtattctgcgctggtgacatgtgagcgccagcctttctgccctgcctgcaaacacgctggcagatcctcaccagatgatccctagtccctttttgtgtgttaggtctcccccagtcctcctcagatgtccttacatgactgtcacgctagaaagtttgccagtaaatgttaattatgcaacaatacacagatctgcttcccactgcttaagattaattctttaagttgtggctaaaatataaacttctttgtagtttagtaaatgaagagaagagaaaataggtttctttttctttttctttttcttttttccagagtagcttgatttagaatcattccagatgttcacccagcatctctctttcccgagcccaactgtctggaagctgtcttgggctgaaaacctgccaaggacccccttaatctctccccacttctaacactgcctcataattttaactattttgaaatgattttagacatgcaggaagttgcagcgttcctatgtaccctttgcccagcttcctacaatgataacatcatctgtgaccctaggaccccataaaagccaggaaattgaggctggcccaatctcattaaccaagctgcaggccacagtctgcgtctcttgatgttattaaacccagggattcacagcactttggaagcgtttagaatttcactaagttcagttccgtcttttatcatttagatgatttttggatcctttccaattggcagtcaatgatattagtttctgccaggtcaataaatccttgaagggccactttaatgcatttcatgaatgctcgatcctgcttgatactctatgggttcctctacctgaagagtggacccagataaccctcttatctgggtttgaggaattcctggagacaaggaatgattcaggtcagtgtggtgtaatggaacatatgactgaaaactgaggtcttgagatctgatcacagtaaccagaatacatggggttacctaacattccgagtgcccccatttcatagttcaaattctagcaacttagtagtagagttgggacttgaacctagatgatctgaatcagagagtgcttgcagcctgttagcctttcaagcgggtctacacacttttctggcctggttctcactgactgtgccctggttgccccccacccccacccccacccccagctctgagatgggctttactaagatctaccacatctcttaatgtaagtgcagtggctttcctggtgaaatggttttactggcagagctgggagccctcaaaaagaaacaagcaacccacccaaccccttggaggtgctttaaggtgagatttttgtagttgtatttaatgtgataggagccttagttcccattgaattatcttttgatgtgttttaattaggccatctgcaaactgatttcaagatgcaaaatcccgagtggccggccagcccagcacccccatgtacttagctcaggactcacatgatgtgtgtgcatccctttctccctgtcatgggtgccattaatggtgacatgccactagtatagaatatgggaactttgtctgcataattgggtttgcagtctctaccaaggaagcctgcttataaatggtgtttaagctgcacaggcttgggggacaagctgtaaaaaccaacagtgcagagcactgggtgaagggcttaattttctcttctgcttggggaccaaacacattactccacgaaggtaaagattttcccatttatagaggctgtgagggataagcctcggctcataaatttcctccatggcctctcctcagagcctgtgagatggcctgactccggggaccagtgtctaactacattagtgcgataaattaaagggcccagtgttggctaaattgtcaggcagagctgcatgggagctggccctgagattggacttgtgataaacaggcttctgctagctcctcctaggagagggaccactctcgtccccattcccaagcactcctaggaaagctccagtgataacccaaatctgagacagaaggtaatgttcagagtgagtcgtcatcagctggaatgcataggaaggaattcctgggtatgttttctccattcgatctcattgtcattgtcattctatctgtcttgtctgttgtctgtctgtctatctatctatctatctatctatctatctatctatctatctatctatctatcatctatctatcatctgtctgtctatctatctatctatctatctatctatctatctatctatctatcatctatctatctatctatctatctatcatctatctatcatctgtctgtctatctatctatctatctatctatctatctatctatctatctattgtctaatttgttctaggctattcttaggttaaatatgtagccacggatgaccgtgactttctgatcctcccatctttggattgcagatgtgtgccaccacacttggtttatgcaatgctgcggattgaacccaaggcgttgtctatgccaggcaaacattcttaccaatggtcttagtaacctttttattgtgataaagcatgtgaccaaagccacatagagaagaaagtgtttaatatggtgcttatggtttcggacggtagagttcataatggtggagaaatggacacacagggaatattgctagtcttttggaaccacaaagcctgaccctaacgacacacctccttcaaggccatagctcctaatccttctcaaaaagttccaccaactggggatcaagtattcaaacatgagtgtatgggagccatcatcattccaaactgagcgatattcccggttttcattattaaactttttatgaatctatagactggcaatgtgattttcaggctttggtgcaacatggtcctaagagtcccatattaaagaagccagaacttctttatagcagagcattaaatgaagtacacagagggtttgaacatgagttgactttacaaatgttcatgtagctggctctggaagcttgcatgatactgaatctggagggatctgatgtagggcaccttgggagagtcagagtgtgaatgcccagatggcagaggtgtgctgaattctgtgtacaaatctccgaggggtttggccaggtgccattctggggacatagtgtgcctgtctggagacactcttaggaatgcttaaggaactgaagcaacacatcatgattttcctaatcagagctggggtttcattggctctcagattccatgggtcaagtctctggagtaattgcccctggagtaatccagaattaactgggacaaggatctaggcgtctaatgaagcctaatgtcttcacagctctgccttgaagacaaatctcttcctgtcctcttgcctctcggcctcagtcccaagatgggaagtccatctcctcactcctcttggcttttcacctctgatattttctgcttgggctttgtcctttgtagctgagtggaatgtccttggagagagcccaggatttcaaaggcctccataggtcattctagtcactgtgaagaatgtcaacctacaaagacaaggggtttccaggggaggagagggcatttctgggaggatatatctctcccctggagcaagtggctgcagaacttggcaggaactttgcctggactggtcgagacatggtaggtgatagaagtgagaacagtgtcaagggatgtctgccagagagggacactaccctccaggacagttcagacttaaaatggtttttggtcggaaatggtaatcttgaagaaggattaaagttacctaaacattagggaaagttacctaaacaggagagctgccccattccacactgctttggagatggatcactgggtagtggtgtataatggccttggtggtcaccaactttgtcctcagtttgtacagaggccactggacttgtgaatccccagccagccaggactctgttctcatgctgtgttgtcacaagttgataaacctgaatgggactgtgattcttgaaagaaagtaactgtcttttatgcctcccggctacagctacggggagaaagtgtggcaggtagccaggtgtcctggggtacagtgagtggaagtcagctatacctgcttgcctggaattagatcctcatggacagtggagtactaaaccagtgtttaacacagtgagcgaataacaagtacagagcttatacattcagctgaaagctggttttatttgttttccttggtaagagagccacaatcactgtttttttactttaaaagggagaataataggattaaacatctctatgatactcttattagctgacgtgagagcctgatacacttggctaggtctggcttaaagatattaggggggggnnnnnnnnnnnnnnnnnnnnnnnnnnnnnnnnnnnnnnnnnnnnnnnnnnnnnnnnnnnnnnnnnnnnnnnnnnnnnnnnnnnnnnnnnnnnnnnnnnnnnnnnnnnnnnnnnnnnnnnnnnnnnnnnnnnnnnnnnnnnnnnnnnnnnnnnnnnnnnnnnnnnnnnnnnnnnnnnnnnnnnnnnnnnnnnnnnnnnnnnnnnnnnnnnnnnnnnnnnnnnnnnnnnnnnnnnnnnnnnnnnnnnnnnnnnnnnnnnnnnnnnnnnnnnnnnnnnnnnnnnnnnnnnnnnnnnnnnnnnnnnnnnnnnnnnnnnnnnnnnnnnnnnnnnnnnnnnnnnnnnnnnnnnnnnnnnnnnnnnnnnnnnnnnnnnnnnnnnnnnnnnnnnnnnnnnnnnnnnnnnnnnnnnnnnnnnnnnnnnnnnnnnnnnnnnnnnnnnnnnnnnnnnnnnnnnnnnnnnnnnnnnnnnnnnnnnnnnnnnnnnnnnnnnnnnnnnnnnnnnnnnnnnnnnnnnnnnnnnnnnnnnnnnnnnnnnnnnnnnnnnnnnnnnnnnnnnnnnnnnnnnnnnnnnnnnnnnnnnnnnnnnnnnnnnnnnnnnnnnnnnnnnnnnnnnnnnnnnnnnnnnnnnnnnnnnnnnnnnnnnnnnnnnnnnnnnnnnnnnnnnnnnnnnnnnnnnnnnnnnnnnnnnnnnnnnnnnnnnnnnnnnnnnnnnnnnnnnnnnnnnnnnnnnnnnnnnnnnnnnnnnnnnnnnnnnnnnnnnnnnnnnnnnnnnnnnnnnnnnnnnnnnnnnnnnnnnnnnnnnnnnnnnnnnnnnnnnnnnnnnnnnnnnnnnnnnnnnnnnnnnnnnnnnnnnnnnnnnnnnnnnnnnnnnnnnnnnnnnnnnnnnnnnnnnnnnnnnnnnnnnnnnnnnnnnnnnnnnnnnnnnnnnnnncccctccccccctctcttctttcttctttctttcatgtgtatgggtgttttgcttgcgtgtatgtctgtgtgagggtgttggatcccctggaactggagttacagacagttgtgagctaccatgtgggtgctgggaattggacactggtcttctggaagagcagccaatgctcttaacagctgagacatgtctctaggtagagcccctctattttccttatcttacactcttccttgaccaccccagagttcctcccccttcagtccagtggctcacatgttcagtgtctctgatgatgctaggcttctatggccagcacttagggtcccagcgatttgctttcactctctttgagggtttgagatatttcctgtaaacgtcttgtaaagtagaaactttagggcagcccagggactagaaggcttccttgcatggggatgctggctctgtgaagtgacctgaggattctgggatgaaacagcaagtccttctggggtggggtgtaacaggagcatctagggttattataaaccactcacgcttccaccctagaaagccttgtaaggaaagatgccaaaaggagtgggtatttgacattccttgaaatgcccactgaagttttcttccctgtctttaggccccaatgtgccagtggccactgggcggatggagcaaggcttgtagcctcctgcctgactcctctagagaggagccattcaagtccttggcacctggaggccattagccccctgactccgtgctggatcataaaataagccctaagtgcttatgaatgctgctaaccctttaaaaatgtatggacagcggaagttcagtttggcacctctgaaaggaaatggcattggtctgatggaaaaacactcaccttcatggtggaggtgcaaggggtaggtggttagaacggcccatgggttcttcacccctttacaggtagaaacttaactctacccattaaacatgatgaattatttttaccattttgtttttgagacaagactttgtgtagcccgggttggccttgaactcctgatcttgccttttcctcctgagttctgagattataagcgtgagcttatggactgcttttaaattggaatacaacgtacatgaacaacatctgccacaagcatagagcttgaaggatgttcccaaacagctccctcagggacagccagcagggctatgcacagcaacctagaagtccctggccctgctctatgcatcactaaccacctccccaccctgcttatgggaaacctgtcctcccttccatagccttgatctttttgtttggatcttggactccatgacagtggaatcatggggtgtatttgcctttatatttggactcttttgtttgataccatatttataaaattcttccctaattttgcatgttcatttttgtagccaggttgcgttcatccactccactgtgagatgtacaatttggagcatcacacacagaactcgggccgctctagattgagtattttggcagatctgggaggtgtctctgggcatgtgtgcaggggtagatggccaggctggggatgggcttacctcaggattctgccagcccttcaagtgatcaagataggcccacctgcagtgggggacttccataaaatgaaataggagagagggagagggagagagggagactgtgttctgcctgagttccccaaaaaacaagatcctaagggatgactactggattgatggactagggagtgagcccttaaggtgagtgagcttaaagatctccctgtcccaatagggctctgtaatcccaactcacatgtcgtgggaagtagtctgttctaaatttgagctatggggattggtcagtccccatggaagttctaggaccaacattttagtcttgatgttctggggtacatgtgtgtacactggctaaacttgtgatggaagtcattgatttagaagccagcctggaggtctccctcctgaaaggagagcctgggcctgtcatatacaacagtggctcaatcatacagggtcttcaggaagtgcaaggggagagagaggacttgaagctgccacacctaggctgttgcctacctgcatagccccagccatatgggttcatccactgggacaagcattgcacagttttatagcagccctgggaaataaatgacttcccaaacttctggctggcaggtctgcaagaagagagtgagacatgagactctgtgccgtccagtgttcacagccccagcagtcccaaccttcctgtaattctgcactctggccacctgcattatctaccttcatgattcgtcctggtggcatcacgtagccagcagaccctcgtaatgtgaccagtaaaaccaaggaaatgggatttttacttttcctttaacatctcctaatttcacttaatttaaatttaaagcagattcttaactccagtgctaggagatttttttttaaagagtatttggagcagcttgggcacataactcctataaaattatattgtaaaataagtacagatcagttactctcgggtcagatgggaatttagcacccaaaatgggacatgctaaaaatgagaatttttcattaacagcttctatatgaagatatatggaaatggtggcatcttgaaaatgttgggttgaatattgcatgcaaatgaactcttccctgctcgctcaagcttgggccctatcttactggaattccagtggaatgtttaaaggggtgtgggaacctgctatttcccatcttctccatcacctgggagtggctttgggggtgactactcctcaggacccctggttgctccaatgggtctcttgggctctggttggcttgtggcagtcctgtccattgttccttgtcccaagaggggggaactctggcaaagctggggcctgtcctttctgccacttctcttcaagcatcttcccacctcagctgaggagtcccttcccctcaagctgagtgttctacttttgaatttttaatgcaaaaaatgtcattgtatgtggtactgtgtcactcaggccattttgatgtaagtacacactgtgtgttgtgtatattctatccccactactcccttctttcacctctccctgcaggacaggtctcacccacccctccctgcagttcatctcttttgttgccctacataggttcccttttaccttcatgccatataatattttgcttatcagtataaaaatccaggtaccacatgagagaaaacataatatttgtcattctgagattagctttgcgttcatgtcatagttttgttttgtttttgttgttgttttgttttttccttttcttttacaaagtttccccaactgtcctcattactttctcctggagatggtagctatgtcaccattttcaagtgccttagggaagcaggcatagccacttgtccaaagttctacaattaaagggagtaatggctggacatcaaattcaggggaacactcatcgtgagtgacttctcccacgctggtgtattcaatggttgatgcacactaatgtgtaaatcctgatttctcagcccctagaatcatcatcaggttgtgtgatagaagatctgtgtccctcctcaagaagattggggtcagctctggcaaggacaagctggccacctgtgggtgcactggtctcaggctggcctctgtgtgcaggtgctccccaaaggaagtttgtgaaggagggctgttccagcttgtgcagcggggccagcctctctgcttaaagccagtgatgcctggaaccttcagcttgggtcttcaatccacttgagccttctccaggtcacagaccctccacactgctcttcttgatcatatttctcctacactgtcactttttcaagtacagtgaccgtgatgtcatatcacaatacagtccagggccaccctgagaccggtctaaaatccccagggccagtcctaatgtattaccctcctgtattaccctgctttggtgtctctgcttgtagtccactgtaccatactaccagtagggagggagccctgaaagtttctggggtaaacttgaactttacaagactaaggctttgtggttatgaggcgttgctttatatgaggccaaacctgcaggattcagttgagcctgacctatctgttggggaaatgggatactgtatcctgggcatttacaacttggttagtgagtgccaagcacaggctaatggtccccttgagatgggcccaaggtgggattgggggctaatacagagctcagagtctctgcacttcctcatggtaaagatgcttgtgttgggcttgcctagtcctgtcccactgtgcctgtggcagtgagtctaaaggcacatgcctaggcaagtggactctgacactttctggcttggatcattttactgtactttctttgtgtgctcagggccccaaagacagaaccattcttagaaagaaggaaggaaggaaagaaggaaggaaggaaggaaggaaggaaggaaggaaggaaggaagaaaagaccttgcttttatcgtttgaatttatgttttatgaaaatcaaatatgatagagccattcacaagaaaaggtctcattttaaaagtaacatttccctctgatttttatttcctatttgagagcagggacagctgatatagagaagatattaaaatgcatgtggttcatctctcctggtttagtgtgaaggatcagctgttggaactgatgggatagtagccatctccgaaacatttcaaggagcccggtttctagaagagacaagaaagacacataacctgcatggtatagaccagaccagactgtagacacaacccacatgttcctaaacaccaactatagacatggtgatggggcagtgatggaaatgaaggtcagagttggctggcagacgttgtgggtgtccgacagcacagatttttagcaggcttgaaaaccagggcaagactggctttcaaggctgagaagctggcaagttggagaactttgtcaggcaattaacctataacttaagccatcttaacttaacttataactcataacttataattcaaagtttaagccatcaagtactttgggaaagcaagttagaaactgaagttagtgtctttcctccccaaacagagtttgggtttttggtctgcgaaaggctgcctctaagcacagggagtgaagagacaacaagcaattactcagatacttaatgtcaaaactctcagcgcctttgccgcaattagtgaaggaactgaagcagaaagggagcgcatgggagaccccacaggcaattccgggaacatctggcccaacttctcaccttcagaggggttgggggcccgaaggaaagtatgggggtggcagaacactgattccatgtgaacgggctcatgtgctgagccctggggagtggagcgatgccaccatgggtacaggttctcatcatgaagcccgtttcagttcctcatcttaaaatggacaggaatgggctgggagatggcttagtgaataagaccatttgctgtaaaataagaagacctgagttcaaatccatagcacccacctaaaagccaaacgtgcctgccctataacctcagcactaaaacgtgggcccaggagctaactgcccatcaccaggctcctgaacagtgatgaacatgagcaatgattcagtgagaaaccctgtctcaaacaataaagtggcattcaatggaggaacacacacacacacacaaaatcaattagtagtattctttgagatgtgtgtttgtgcggtgctgtgcctgggggtgtcttgttacctgggactgggggccgtgtccacctatactctgagaagttcagcctttgggacctgcaggccaccttctcctgcttcaggtcaaagccatacggatggtagcaaatgggatgcaagagaagactaagtcagtggcagacactggaccctcctgcagacaccaaaaagcctgttgtctcagaaatctgtgatagggttgggctttggttgttgagagagcagggtaggacgcagagagacagtaggcccttggctatagcatggagatgtttggcctaggttggggttcccacttcataaagaaaatgtttccagatcttttataacttgtgaaatgaatgttttgggggccagtaagggaggcagtatttgttcattcatgatcatatttctttttttaaaaatgtcccctcaagtgtttggatgtgaaaaatctcaggaatacagacagccaagccctgcctggaggtcatcagctgattgtattgcatcgagagagtgaaaataatcctagcctaagaacatcaggaaggcgactaggattgctttgtgacaatctcttaaatgggggagttaggatgataagaggtgggagacatcatattctggtggtaaggtagaggcagccagtcatggattcaagtcccagccctgccaggctacaccaaagaactccaaagactggtatctctgcttctcttgtatcttcaactcttcccatgctggaggagactcctggcctcggccctctctagtagtgaatctatggaactctgagtctgccccccacctccccagaagatgtatccaagtaatgtgtcctttctgaagtgtagacaggagagaagcagtgagggagccacacacagcaaggcagagagacaggaggagcaaggtaatttttagttctctctgaatagtgaatgtttttgaaacacttgcagatttcctttatgggaaaggaatgaagcggctgcagggaggaggggccgactgacccctcccccacctcttttgtcctgagctcagtacctggtttttatggcatgtggtgaaaaatggcatgttctgaagacactgggaaatctgcctgatggtggagtaagagcggagaatgggcgaaacgaaagaaaatggagaaagcagaacttctgcacacagatcagaatcatataatttaccaaggcataccattctgttgttttctgaagtgtgaaagctaatttagaaagggtagagaggcccgccggggtgggcaggagtgacaggtcccagggccctcacaggcccccagtctctctgctcctgcagagtgggtgtgggtgctggagtccctcaggcctatggagccagcgccagcctccccgccccccccccccacacacacacatcagtgaccacatccaccagcaagataccaagaaacacgttcccaacaacagacgctagtcccagagaagcagaattttaaaattctattttatatataaaaatcgaaacctctattgggagctttttaggtttgactgtgtggggttttgctgcacgctgcttattttccatgtccatcttagatttccttctgttggggacacttttgttaagtgaacagagcctctcccacctcccaactcagaggttgaggcaggtgctgttggacacccacaaagacgcacagcggaaggggcttgaggagcaagagcagggtctgatgggtgagggactctgggctttggttcaggtctatagcgtgggcagcactgatgggccagaggctgatacacagtgacaggcaagactgcagtgagtggctctgggtaccagcctggagagagaggaagagcaggaggcagctctttccctcagggccacacagtaggtgagttgctgcctgaccttgggtgtgcactgatctgtaagtgtcacaaagcccagaccttcagctctgctcgcccgaatcattctgagtcaggcactcttgtctgctgctgatcctccaccatgcgtttgcaagtgtgggatcgcaccacgtaggcacttgacaggcgtggttactgctgctgtgaactgaccgaaggtcagaactgttgggtcgaactgtttattttctgagagagaccagagcagcccttgataggaagttagtcacaagcttatatttatttatctgtctgtctgcctgtctgtctacctatattttatttttttcagactcttgtttttaagcctaggaggaagtctgatcttctgggaataagccttgacttcacgggggtgtggcaggtcctccctggtctctgtgactttactctgttcagcagttaagtctgaggttacagctttctcgtatcacacatcatttgctttgtgggagtccgggcctgagccaagacgtgctgattagcttttgaactagtgcttttttaaaaaaaaacttgtttacatagagctgagggcacggctgctcttggggccagctggctggcttccgcagtggctttgttacagcctcccatgttctcacctggcctcatatagctgtgtgtcagcttccctccaggggtggtggtgtccttcacacactggtcacagacagccatggtcctagtgtatcatagcagtacctggcagacaccaggactcttgcagaacatacctttgtgcacatgttcactgaaggccttccaccttcaactatggagatttgcggaggaattaatgaaaaaacaaaacaaaacaagacaaccctgtgatctaccagggacttttaaatcgctagactaacagagaaccacggcccaggattccccttctgatatatgcatcatatctgtgtttaggaacttggtttgtctataaataaatgctcggttgacctattttacagagactgggaaatctcgcttctaggtttgagttgaggttccagaaactaggtctattggagtctaaaaggtggattttttctcctagaggctcttactggccataggcaatcctttatgctaatgttctggggttcccatctggtctctgttgcactgtggggtgaaggggtcctccatatgagcttgttcgaatcccctgctagtctgctgccttaaggattctgtcatcatccaggataggttggggcttcagacactggaccaaagttcctgttgttagctgagatctttgcagaaagaggaaaggaatgacaggatggggggtggggtggttatggaagggcttttcaggctctgggggttagtggcatcaaggaaacatttcgcatagatgttaatcccattaatcctccagaatttcctgctgcaattttctctatacggatgggaagcaaacaagcccagaattgtaaagcagctggcctgagacacacagccaggaagaggtggattccgggagatgtggggctgtgattaatgctccttggtttgggattctcattttttttctttcctccacatttctctttgtaccagagtgtacctgtccatctcacagccattgcagtcacatggagccccaatcaagggcatctctgttccacggtcacataggtgaatgctcacaaaacagtgtcttccagagccatagtgtcccatgtgcctcttggtctctgcctttgacttgtacatgtttataaagatctacacccactggggaattctgtggtctgtcttgggttttccgttattgtgacaggaggcaagagacagtgtccttcatgggatggctctcaagtgcatgattttcagtcaacgggggatttggttggtgatggtgatggtcatgacgacgatgatgatgatgtacaaggacaacagctgagcaccatgttgtggctagtggggggatgttattaattcaaagatacttgagtaatagagggttaaagtggagcctaggtaactctccccttgttctttgcattcaatcttttaaatcttggccatctctagcctcagacagtccctctgcctcatctccaagactggcagagcaaggaggttggcattcgaggacaaggagggaggttgtggctgagggtgtgacttaccagacctttgttccagcctgcttctctctgcccctcctttgttacttagtgtttattatttctttactgctattgtagttgcaagaggaatacttgatctttccaagtgaacttcaaagccagatgggactgtgaaagtgtgagccaatgtgccccaagctccacccacagtcactcttggaaactggttgctgagggatgtacttgtcactgtgcttaatggaaagagggccagctggggcttctgctgtgtctagctctgcctcctgctatgctgtgattcagagcaggctgtgtcccgggcttctgcttctcttccttttgtactacagagcagccacactcacctgtagcactgtgagtggtcaggagcagaagaggaccttggtgggtccacaggacctgccagcgcctacccagctttcctccatggtactgaaagtgacttagcaggacttcttattttgccatgtacttgcctacatcttaattttaaaatgatgttaaaactttctaagctttctaaacatggtatcttggatctttcatgcagatccctgcacacacacacacacacacacacacacacacacgcaccaggtgctcaccatcacatccatggccacactgaggcagatgcacaggccactctctggcctctcaccatgtctggtaagggctggtctgcttggggatgggaagtgcatgctatgcccagcttcaccttgtaaaaccatctagaggacactgtcagataggctgcctgctctttccatcagaaaggaatgccactgaagtatctcaggaggttctccccattcaagggttaaatcagactcttattttgcttatctttgaaaataaaacaatatttaaaagtattccgatcagggaggccatctggcggggagcgcacagctgcttccctttccattgtgccgcccttaatttattcactctaggcctctgctgtacattgcgagatcatcattcgcattctgtgaactggcaatgtgtgagttctgttctgtgagggacctgaagggcatctgggtgggctatctcctgctacccaggatcttccctcttctctccagggtctgtctcagtgggcaggaagggtctagggatacaaaggtggacagagccaccctgtccctttggtgctctctctctttctctctctctctctctctctctctctcatttcctcccacacattctctctatcctctctcaaacactctcttctctcactcccactcattttcattctatctctcctacacatcactctctcatgcacacagtctctctcttacacactcttacacactctctccctctctaacacatatacacacactctgttacacacgcacacatacacacacacttacacactctctccctctctaacacatatacacatgctctgttacatacacacacacactcttacactctctccctctctaacacacatacacacactctttcttacacacacacacacacacacacacacacacacttcctctctcttacacacactctctctccctctctcacatatatacatacactttctcttacacaggcactcactccctgggcacatcttctttccttcatttcccgcttgtgttaggggactcgttggacaatggccacaatgccaccgcttaaggactttgcactccagccacatgggagccatgatgtcagaaagcacgtccctttccctggcaggtaaggtttggggctgcacctgcaggaagcctcacaaacacacaagaggaagagtagctggttctcagacacctgatgtcttgatgatcttgggccaatttggagacacaaagcctttcatgttgacctggagaagaagagggtgagggtctcagtttgtctgcagtcacatggctatttcaatgttgtgatcggtgcccagtgcagactctggagtctttagatatccagcccccctcccctggcccatatcctttcctgtctctgtaaatcacaccgagcaggaagtatatgacattgaattcacagttgagctgcttgtacagtggggctaatacttgtctttaatattatcaggacatttaaacccaaccatccacattaaccctaggctggtgtatggacacagtcagtgtccgctggggtcactctggtcaccaagccaaaagtgccttgtcctggagcattcctaggaactcagtggggcatatggaattttcttctgtcactaaggtggggatatttactgaccacccacccagagtgaggtccatgctctcctggcctgagcatctctggccctgggcttgtgtggagctcatggcctagcctggctgccttgcctaagcagtctcaaatccagtttgaccaatcagttaatggctgataccctactctgccagcctctgttggtggcagcttcatttgggtatataggtgaaaggtcacaagctttgcagccaaacagatccatggttgtctagtcacctcctgtatcattccacttaggtgcagcctataggaaccaagcttcctgtgttctgagcctgacaaccaagctagctcgagggagcactggctagccgcgtgactctgagtgtgtgtataacccttctgtgccttagtttcccacatgtactttgaggctctgcatattgactttggagggttactattaaggacagtcgtatgtggcctcccacacatggctgacactgtaccagtaatcatttcttcctttcactgtttctggtgacactgaaaaccctgggtctacatgctcccctgggaattcatgcctcagtcactatgttccccagagctattttggtgggccagctctgaagcacagcttgaagcctgtaggtttcacctgagtgggatggcagatagttactagacagacttgaatggaagagcctgtgtcccggtgatttgaattaccaccagaaataacaaaacgagtgttctaaaagagtttcccctgtagacatactgggctcagaaaaagaaaatcgtctgttgtgtcacgcagacctttggagtcttttgtgcacgtggaaatctctgggtgagaactgcaatgtgaacatgtttgaagccccttgcccactatgcctttgtggagcaaacctgagttatgtcacggctgttggtgagacaggcatctggctgggtttggctgggtcagagctggaacagatggacagctccacccacccacctgtccctgctgttggagactgtggctctaggcatcattactgttgttagggtgtctctagcccctaagccatggtgtgtcttttacagattgcctggcaccaggtgggtgctttaggactgctcctgtcatggggctgaacagttttggaatgacaagatgatcatgtctctggaagtccctggagtctttgctgtggagttagcgagatgctcctgagctctgggctgtgtggtcctcatatttgtgctccccccccccccaatgcaggcttgagtatggtgcaaggggctgataccatgtaatggacagatatggtggtggaagggggaagggtgggcttctagtgggagaaaacccatgatgaatgaaactttaagattgactgtttggcttctctggaggctgagatagcaaagcctgtgccagcttttaacagttgctgaaaactagatgctgagcagccgcaaaagacagaaggaagcaatgatggtaggtttttgttaaagagaaattaatctcagatcctacgtctgaaagtgttaaaaccaaaaggggcagtccccaggccatggcttccatatgatcaagctaaggcccggaaagaggccacggctcctaagggtgaccagccagggtttgagtctggtttgagagatgtgggaagttctgctcagacccttccctgctcagtagatctctgccatgctggtagggtatttaggctgtcaggttttgaaacagcctttcaaggaagtgtctatttggtgctcagcctcgagagcattgctacaacctggctaactaacatcatagacccgagcctgtttacctgcgcctgcaagagtgacgagggacttattgtacagggagtctcctggacctgcctgctctgcaagttcatttctatgtttctgcggtttcaggtgtgtcagtgcacccagactgcctcttcttcctcctcctccaatcagcacctggcacaggcttgttttgctttccatggctccttctctgtgcaggacacatggcaccagaccagccagcatcccctatcagcttcgaatgcaagtggaaattgagatggcatgagactcagtgcctctgcttctaagggatttggagaaaaaggcttgaaagtggcccatgtcatctcctcctctttggttgagtctccctctcctccttatgcagagcccctgggagacagaagctgatctttaggttgagttttaaaggagccaggaaatgaaggaaccacgggcctggatgagctgctggaccacttgaggctaagccagatgatgggctgaagtctgtggaggtgcagatggtgaaggtggggtgccaggctcctgaatctcttaccttatctgtctcttatgagctgcatgtacttgagaagcaaagaaccatgctgcacctcttctctatcgaaggcaggcctggatgagcaggtgcctataggcttgtcctgcctggttgataattctagagagcatgggttcacctgggcttcgactatacccactgtcagcttcaagatatgctagaggtttcccaccatgaattggatctttagaagttcctagggtcccctgtgggtttctctctgtcacaactttcttcctagcttccttcagacacttagggataagcatgccacctgtctctttctggaattcctgtcctcacattggatggaggtagggaaagttggacatccagacataggtttataggtgagtagaaatcaggtagcattggggcgagggcatgaggcgctttctaatgatgcaaagactgggttttacttatggaaacttgctgtgggccatgtggaggttattcgttttctgtctcttcaaattcatgctggagggcaccattgattttactcccacactactcgtggaaatctaagtctcgggatggctcagtttattgtgtgagttcatagcgttggtaacatttgagctgagttaaaaggtgagtctgcctactttgaggaccagcttaatgctttgacttcatggaaaccctttttcctgtgttccacctctctactaaattgaagctctgggtatcactctggggtacgagagagaggagagctgtttgctatggagattggatctttgtgagaatgctggtttcccacagatacgggccatgaaaggatagctttttctatggactctgtctatgctgtgatgcatataaaaagtcattgttactaacaaaaacaatattgatgatgaaattattatacagccaagtatataatttataaaacctcccgtggtatgcaagatatggcggtgcatgctgttggtcccaggatgccacacagagatctctgtaaattcaaggccagcctggcctacatagggagttacagggcaaccaggaccatattgtgagaccctgttgtatccctcccatatccatccttaaataactcaaaaatagcttcaggaagtccctgaaactgagcagatccagtaggcccctccctgccaaaataaaagcaattaaagctgagagttgcctcagatggaaggggattgaactccaagaatattctcagacacgacaagctgagaagaagactcagaccagaccagatgctcgaaagaagcagaaaccagcctagctgcctgcacaacatttagatcaactgaggcacctggaaaggacactctcctgcctgttgagcagcctgtcgactgtacagtatgttccaggcttcccagcttttgttatctgtcacctatgctgaggtcggccttggtgatgcagctatctttgagtcatttctgcttctgtaagtaatgcctcacccatattcttataagcaaccccagtaaaacccattggtccaccaagttgaactttagccgtgtctgtgctttggtctgttgtgggctcattatctggggtgagtagatgttcatctccccaggaaaagtcttgtcacacagcagaccctatctcaaaagaacaaaataaaactcccgtggtacatatgacacatacttggtgccagacaggaagcgcctgctgaccctggtaaggggatacttgcagaggaagcactgataagagactccaggcatcaggaaagatgaaatttggcaaggaacctatcagggtcagattacagcacaagcttgctaggggaagaggacacagagagaaatgacaataaccacacagaggctagagggaaggcctgtctatcccattgggggatgggggtcagttgtctagataactggaacaaaacagccatggctatcataaacacaaatttgcttgaagacagtgtggtgtgttagggtggctgtggcctaacctcagaagaactcccttctggcttccatcattgctacagcagggaattctctgcttctggtgctaaggaagagaggctttcagaatgagggacggactccgtaagtgactgcatctctggtgagttgccttggcctgtgttggcccctcataagctttgcatgcactctgtgaagctcgttacacagttgttaaagctgatatttgtagctccgatggcttcgctacctgtagcagaggatacttagcagaggatactggctagcttgtactgtgtggtgaatgacaagaacaacatctctggagggatgactgggtcagctgggttacagctcctcaatgttggcctcagccttccttcacgtgtctgtcatccttctatcaacccagccatgttcttctagtgatgacagcaaagatggcttgggttgagtagacacgccctgtcccttttcactggggcttgagaccaacaggtggtctcttctacctcatcctgttggccaaagcaggtcacctgactcaaactggaggatgaagaaatagtcttctcctttattataaagtgcaaagtgattcccatgacaagagtgagactatagggaggaataatgaataaaacccagtaatgcaatctatcctaaatggtatttatgaataataattagcattcgtaatactgtatgccagcattatgtgtatgaaatattaactaacatttattaagtgtttacaatagattaccctgataagtaagctatatgtgttagctcacttgataccaattgcactggtaggctatagttcctttgattattctcacttcttattcaaggaaacagagaggagataggtttaatgtcctgtcaaggtcaaatccaagcaatttggccacaacattcaggctcttaactcccaagctgtgggtgatctatgcttgcctgtgtaccatttgagaacacaaagacccagataagtcacttgtctgaagtcccttggaatcctgacctgcccctgatcgctatgtgctttctacaagctagagaacactgaatgtctaagtgaggagcgactcagttctgctaattgattggaaagcctcaagtataagattgacactggaacctgggagatggcttaattggccaagctcttacaaaataaggccctgtgcccacactcctagcatctatgtggcggatccctggggcttgtgggccagccagtttagctaaattggtgagctccaggtatcactgagagatgttgtctcaaaaaataatgaggaggcctattgatgatgacatttgatgcgagcctcttgcttctacgtgagtgtacatgcgcatctgtacacacacacacacacacacagaggcagactgatatcgcttattgcttgtacagaactcttgttagctttcttcttggtcttggcagtttctttatgataccttggagctgagtcaaaaaatgccttcctctacttactgattaatacttcttgacaaaaagagtatgttcatatacatagcccaaggaaagatgttagcattcagacatactaactgaagaaggctttgtgtttttagtaaaggttaattaagacccatcaaaaattttccccttaaaacataaaagtgaaatcgtgtaattagctattttcccctttcccccccggagggcatacatgaatgtttcagctaaatgaagctatttattgaagtccatccagattttctttgaagtttcatacatctttcttctactctatcggcttctagctacaataatttaataagtttttcctagggtgaaattggatgccctttatcgatctttcactgaggggcattcaattacttaatctaaagtggtatttctgggtctctccattacaattttgttataaatggtttgctaatgatgcctggtgtacataggttaatagggggcatccaagcaaaggctgggtaattgaatgctttctatttggggaccagttatctgatctctcgcagtggcactgggttcccacagttttggtctgcatccacggggtacagcttggagccttggctgggaggcggcagggctgtaatgtatccctgagtgccttggttgactacatgaatgagcaccagaggttctgtctaacctgagccgactggcaccaagcgctggcattccagccaggtgaagtacaggtgggatgcattacctgcttctgaggggagaacacctgagtgttaagtttctgagtggctgtccctgggatcatctgtactgtgtgggaaaagccagttacggggcatgatagcgatccattctccttctagtacagccacatgaattggatttttttttttcattagctgtgttatttaatagctacacagattagtcagagccctgggaaagaatatgtagcatgcctcgttttatgcacttgggccaatatcacccttgacaccagctttcaaggctgtatagaatctaatctctgccttagcctcgagtggtcgataccgtctccaaaccagcacaagtccccaatgatctgcccacaggtggttctcagctgctttgatttcccacagagcctccccctcccttggtttcttcatttccatgaaactttgtttctgtcatgtcccccaaactctgctcaataacaactgtgaagtcacactctgctcactgtgcctgtaagacaggctccacctggagaataggtccccagggccaccttcgtctatgtctggatctggttttgcttaccctatctcaggaggataggttctactagcatctagccttggaggccagggacagtgctgaccttgcatgtcctacagtgcagagacagcctgtgctgtgaggaattatccagccaggccttgtactgtggcactgagtgaacagtggtgtctaatggtttcactgtttgggacatttgtcacctgaggttatcttgtgtacttgtgacagattgttactcctgcagtgctcctggccaaggtggaataaaagccagctcaggtggaagagtcctctgtcatgggcctctctgctcctttcttgtctgttctagggattggcttgtccaggggcactgaagattaacagcctgcacttaaggggcacatttgacttcattacctggtgactggatgggtcttaatcaactttattgagatgtacttcacatatgatagagtgcctgtatggttttggggatgggaaagacagtttatatctttttatttgtttgtttgtttgtttgtttgtttttaaaaagaagattctgttcccttcctccaaaagtatcatcaacacaaagcacctcaacttcttgataccagcctggaatcttgccattcaaggtcaacaccaaacgcctggagtctgaggtcccattcccaagagattgctccattttagatccccagcagaaggattttcagcacccacactgtgactgaactggctacagaggcaaaggttcccatggtttcctaagtggtttcaggaagctcccagaggaataaatctcgacccagaaggtccctagcagcagcatataacaagaatttgatcaggactggtcagcagtcaggcatagggaggaatatccatgattctcctggcttcacccagctctgtgtgcttatcagccctgaagcccttagatcccagtgactttgagtttgagcagaggtctcacaacatagagatggcttatatcatccatctatcatcagaggtttggtctccagctcttcttcatcatacctgggagtttaagctttaaccaagccttggtctttattgaaaggcctccatcttgaagctcctgatggctcctggctccactaagggtcacgtcgttaaataacctcagctgtgcttgaaaggggcagctcctaacacccaagaaagatgccaagcggtgtgcttgggggatgaagctgaatgccagctgtacatgttggtgcccacatacctacatgcaacattttctattgacttctggtccccaccctaggatgtgctcagcacatagtcaaccttcagaaagtatgtgctgaacaagtgagtgagtgaatgaaatgaggacacactgcattagagtgtttttggagtattttctttaatgagtaaaaaacccatcctggagtagtttgcctaactggaggtacaacttctagatagaggagcactaggcatgtttgagcctgtttcccatcccatccacccccattaaggttgtcagcctcctccagtcctgggggttatttactttgcttaaaatgagatagcttagctcttggttaggaatgttctgcccattatgttgggttcagaggttgtacgttctgtggcttcaaagtccttgtttgtttccccctttcattcttaagaaaacaaaaacaactaacagtaagacagaagagtgtgaacactctcccactgaggccctgcttggagcctcaatttaaccctttaaaccttggccttgtctttgaaaagtggattaaaaaaatgttttcttggctccgggggatggagtttcccagagggaagtggtggtggatcttgcccttttgtttctttaatttggaagaattgtttgtacccagcagtgggccaggggtgatggagcaagctggaagcacaagttcctggcttgctcaccagctgtcctaagggaggagagggacccagcttggtcccaggagtctcctcccatgttcctcaagtctgcttctcctgttgtttcaggctctgtctgactcttagctcctcagaccagtacttctcaatctggcctcctgggtttagtgataattccttgaacaactctgtaaagagtgtgtgcatgtgtgtgtgtgtgtgtgtgtgtgtgtatgcttgtgcgtgtttgtgtgtgtgtgtgagagagagagagagggagggagagagagagagggagggagagagggagggagggagnnnnnnnnnnnnnnnnnnnnggagagagagagagagagagagagagagagagagagagagagagagagtgtgtgtcctggtctttcaccttctttgaggcagagtctctcttgttcactgctgcatatactaggttaactagccctgcaaatgtactgattcctctccccagtcctgtacaatgtaacttttgtttattatattcctggctgtggatttgcaaggtgtgttctcatctgagcaattcacaaagtgccgctgtaatgaactgtatcgaatttatccagtgcaccttgcctctaaatatttaagtacaaatgctgtcagtgtgcgtaatactctgtaggtggaagaaatgccacttgactcattctttgccaatgtatttcaagaaaacatgggctttggatccaagtgacatgaaagtttctgctgtagggtagtgactttaatctctggccaatatatagagtgtgtaatgaagacttagttaatgccgcttctctggggacagagggttatttgaggagtgtatgagtacaatgggatgtgagtccaccgcccttgggtgattgtcagcctaaggataaagaatgtggcttagggtctcccatgtggaattgcatatcaacacttttagaacttgccggcaatgaaagattgtaatgtggccagtgatgatatctgtgttatgtacattcttgggtcactaaacacatgtcaggcctatgcaaactctttacacacatgagttctgtgccttaaaaatgtcacatggaagcactgttattattctagttttactggtccttgaggaaatgagaactcagagatgttgaagagcttaaggtcacacagcccgtgggtgtgcgtgtgtggcagctagaaaccacgtcaagctctttcattagttcatccattcccctttaatgacatctccaaagaaatgtcatttgggaaaaaatacattttagagccatggcattatgttaatggatttttaagaatcgtgtctttccagggatgaggaaagtgagaaatgacttcagggtctgaagtgtcccgtggcccgagggaaaactgtacattggctttaattgcttaataacttaaaggcagatttttttttaatgtaatacacttgactgagaagaggatcatttcattgttgctaaattttcattaacttttgcttcctaagctgtagctgagggacggcagaagctgtgaagagacagcctggatccctgggcttccctcccgcttccatctccgtccttcccgctcttcagacttatcactgagtttcaaaacatggtactttgattcatccctcaaactcgaagtcattgatggtcttgattccctttgttttccccttccttccttccttccttcctttcnnnnnnnnnnnnnnnnnnnnnnnnnnnnnnnnnnnnnnnnnnnnnnnnnnnnnnnnnnnnnnnnnnnnnnnnnnnnnnnnnnnnnnnnnttccttccttccattctttcttcaacttgacaaaagctaaagttatatgggaagaaaaccctcaattgagaaatctccatcagattggcctgtaggtctttagagcagtttctgacaaagctcaactgcagttgtaccggccctcagctgttggccctgggttgtgtaagcaagcaggctgagcaagccatgaggaacaagccggtaagcagtgtttctccatggtctctgcttctgtccttgcctccaggttcctgccttgagttcctgccctgacttctttcagtgagggactgtgatgtggaagtataagatgaaataatccttgcctccccaagttgcatttggtcacggtgttttgtcataccagcagaatctaattaagatattgactgtgcatgaatctgactgtagttacacagtcttgagattctgggatgccatcgctcagatatgtgaaagcagaggccctggagggtacatgggtacaaaggctggtggtgggggtcacatttggtgacagaacatgaaccccaaaccaagtacaaaacccctaaacacctccatttatcttatatgatctgtaacttgcttatgaacaagtaagtgtggctgaaatggagagatggaagaaggagataacacgtgctcttttctgggaagcaacttatatgctatcataatgtcttagtcagggtttctattcctgtacaaacatcatgacaaagaagcaagttggggaggaaagggtttattcagctcacacttccacattgctgctcatcactaaaggaagtcaggactggaactcaagcaggtcaggaaacaggagctgatgcagaggccatggagggatgttacttactggcttgcttcccctggcttgctcagcttgctttcttatagaacccaagactaccagctcagggatggccccacccacaaggggacctccccccttgatcactaattgagaaaatgccttacagttggatctcatggaggcatttcctcaactgaagctcctttctctgtgataactccaatttgtgtcaagttgacacagaaacccagccaggacacgtaattaccacatattgtcacaaaacttgtctttctttatgtctaggtcacctagcattggtatgaatctgctcctcaagaagagaaaatattctgaaggcatgtccgtttacctgtcaacgaggaacccataatgtcttctcatctccagtgtggctccatgctctctcctgatgctactccaactttctttggtgccatgggaaaaacctgaagcacgagcagagtcacctccaaatctgtgctcacttcattttgttgcatggctggtgcggaacagactattggaatttgctcctgtgtgttgcccttcgtacctgaaccaaagactgtgcctcattctctagtgcattgctgcctgctgtcttcctcgttcatttctgttgcttgtgccttcctactgtcttctgtcatcacaggacacccttaaagtttctcactggactcctcgagggctggcccatggctctctaagccagctgtccaaggtctctaccatgaggcattgcattaattgctgcgtccagctgttccccgaagacacacacaaacagcaagttgcctgccaaggaggcccccatcacagtcatcaggcgtgccccacttgcaaaggagaaaacaaaattctgtttcgtgtggacagtaagcagatgaacttgcttgctgttctcgaagtgaggactgagggcaatgaaaactggggtgggtttttgcgcttcaggaaggggaagcgatgtagcctggtctttggattgataataatgaccttggtgatggcttcttacatcctttccggggctcatcaggaacttctgatttcctcccctttccattatgggggctttcccagcaaccccagcgtgatggatggtgagaaccccagtgatgtgaaagagcatcactaccagccttctgtaaataacatctcctatgtaaaggactatccgagcattaaactgattatcgacagcattgctgccaggattgagttcacaaccaggcagctcccggacttacaagatctcaagagacaagagttgcatgtgagtagctttctgtcaatcttggtgattgacttttacagaatggatgcttttttccctaccaccatctttgggaacacaggaggaacatgacaggcatttcctggatgtcttactgcaaggaatatttggcagcctctgggatgagaatgcatggtgtgcttgtgctgtggaattgccaaggaggagatttgctgtcccaaatggctttagagatgcttaaagatgatcccttctcatcactgcacacggggccttcctgtctggaatggggctatggtggttcaagctgcttttgtagatcaccggcacttagtattttttttgaaaagatttatttttagtcgtatgtatgtatgtgtgtgtgtatgcatgcctgtataggggtatgtgcgtgtgagggcagttgcccttggaatcagagtagaagcctcatcccctggagctggagttccaagtggttatgagctgcctgatgtggctgcagggagcacatctgatcttgtggaagagcagtacacactctctaaactatcgagccacctctccagccccttcatttagattgtgttgttgttgtttgagacatagtctctctatgtagcctagactgtcctagaactcactctgtagaccatgctgaccttgaactcacaaaaacccacatgtcacccactcctagtttagaacatttctgctaattgttttcttttattgtgcctgtctcctttgttcttcgattgcagatgttttctgtaatccccagcaaattcctcccgactagcaagagcccttgttggtatgaggagttctcgggcaggaacaccactgacccctacctgaccaattcctacgtgctctactccaagcggttccgctctacctttgacgctctgcgcaaggttttctggggccacctgtcccacgtgcagggcaagcacttccgcctgcgctgcctgccccacttctacatcattgggcagcccaagtgtggaaccactgacctgtacgaccgcctccggctgcatccagaagtgaaattctcagccatcaaggagccgcactggtggacccggaagcgctttggtgagtgttggctctcgtgtttttctcagtcattctgtggatgcatgtgtggctggtgagggcacagcggcatgaggttctgtggaggaaggcgtgcaaggtcggagagaagatatattgagattcagaggcatggcacctgtcgtgagacagttgtattattaatctgttttgtaatataacgacaaaacaccagtgtgtatttggttcatgattctagaggctaaaggttccaaaaagtctgttgttgatgtcctggtgagaggctgttggctatgtcacaagatggaagagtaaggaaacggtgactagccacatgcagcagaggccaagttcatggtggggcctggctttataataacccacgttcacaggatccaagtcagtgcagaagaacagctctaaactctttccaggcagagctcccatcctgtattcactttccattgtgccctgctttttaaagggtcccatgaccctcagcatcccaccctgggtaccagccttgccaagtttctagcatgtgagcctctggggaatgccctcaaaccaaagcagcacttctcaggcaaagacctgctcattgagcactggttgtatgcagctgtggggagggcaggtgcagaatcgaaacttctggtggaggtgtgtttgtgtgtgtgtgtgtgtgtgtgtgtgtgtgtgtgtgtgtgtgtgagtgtgtgtgactgagagttacatccctagctcttttagttgtcctgaagaactttaacacacaaccttagcagagctcaatatatgtcagggactgggggtggctggcacccagccttgggctgctttactgaagccagcacacctggaagagacacagcttcaggccttggctgtatgacctgccctgactacctcatgtgtttgcaatgcagaggggatgtgttcacccctggtcaacaaggttcactgtgggccctccctgccctgcccctccttgtaggctggtttctgttccacccagtcctgggcaccctgtggccctcggtcactgtttcctgtccgtaaccttttctttctgccaggagacatttggtcactgaagctaatgggtgatacatggcctgttgtctgccaaagtctgggcgggctgtgaaggcagtttccacataaaaggactcaggtcactagaagagaatcttagacattttctttagactaactgttcctgacaaatgttcaatatcatccttttggtcttcatttctggagcggctacatgtgtgtgttgaagcaggcaggctacagtagacaccaagtaaccaaggtctaatgcatttgatgcatgtaacacatgcttcccccactatgcccagtgtctctcctaaagagaaacagctttttcctggcaggaaggagggaaggacagggcatgcctctacggctaatgctcaacgtcaccttggatctcttgttattttggccagaactgtcctcattctattttgcagtagctttggtagctgtggtgctgggcagtgcatgttttgaaatgtttatgagttattttaaggcagggagcaaatctcagatgtgtgtggcatgtggcagagtctgtgtccatggagggaaccaacgagaccgttaattcaccatggctgcttgattggagtacatccctatagagtaccctttgggtactgaagaaagaggcactacagaggtgacaggatgctgattccatttgtcctccatatttggcacaccaccagatcctaggtgccgccattgttttactctcttggtaaaaatattaagcagttctcaactttagccctccacttatcccttttctacctcttgagtaggtgtggcatcttttaagtggcccctgcccagtggcagtggtagttggtgtctttctccctgtgaggcatgtacacgttgaagcaggcaggcattgacagagctctccatcccacagctgtgtgcctccccaggagcttccctgcatcaagcctttcactgctaacgtcaggtccccttgacctttctgtccttctctggacttgccttaggaggccaccacactatcagcggcaacactgtctgcagtaactcacttcttggttcctgcaggaattgtccgcctgcgggacggactacgagaccgctaccctgtggaagattacctggacctctttgacttggctgcacaccagatccatcaaggactgcaggctgcctctgcagagcagcccagcaagatgaataagatcattattggtaggtatggcttctgggtaccttcaggggagctggcagaagcagactctttggggtcctggtccatgtcctggggtcagctctgcttcacctacagattatttgcaggtgagtcccttcccgctgtggctgtcactgttagcaccaggtaaaccagtcacaccatttataccgttaccataaagcagaatcatttaatgagcttgcttactccatgcagactcaaggatggctgaaatggctttttaaaagagctgccatttctttgtttttcctttaattaggcaggtgtgcattcattcctgtcacgataccctgactggagttagcattctcatgagtcactgattggatgccagggcagcaggaaggagagctctgcaccccctgggatgaatctctgggtaacccgagtgcctttgagcattcaaaatgaagttgtttgagcagtatgcgctcaggacatggaggcaggagaatcttgagtttgaggcttgttgggttcattaccaagaccctgcctcaacaaaacaaaaccaagcaaagccgaacaaatgaagtaaacgtgaaaaagtaagccaggtggtgatagcagcttgtgtgcctttaatcccagcatttgggaggcagagacagacagatctcttgagttttaggctagcctggtctacagagtgagtttcaggacagccagggctacacaaacacacacacacacacacacacacacacacacacacacccctatctcaaaagaattagctgtttatacttagatatactcacttttatacacacacacacacacacacacacacacacgatgaatgattattgcagctaaccaaattagcatatttgtttcttcacagcaccctcccaaatcctttgcattttttaaaatggcaagcatacccgaggccccccctcagtagatgcagcacacagtggggcattgccatctccaggcctgactgggctttggattagactcatttcacccgcaagaacacttcatcagcctcggctcgggatgaggcgtttatctccaacgccttctgaaaaggagaaattgaatcatacatttcacttaaattcgctccccgaggcaatgatctattttgtgttcctggatccattacattttgattctctaaatccaatgaatctcttcgtgagtaggatggattgtgaccagccgcttggctgaggaccctgtacctgactctgaggagattctggctcctgctaaagcccagagtgatcagtgaatcaatttttttttaattcataaataaaatctcagggacccactgggaatgtagtctacctaccctcacatctacagtatgaattggctattagtttttgttgttgttgttgttttagtttcaaactcaggggtgcaaataccccatttaataagtctaattaatatttttctgagactcccattccatatgcctctggggaaatctcaggatctatgaaagaactaaaaatattccccacaaagccaagaaacagacttagaaaatgaatgagagaggaaagccttcgtttgggttcctaattatagttactgctatatttcaaaaagaacaagaaataaaaatgccacgctgatattcactccaagccaggcttggtgctgtgtcttatgagagcctcttggtgtgacaggcagtgtggagaagcagatgacaagttggcatctggctctgcttgtgtcaccagccagctctgtgccacgtgatcacttaggccttccttttgcatctggtctacaaggtctgtaaaatgggatgattggaacaggtcaggaccctgcatctcccagccctgggatgtgactcagccctttttagatctgcttcccaatgaaggccttggcagaggtcaaagggtcacagcaccgtgggggatgctccggtggtcagaggaggtctatcctcctgcatctgctgataggagagatactcaggggcccaggactgaagcagccaggttctgtggggctgtggttgctgaaaggccctgctctgcctgcaaggtttcttgtttctttccactcacttggtagctaatggtttctggaatttctgatttcctcttagaggaggcagtctatgcctgtcttgtttccctcatctgtcctcggtgccaagatagcaagggggcagggactagacatcaaatgaatgaaggctgagatgaagagaagatggagcaatcctgcatgggtctagaagcagcccccttttgagttctgacagaatttgtggcaattttttttcagacactccacttgcagttcatatagcctacttcgtctgaagcaggtttgacaagggatgtctgattggcttgtctttcctctctttgttatgttaaaaaaaagccctaagaaaggagagagggctgggatgcaagtgttcaccgatgggaaaccaagcagaagatacaaggcccactgtcttcacacatgactgttatgtgcatatcaccaactagagaggctcatttagctcagactgtccctgattgagtggcactgagatgttgtacatggtctgtccagaaatcaagtgtagagttgaccggattgttcatcctgaagaactgtgctggggtagtggtagcatggaaggggtgggcaccagaagtcctctgcctaggtccttggagttcctttccttctacatttctgcagacagtcacgaaaccaaaacaaagagaagctggcttgtttgcaagtgcttgctgtacaagcatggggacctgcgtgtggatttccagcaccatgagaaagctggatgtggcgataagcttctataatcccagtgttggggaagtagaggcagagccatcctagggcttgctggaaagcctgcctaggcagttggcaagctctgggctccgtgagagacccagattaaaaaagattgagcaataaagggagagagacattccttgctgtctggtctttataagcaggtacacaatatgtgtgcacatagggatacagatgtcatttccccatgttcatactcaaacgcaacaacagcagcaacaacaacaacaactagttcaattatccaagagtctgtgttgtttaagtgcctgcgtcttggcctcacctctctccccaaagctgccctttgtgtttccatcctctcctgtcggggcagactctgattaaacagtgttgggccctgttcatccacccagcatgaagtgctagctgtataaagagcagggggtgaggtatgggcagtagacagctggccattcggggaagcagggctgaggctgagacccccctaggcttctggcaaagtcttcggctcatttggtcctagagattgtgcccgtgactaaatgttccggttccaaggaaagatagatgtgaattgcatccagctttccactgaggctcagattccccaaatgactcttttctcttcctgaacattttgaaggaaactttctagtggattctcagtggggccttaaaaggccagagagctatgagctgccagcaaagctaaatattgtgtaattgaagtcctaggtgttaataaagtttgtatttttgttccttctgaggcaagaagctggggttgggggtggctccagtaggggtggggaccagttgtccttttatcagagtccgggagttccatctgccaacaatggctgataagcttgccgtcatggctatttaagaggaaggcccaggagccaggcttggcctctggctcacagtgggagctcataccccaccgcccagcatctgctctgtgtctgtttgcaggagaggccagcgcctctacaatgtgggataacaatgcctggaccttcttctatgacaacagcacagacggcgagccaccattcctgacccaagacttcatccatgcctttcaaccagaagccaagctcattgttatgctcagggatcctgtggagaggtgagtgtgtgtgtgtgtgtgtgtgtgtgagtgtgtgtgagtgtgtgtgtgtgagtgtgtgtgtgagtgtgtgtgtgagtgtgtgtgtgtgtgtgtgagagtgtgtgtaagtgtgtgtatgtgtgtgtgtgtgtgtgagtgtgagtgtgtgtgtgtgtgtgagtgtgtgtgccatgttttgcattttttgtgaaaagaaggggcttttgggagtgcagtgcttccatctctttgcagataagatttgtttgtttaagaaaaataataaacaggaatagcttgtgacgttccttctgcttattacataaatgttattcttaaggcaatcctccgtgcatttaaacaaattgtggtctactctctcagcagttttgactgtggtctgtgggtgttagcctctgggggggaatctagccaagtgatgaaggatacaagtgctgttaggttttggggatatccttagtgtcaggggtgtggggattctctgtgtgctctgactcccagaattccttgtttctttacttggtggctcttcttcagctctgaacatgtacccctgtttccctagaaaccaaacagggagtactcgactggcaggctgctctgcggctgataaggtcggggcttacccaggtctgaatggggcagggctggtgcagttgaacagacagtaccaggatggtgatgtcaggtgtgcagtaaacttccaggacatttgtcacttagtctgctgtgccctccacatcctgtcacactaggagtgaggggggtctccactcaagatggccagtctaggtcagaacagctcaggttcctatctgtcttgtccacgccttgtccccatttattctcccaagccatacaaactaatgtaattattttaaactctgacactcacagacaatgcctatagtttttgatccttattttccattttcctatgggttgaattatgacccctgccccatgtaagatatgctgaaatcctggttcctggtagctttatctggaatttaggacttcacagatgaattgggggatttcgtgtgtgaagggattgaaggatgtggtctcaagccaagggatgccaaggagggcgcttttattaaaggctcggagagaggcatggaacctcagaagcagccagccctggaaacacctacatttcacaaatctagcttcctgagtgatggatgaagagcttcttgtcatgtgacagtactgtgtagcactttgttaccacagccctaggaaatgcccatttgatttcttcctcagatggcatggcttcctgggccccactttaacaattgctgtgcttattgtaaaggtatacagggaaggatagcatctgaagctataagggaagtggcccatgtatgatctcccgtgtacggaatgattagttacgtgttctgtgtatccttccagacttctttcctatcagatgcgtgcatgtgccatgtgttgcatccttgagtacatacggtcttgtaagtgtgcagtctagcttctctcatggctgcccaagagcatatgcttgcctttcccatttgctgagctgagtatccaaatcctcacgaggctccagaagggctccagctcttctttggaagattactggacagaggaccatctctctggggcagtctcctgggtccataccaaggggcaaccaattcatgttgttccccaggcagccatgtctactttctcttctaggcaggaagttgaccctcttttcatggagtgggctgggtttttctggcccagaacagctgggctggggtacattcctgtggacaggattgcgtaactctgcaaaagacaggcttgaggggactgaccctcaccacccgctgaggtattttgacagctgcttctcctccatcccccatgccacctcagcccaaattccctggtagaacattctctctgatcactccactcctcctgactgttcttcccgctgcttagttctgagcagggtcggatagtgcccagtttcaaagcctgagaaccgaggctttggcaagcactctggacaaatgaggactgagttgtcggactggcttctgtgtgcaccggccccagtacctgtctactggaactcccaggctagctggagagacagatgtgtggccactgtttgtcacagtcctacagctaaaggggagagagagaggagaaagcttgcaagcgccaaggacccgtcaattagaggagctgtttctgggctgggttttgaaggatgagtatgagtttgccatacaggtaaggatggaaggtaatccaaggagaaaaccactctgaggagaggagatgtcacatttagagacgtatgtcttcttgttgaagattgagccccatagtatcctttcctggtactgtacctccagctctgaggacagaagtgccaggaaattgagccctggaacatcagggcagccatgctagcgaggctcagacttgtggccggaagtagcacctggtgtacctgccttcctggctggtggtggaactgactggcctgctctggtttcctttttgcttgttttttttttttttttttgttaaggaacaaatgacctctgccagaaaccaaaggtgaaaactttcatcctttcttgtcctcagcttagcacaaatatgtcatcagtgaaaacactcatgatccctggctgcatgttaggtgctctgctgggtgcttagctgttgagtggcaagctacaatagtggtccaggggtggagatatcgactgtgtcatgaccgtgaccgtgaccgatgtgataattctggagcatggtgtgtgtgggggggaggtggcaggatgcctaataggcctgtgttaggtgggtgacatgcagtgttaggtagctagcaatgtgacaagctgctccaaggtgtcacaactcttactgcctacttactatctcagagtttctggggattcctctggagatcactggcttcatcactgagttttcaccttcagggttaaggtgtctgttaatgttggggtctcatccaaaggcttgggagggaggcggattaggtcccacactcacatggttgtggcagaactgggtttccgcagggctgttggagcacaggcctctgctcttttctttttcttttctgactcagctggaggtgtccctcaatccctgggcagtaggcttttccagaatggctaatgatgtcatcaaagcagcaagggagatgttggctagctgatcatcagtgaccaactatgatcagtcgccagtgtgccattccaatactgttgccatattttgtgtgtcacagacacatgccctggtctagcctctctcctgggtgcttatttcccacctggtgcttggaaacctggtacccgccctgtagcccagagaagagtaacttcaacttgatgtcagctccagcgccttcgggaagctgtcacgtgcgtgctgtgagttagtgagggccgcagctctgctgcttcttaaacattaccaaacatacgcaacagtgggaagttcgacttttgaaacccatagctcatggcctatctggagtggccagctcagctcctttcctatctcagccagaaagaatgataaatagtgtgtgtttaggctactcttggagaaacaaacactagagcccatgtccccattagtgaaactggctcctgggcctttggcctactttagctgttccctggctttgccttctgcacgtgggagattccctgggctgatccatgccagctggattggtccaaatggttcgtttagttctacaagtcagctgaggtggaggagggaccgtttgtagtttctgattttcggttagcctttgtttctgttaactgattgaaggcagaggggttgaactgtgctggggttggagaaggctaatcctaatgacttttaagttcccagagaaagacagaagcagtaaatccaacccccaccctggggggagatagaggaataatgaagaagtcttggggtggggggaggttcgaatggcagaggcttgccatgaattctctctgtaagaaactgcagcaatttagagctaatggtttcctaggctaaattgtccacttaattaaaaagaagccaccaacagacaagcagaaattccttcacttaatccttctctggaatggcccactcttctctctctcgtttgtgagcagagattgcttcctcatgcagggccgccaccgctcccccagtctatatgaggcatggctcataaggaagatgtcgactcctgtacccctgtcacatccttcttctgttcaagggacattaggagaggggccatgtaccatctgttaaggcttttatatgtctacagttttgtttttaattctgtgttgtcatagcacgatgctcagaactgaccatccaggaaagattgctttccatatttcatgatgatgggtctacagggaagcagggctctactcaattaagtagacttccattttgacccctaatcccttgggccttgaagcctggagaactgtgttcttcatctgcttatataaactgactttttagtgactgtctggactgggtaagtaattaatctacatatggactaggaagggaaggaggcgttggatgaatgaagtgtgcccactcctttgtaattgtccatgctcactgggagcacacagtagcagtgaggccaagcagttgaatagagatgtagacttgattgagtccccgtagtctgcagaatatgtggaggcatgcaggcagggagcaacttctaccactgagtgtgtatatagatgtgcaagcgtatggtgcaccatagggaccactcctggatacccagacaacttgcctccagatcctgccagtcatggctttgccacctgaggcaagaaacttaagctatctgtgtcttatttcctcatcagtgaactgggggagtgggctgttatttaattaaatgtgtatgcataacattcactcaccaaatgtgattgagcatttgatgctaagctatgttgagctatgatctgctttgttgagtccatggctagtggaggtgtgagcacaggcttcagcaaggttggggcccctgctcactcacctgagtgctgtgccatgccctgctcagatcttgcctcactggagttttgtcagtgggtgagagggggagtctgacacacgcacacatgaggtggaaggttctcccaccttatgttccttacctcttcgtgatgagtaagtagctatcacacctgagtctcacagagccaaggatttgtcccctgtggtggctccatcctagcatgagcactgaagactgctattgtatgaaactggattcagcaaaccactctgtgaagacaggacagggggagcaagggtgggtccctgatgcatcccacagaggcatcagatgactccatggtttttttttggggggggggcggctatgatcatccttcatcattgtttctggttggggaagttctcatccattagccattgaatgtgaattctttgtggatgaggtgagtctttcaggtgaagtgtctgtgtgtgtgtgtgtgtgtgtgtgtgtgtgtgtgtgtgtgtgtgtgtgtgtaggtaggggctgttctcgtaagaaaggaggagagatttctggttttgcaaactttgtgtgagcagcaaagatgaggagatgggggactaagcctagaccagccttgttcccttgtttagcatccaagagagcaatgtctgaactagggaaggggctggcccatggaagcctaccagtgactgtgactgcagatctttgacctgaggtagggaccacttgctgctaaaaccttcctcccatccaggcttctcctggcctgggagcactggcttcagaccactgagcagagaagggtcatttgcagcagccataccacataccagcctgtgtctttgttgggatgctatgtgaagactatctgggggtgaccaccagatgaggggctataacttgtgattggaagatagactttgggacttctatccttcagctttcaaactttattttgaaagtaaatttaccaggccattggccatcctgcttattctcacagagactgtttgcaaaaggcaattcagtggggacagtggcggaagtaccgtggaacaagaaaaatgtttctctacctgctgagatgggaagggggggggctgtcctgatgggctggcatctgggagtggactctgagtagcttgggggactgcacagatttgtcacacatgattccagggctatgttgtaggaaggtcagtgcatgtcaaccattgaccagctctggtatggtagccactcattcaaaatgagggtcccacaccccagacctaggctgtcttggagcctcctgattttgacaggaagggacatgtcagaagtcactcacttcaactcacagacacacaccaaatcacagtcttcaatgtcaggctcaaatgccaaaaatacactgttctgtggcttcctgggagggaatgaatgttccttccagtggctgctccgtgcctgacttctctatgcctgacacctatacagtacctctgccatcaggatcacaagtgggtagtagtgagaggtcttgtgtaagccctaggtcacagggatgccagaagttcttgtactgtcacccattccatgaactctggtgtgatgaacacactggacgatgcagaggtagacacaaaacccacctctgctcaagaaacctgacccgatggcgggtgggaaaaggaaagccctcttcagtgtcccagctaatgaggagccttgtgtcacttagatatggtacatctcttaactggataacatgtgccttcttggtgtcacctgtctggcctaaagtaaccctagacatttctccaacccggccccagcctgccctgtctcatcgtagtttttgaatggtcatggtttgtaattctagaagacagaagagcttcttttaagctacatataatggccagggtattttttcccttgtaggaaagatatctatgattattgatgaaccatatcagagtctgggattgactgtgattagaatatggatgctggcaaatggggactgaggccagctgctctggcatccatctccgagtcccattatctatgaccctcacatgactatgacacggggagatggggtgaagagttatttggaagatacaagtgtgtctacctttcaggggttcttgggtgaggaaatgcagccattgacgtgagagggtgtcaggttggtggggggagtgtgtggaggtggttgtggagctgagagaggaaacagcgttctgggggaagccagctcacgaggaggcagtacacccaatggtcatgatactagtgttagccatggactctttcccaaaatgtatctctgagaagtcaggcacagagcagccactggaaggagcattcatgccctcccaggggaagccaccaaacattgtacttctgcatttgagcctgacgttgaaggctgtgatttggtgtgtgcctgtgagctggatggagtgatgtctgacgtgacccttcgtgttaaaatcagttgctgctcactgggtatcgagcaatgttctggaatcagatcatgttgctggttgtgcaacgttctactgactcgtccgctgagtcctatagtgcgtggttgtatctgcctataaaaggggtaggagcaaaaacactatgaaaagagaaagctgctgcagagggaggtttcaccacactagtgacctggagcctgcatctgcagagtacccatatggagaggagggtgataaagagaccggttgtcattaggaacaaacagtactgacagctatgaagcgatgcaagcaccattagcctgtccgagtgataagcgaccacagcatgtgcccatgtacgctgggctccagaatgcccatttattgctgttgtcatttttgtagatgagcatggtggcacgccgtgacactggctttttttgtgaccatgggcagcgccattcctcgtgtcatcgtgtctgtagcttgatcacctgttgtaatattataccagtctcctgtgacttattaagcagttttagtctactgtgacttaggaagcagttctagaacaaaattgactctttgttttttttaaatcatcaggtacctaaagtgatagagacattagacgatctcctcaaaccattgactccaatggctggtgcccaccttggttagccgctggcttgtcgcctaccctaagtcgggagaggctgtagggcctgtgggctttggggctgggcagaccttggtttgtttctgtgatgtgtgacttggagtgagcccctgaacctgtcttaactctagttccctgtgatagggttgtggatctcctggagcggttgtggggacagaatgagaacctgtgagctatacctagcatggaccaagtccctcatgaatagtggcgggctcgaaatggagaagatttctggggctagcctaatttggcctttttaaagaccagggatcaacaggggctttactccacctcccctgcccacccccactgccccaactgtggagtctgtaaaacagagtaaggaagccaaccaagtactcaggcactgagccacaccccagccccagattctatttaactgccatcagtatgctgaccaccaattttgctaacttagaacagagccccttaactgagcagcaatggcattgagctacccacccaggtattatgtgatacggtgttgtctgtctctgtgggactaagtggtaattttaagaggagccctcttttgcccacagacacaccttctaccacctctcctggggttcctccacagcactgacaaggcatggctggccctcacacatgcccacggttacagctctgcaccagcaggcatctaaaataaccacagcacagaaggtctggcgtgttcttgggcttatatttggaattgccgttggaaacagtcttggccaaatgtaacacccatctgttcagagtggtttgagactgagagatgaggtggatggcaggagggggttgggcggccctgatacagagggctgggggctttcagacaccctgccccgcttgctactgtaaacccctcatcccttccagtctaggctgctggagcctctgccctcctggagaaaattccccttttgtaaagccttagcttcccactcatgggtctgtctgtccttcagtggttcagaagaccagccattctcctgagtctttatttccctgaggataccggcccttgcccttgtaccaactggcacccggcactgacagctttaggtgtctctttagctgtcagattgtctgtcactttcctgtaccctccccagacttttgctgctgtttttgtaagtgcaccctcaggtggcatcattgtccctacagtcctgtgatgattcataccgctctgtcttctacgtcaccacagtgctattgatgttaaagccagaactctgagtgtttaggtctgtgtccttccattgtatgttgctacactcctgtcctgttagatacccattcttgatttgctgtcattctctgaggggctctaattatccaagcagcttgtcactcacccatggtcatcagccttgctgatgttttgtccttgttccttggaggactcagttcctgccgtgaccccacctccttgtttccttatggaaatatgacctcatgccctttctgtacatttgggactgatgttcagggtctctggaggagagtggtactgaatcatcttccttgggttagggactgtggggttcttctagggctgctccagtaaatcatcccacactcagtggcttaaagcaacagacattattttctatcctggtatggagattggaagtcagaaatcaggatgtcataggtttataccctttgctgagtctgaatctgtctggcctaggcttatagcttctggtggcttttggtgctcttttggtgttctataattggctaccagagtccaatctctgccccataagtctcctttcactttgccatgaaagttgcctccactagtttaaaaggctaaaagatagtatacatgagtttgcctctgggtaccccaaacatgcaaagctatgggtaccttacccataccttaccttggtggagtgtaggtaggatggaacattgaacacatccagtgtttccccagtgtcttagtctgggttttactgctgtgaagagacaccttgaccaaggcaactcttatatggacacttaattggggctggcttatagatttagaggttcagtccattatcatcaagatgggagcatggcagcatccagacaggcatagtgcaggcagagctgatagctttacaccttcatctgaaggctgctagcagaacactcacttccaggcagctaggatgggggtcttaaagcccacacccacagtgacacacctactccaacaagactatacttccaaatagtgctactctctgggacagtcatattcaaaccctaacacccagggattacttccccatctctgaagaacttcatggactcagcaggcatttaacaacaaataaacaaacaaacaaaaaaagccaagtaaacaagaattgagacaggctttaattactcttgttttatttataaatcaaatgcctctaagaatggttattaccatagggggataaatgtcagaaggaaactttgggccaatgaccgggtttttctgagggagtttttgtagtagttctgtgggcatcctgagtaagggtctggcttgggcggattacatgcggggttgactgagagttggaacagctgcaactgtcattttctctggcacagtctcttggggtgagcaatactattgattgccggagatgctaagatatgcgtgaagcaggaggggtaccccatcatacgcatgaagcaggaggggtaccccatcatacatgtgaagcaggaggggtaccccatcatatgcgtgaagcaggagggggtaccccatcatatgcatgaagcaggaggggtaccccatcatacatatttccaagtgtttccctcagtctcagctcatgtgactggcctgtgtgccgaggtccatgcaaatgtgattactagctgtaactgattgccttgcaggacatgttctcattcaagtataatagttcaaccgatactggggccaccagcattggtttagttgggtggatatatgaactctggggatcattctgctcatggctcatgaaagcatggagtgctgggaagcaagttgtttagagagtcatggtggtttgttttgttttgtttcttttttcttaattggcattgtgattgtgtatgtacgcatgcgtgcacactcacgtgccaacatgtgcatgtgaaagtcataggataactttccagagttggttctctccttctaccatgtgggtcctgtgggggtccctgcaatctcttaagtccagcagtggaaggatccgagaagaggcaagactgaaacgcagttcagtctgactctagttagccatcattgattcatacttatggagtctgacatcagatggtatagtgtagccatatttaagcacagcacaattttttggggggggtgggggaaattcctgatgacaattaactcagtcccctgtgcacacaaagcttaagatgtatgtatgctgaaacttttttacaaagtacatacttttacaaagtacctcctgaaagatgggtgctgttgacttagaaacaatgctcaagataagggtgggagaagaatgcttgaggtaaacagattacctgtgggggtcaggattggcctggccctgagataacagagaggttacttagaccattgtaaaatacaaatgccaccgctcataagaatgggttttacgaactaagaaacaatgttcaagatttggtgggaaaggttctcggataaacaaatacaatatggcgggggattctggtaaaacctggtggtgcagatagaaaaggaccgccatgctgtaagctacagcctttccaagcagtgggtggaagacaggtaaacatttcctttatctgaagagacaagcctgcttaactttcctggcttctccagtgcttatctgtgtacacaaggacccttgacccacgatacgggtcccagggattgatctcagattgacagtctaggtgacagtcacttttatctatcgaaccattttgctggcccaaggcaaggtcttttgaaaagctggtctggccaggctgaggtaagcaaagcagtctcccaacctgtgtctgattttaggcaacctctgaggaaccccaaacaccctaagacatcctaaaagaacactcggggatccctatgaaatgtcacttggcttgctatggtgtcatcctgggtgagaatagcaaaagtgctctgcagcaggcctggcggggggccatggcctctgtagcatgcctgtagctcagtggacgtggagacatggggtgatgcttagtgaagatatccttctccgagaaacacaaggatgaggagactcacgggaaagagaggtgtcaagctggagatgcaggggactagagagcacacaactggggggagagggcagcatgccatagggccgcagtcacttgatggcagcccagcatcgctcttggtaggaggcgacagctagggtttcatgaagggagtcctacagagctgggggagcccctatgggcaggtgtttggaggaggagtggggagagaaacatctggaaaaacaaagtgatgaaagtgggggtaattcttactccctctgcaagcagaaacggggtgagaaacacgtcccgggagttctcaaagtgaagaaattatcccaacatctgctgaaacattcagacagacttcatttccggctgttgtcaggggtgtaggactgctgcgatggggctctgctgcagaggagagctcagcttggaacccagcagaagtggggatttgtaagcaagaagcagggctaggagcagaaagtcaccaaggaacatcgagagtaagagggagcctggctaaactgctgcaccaggactcctccctcagcaggctaactacacattggctgggctaggaggctcactgtcagaggatcaggtcaagcagtggtcaaggtttgggaattggagtgcgttatagccaaaccagcttagcaatgtctacaaccaaaacttcaacagttttatttagttgaaggagctaattgcctcctatgaatttttcctcccctacttcccctgctggccctttctcccctcttcctgtcttctctcctctcctgcctgtcctaggggtctagatatgtagtcaaagctgaccttgaactcactatgtggttcaggttgtctttgaactcaagatctttcttcctcagcacccgtgagtgctgggatcacaggtcctcaccattcataaattttcctttaacagcaagattcatgcgaacacggcacattgcaaacataaagatgaaccagtaactgtcaagggagactggcaactcctgtggaaaatgtggttacatgcaattgcacatatatgtggtgtttgcttggacttgcaaacatatccgtctgcagggggttccatgcctatgtgtgagacttttattctgtagcccaaattgtcctgataagtcgctacctatccctccagacctggaacatcagtgatcccctacctccacctcctagccggggaggattagaggcatgagccaccatgcacaattttaaatgtaactttagacgttcaggatatcaatgggaaaagtcaggaatttcacatggggttgtaaccttgtgtggatcacaggtgccctgggttcctcttaaaagaaggggatgggacagtacagagtgtttcctggcttctctttgctgtggagtgacttttgaagcctggctgcaaggacagtctctttctgaggtaactagaaggaattttaaacagcgaggtacgatggctcagtgagtagaggaaccttctgccagggctagcagccagagctcagcctcttcacatacatggtggttggagagaaccacgtcttgtcctctgacctctacatgtgtgctgtgacttgctctgccacccccactcccccaaaataactgcggggttttgttgtttgtttcttaaagcagatataggcaaggtggcctagcaacaagccggaacacgagtttcatttgtggaacctgtgtaaaggtgaacgagagacctgattgcacagagctgtcctctggtctccacacctgtacgatggcctttgcatggcctccccacactctgctaataaataaaataaatttaacaagagaaagagacaaaatcaccaactaacaataaaacacagtattggtcagtgtttgggggcagtgtagatgtatctgagcaggaagggtgggtggtatgttacaggtgggagcaagaacggagggggctcatttgaaagaaagggaggaaaattgttgtattttaataaatcaaaccagctaatgtaatggctagccgatttttgttgtcgcccacgtggtgtggtttcacaccctcggatggtaagattatccatttattttattcgcaggttgtactcagactatctctacttcgcaagttccaataaatctgcagatgacttccacgagaaagtgacggaggctctgcagctgtttgaaaattgcatgctggattattcactgcgcgcctgcgtctacaacaacaccctgaacaatgccatgcccgtgcgtattcaccagggcagcccatacagagcaggcccactctggtgctattgtgtgcagcggggcattgtgaacagggttttagtgcagagacgggagggaggtggggggatggggacggagtgtttgaatgtgcaaatgacacccagccagctgcctctgagcagtggctaatgtggaagaaaaatgctcccggctgagagaggcacagcagcagctggggcctctgagcctgctgtctgtgtccctccttccttgcctgtcacccagaaactttgcatcctgaatccccctgcctctcctagagacccagggtgcgcttaggagggctgccatttagtaaggctctgcaattagagctggcagacaggaggacacccagtccttaggttgtttcagagaatcttcatagcattggctttcagaattacccaccagtgacggaatgctccagcaggctctccactgcagaatgttctcgctaccccttgttatccttctctaaccttccagtcttatgtaaaatctcttgctggaggtgaatcctcttaagttacctgaggtcacatctcccacacaaggctcccaggcctaagtgtttccctagcagggctcttacatcaggtagcctcctgcccgatgtatgctgtgtcccacatccggcattcacagatgtagatgactagcacgccccacctcagggcagtgaggctcaggggaaagatgtcaggctctctgcttggctactctgtccatcttttcttaagccagggccagcaagcaggagtctgggctgtcttcttgtatgcattgtagtttgcattggcaaggaagactcaacatagataaccacattttcagtcaggcaagctttggaggcagactgcggtgtgggttcattctggctttccctggctttgctcgtgtgtcttagcctctctgaaattcaattgctttattctaggctggtatagggacgggagactgggagtcatttacatgtgccatactgacaaactatggtgctgcgccctggcacacttaggtagagcccaccgaggggtgaaagtgctcaaacctgataggaaaatgatggactctgccagcgttggctgcccagcagcctaaggctgtgccttgatgcaggccccactattgctggagcttgctgacacaggcggggcttccaaggctctgtcaggttgccttttgtagccagctacccagtaatggggggaatccaaggctcaagtctaggctttgaaaccccagctttcttcagggctctggtgtgtctccagaagtttcttctttagggtttccaagcagcaggctctggagggtgggggaaggcaggtgggagaaggcaggtcgtcagttatgagaattcagatgtgctcgaaggcagcctgcctcagggttgcttccactctggtccttttggaatttcttgggtttgatgatgctgtggaactctgcaacgatgcctgcagcgtaggtgggataacaggggcggagggagggaagcaggaacaggccagatgaagagtgaggggtgatgccctcggctaagttaacatgtttccttagaagaggcagcaacagtcactgaagcagctaccacccagttctctcttctcagagatctcctgagaattcagagagggaggggcagatgtaggctcataccagcctaagttggctggatgtcttgggtagagagaggcagggctttggagtcctgacacaggcatagttggatttcatggctgggaaccagggcctctcctgccctgcaaaggatcagcatccgatataaacagctgtggatgtggtggtattttcatcccaccccgaggtacgccctaggaaatgcagagccaagctacatgcatcctggctgcctctaaataggcttcctagagaccggatatcctcagctacatcctcccacagagaagagggggatatcctcagctacatcctcccacagagaagaggggcatgcctggtgtgtttcctctctttgctgtcttcaggccaactgaacatggaaacaccgttgtgactggacaggaagttcatgggttgccgtgtgagtctctctacctctgggtgtgatagatacattcttatttaatctttgtcaagtccattggtgaaagataggaagtatctcacttcagtttgttgctcactgggtactctcctaaactttagctcctcactgacctctgaagttgttcccattttacagatggggacactgaggctcactgaaggtgtactctatttgcagctaacaacaatttggatagcctttgaaatctgtcttccttttcttgctcttaaaaatggttctgagacagcaggaggcatccacttcaaatttcatttatgacaggctttagcatgacaacaaccatagcttagcactgcttgtttaaggagcgctccagggccgtgccatggcagtgacgggtgactctgcggggcatagggggtgggggaggaggggcgggcagttaaggatggtgagcacattgttttgggagatggtttctcccctctggaatggggaaaaagttcccttctagctgctgatgcatcctatctacagcgtggggcatgtggttagtctcctgagtcctggcacggcaggtgtgccgttgcggctagtcatgcatagcctatattaagtaaggccttcatatgactcctcccttccctacagtctttcctgccccattactgtgtcatggcaactctcccctcatttaggtcctcaggtggctgtggcctttgggcaggactcataaagagaggtccctgagagctgatcagaaatgcaaggttcctcttagatgtcatatatggagggttcggctgtggacattcatctaagtcttgggggagagtgcagatgggaagagttgtttgcctaacaggccttctgcgcatgtgcgtgtgctctggtacgggaaccacgtgcttgggaaaacctggctgcctaacagaccttctgcgcatgtgcgtgtgctccggtatgggaaccacgggctccggggccttctccatgcctctttcacgataggcttcccctgccaatccaagagcttcttgtccttcagatttttctttactttgatccactttctcccctccgccccccgccctcacgccatagcaggggtcacagttggtgatgacagttgtctgtccccttatcagtttagaggtatctctaagcagtcagggccatgcctgttaactggcctcacatctccactgcctagtgtggtgcctgatacactgtgggaactcacagtatttgctgaatggatgaagaaatgaatgtctgagtgggggggctgagaaacagaagggagggaggatagatggggggggggtgccgatgaaattgagggaacaagaaagattggggtggttcttgtctggggcagagttgggtctgtgaccagctttagctcaaacttagttgccctcaggtgctttctggacccctcctagttgcctcctgggattcccatacaatggtccccagtggtctttagactcctcaaggcccttaggatcctgtgcctccctaaggcgttctctgggctccccatcaggtgctccctaaccccccccaggcaccttatggaacccacagggtgctcattctttgccagagcttctctgtggtagaacaagtgtcacatccagagggactgacctgacttggctttgtcgtcaggagttaactgctgagtccaggcagacagccctgccctcttggtcttggatttttatcagcgagtcatcaagcatccacaagctcaaaaactccccttgacttgaccttggtacttcccttgaccttggtgctccccttgaccttggtgctccccttggccttggtggtttctgattttacatgaattgggccctaaatagcttctctacaccggttctgttttgattcttgttctattttggttccctccttatggacaggtgtcggggaaatgagattttgtctggttcccagtcacggcggtggtcttgcatgcatagatggtgttcctgaggggcccagagtgctccctggctgagggaaagggttctagagccagtgggttggaagtacactcacttcttagagctagtgcatatgtaggagtcccatgtcctccctccttggaccatatctgcctgtgaggaaggtcctatacagtcaggactctacaggtctttgagggcagtggtggactttcaccaagatggttgtagaagctgttctgtccctggggcagatacagggacaggatgccactcctctaaaacaccagtgtcctgtccctgccagttacttcctttcctgctggaaagttgtcaagttataaaaagtaatttctctggaagagatgaggccaagctgactgtaagcctgggaagagatggcaaacagcctgtgagtccctgccctagcatggtgttcgcacgtctactcgaggttggagtctgcctgtgtatgtgttgctggggctgaggcatgctcggctctttcagtcctgatgagctatttgctctgatcgttctccttcccttgcagcttcctgcacagttagggggaaaaaaacggtgcaagggaaaaggagtagttggagatgaacccagtaagcaccttcgtgcacttggtcagatgtttcctcagtgtgctgtcaacactgagttcagcagttccaccaagagccaccgtgaatgctgacacaaggctttgcccctggtgactcgatggccctgcccccccaggaattgcaaaatcaagtttgtcagggagaactgtgaagagtgtttgcccaaaacagaaaggcctggaggaggagcctagaactgggaggagcccatggaagaagaatgaactggcaggagctaggaggaggagcctagaagtgggcggagctatggaggaaaaatgaactgggaggagctaggaggaggagcctagaagtgggcggagctatggaggaaaaatgaactgggaggagctaggaggaggagcctagaactgggaggtgctatggaggaagaatgaaaggagctgaaagcagcttccaaatgaagagtctcagggcctgagccagggccagcctaggcctgctcacagctttacaaagcatatgaccatgacagagggaggacagagggtagaagtgattgatggaagatccatccaggagcctgagggtgtttagcaggtgctgttgtgagtagacaaagagagggggatgtgagtagggaggtggctggggtgagtcgctctcccttctgatatcagctgtgagttcttgggtaaagtcaccaaccatcttcaagtttggctctagagcagggttcacaggacacacccaaggctactgtgaccctggccacaactcatggcatggcagggattccgagtcacatcagcgagggaaagtgaagggcagagcctctagtgcacttctccccttcagagtcagcacctcctcgccaggatagatgcatgatcacatgaccacaacgaggaaccttgtcaccccaagctgcggtgtccggaattcttactgggcctccatcacatacagagatccatctgaagtcattgtgttagcttgacataaaattctcctgttgaacaatgcaagccagggagggccttcagtggtcacctctgagggcagagggcagataccagacccatctttgagtgggtcaattctttactctaagcttgtagtttggcatgagagaaggaaccaggtaaggatttgagatatgagtctgaggggaggaggaaggctttcctatgcgttgggttttaccctcccccccaacccatgcgtacatttggggtacatcacacacttccatggccatggttgtccccatggattacagtgtctaggttgcctttaggtgtctgtttttgacttttcacagcctgatcgacagcagggagacagccacccacgttatgcaaacaccatgtctgcccttaagagccttcctgtgcttctcacttgtgaggagaggctggagccacctgtgtgaagactaatgcaaccctaagagtggggagtcttcgcgcatgtggcacagagtgccttgtgttaagatttgatgtaggaaggtagttgatggctaaggtgactctgtgttagtttacaaagagttgatccatcgtgctttggaaaagcacctcccaggtctggggaaggttttcccgcagtaacaccctcttcctccttcctaggtgaggctccaggttggcctgtatgctgtgtacctcctggattggctgactgtcttcagtaaggagcagttcctcattctccgtctggaagaccacgcatccaatgtcaagtataccatgcacaaggtcttccagtttctaaacctgggtatgtgtcatgcttcaggtgggggtgggggggtggggctcagcacaaacttcagggatatgggctttcacacacacacacacacacacacacacacacacacgcgcgcacgcgcgcgcgcgcgcgcgatcgagcgagcgagcacacgtgtacatgtgtacaagtaagatgctaacatcggtatcttcctctgatatctcactgaacccagcttgcagtcttggttagactgactagccaggtagtgcgtgggtctgtgtatttcttccttcccagtgtaggggttataggcacatgctgccacacccagctttttaggggcatgctgcagatgtaaactcaggtcctcatgcttgcagaacaagcacttatgagcacttcaccctctgagggagatgctcccctgccccatggcatgtaggctccttagcgggggtggggggtggggggagggctttgggttaaatgtaaaataggaagagatgagctgtgtgaggccaagaaactcctgaagaggtaccagctcagttcctgctcacttagtaactactgattggagcatggtgcatgggacagtgggcaagctctggggaggaggcttgaaggaagcccagtccatctcaggaagtgactgtatcccaaaggggaaggtaggtactgtcccagtgggcctataatgatggaggacccacactgctgaggggccagagaggtatcaatgaaagagaagaggagatgggttgaattctgaagccactcaagtaggtggctaggacatggaatgtggaggcctgactattgcagtggttctcaaccttcccaaagctgtgaccttttaatacagttcctcgtgttgtagtgaccccaaccataatattatttttgttgctacctcattactgcagttttgctactgataggaattgtaatgtaaatacttttggagatagatgcttgcgggggggggggggggcggcggtcacggcccacaggttgagaatggctggggtattgcatcgtggctggtgttgcttgggagtctctggagtcagaggctcatggcctgccttcagcttgaggataccaggtctcaggttcctctaactgaccatgcagaggcacatatggaagtgaggtatgctgcttgggtgtggctaagtcacccaaggacaactgtggaggctctaaatgtcaggccaggccactcttcttcatgggacatttcctatagttctgtttaatgacctggcttaggagttttgttaactgagtatttcttgaaatatatttggccaccaatggaattcagaactcttagccagtgaattagctttctttttcctttcctttcctttcctttcctttcctttcctttcctttcctttcctttccttctttctctctccctccctccctccctcccttccttccttcnnnnnnnnnnnnnnnnnnnnnnnnnnnnnnnnnnnnnnnnnnnnnnnnnnnnnnnnnnnnnnnnnnnnnnnnnnnnnnnnnnnnnnnnnnnnnnnnnnnnnnnnnnnnnnnnnnnnnnnnnnnnnnnnnnnnnnnnnnnnnnnnnnnnnnnnnnnnnnnnnnnnnnnnnnnnnnnnnnnnnnnnnnnnnngcaacttttataaagacaacatttaattggggctggcttacaggttcagaggttcagcccattatcatcaaggtgggagcatggcagcatccaggcagacatggtgcaggaactgagagttctacatcttcatctgaaggtggctagtgaaagactgacttccaggcagctagggtgagggtcttaagcccatacccacagtgacacacctactccaacaaggccacacctccaaattgtgctactctctgagccaaggatatacaaaccatcacagccacctagagatatcttgcattaatgtggttgtcttctgttcctaagagggacaggactgtaaggctagttttctgtcttgtataacccttgacactgggccatgggaatgattttggttgggtcctacgggcttggaggtccagaagagtgaggagccggtggtctagtgaccagaggttgagcgtgtgagcagctggtgacccagacatttggaatggggtggtagagcatcatttgcagcagcagctagcctgccctggggcatcttcccataatacaattgctacaggtacaggggcccccattcctcctgctcttctgacacgtcacagcaagaaagaggagacccaagcccttttgtatcacacaggaacccagaccggaaatgatggtggcagagttccaggaaacagaagtccctgtatgtagttacttaggacaagcgatgggccttgaaggcagcccacagagtagatggaaatgaactctcaggtggcccaaaggtgaaaggacaccatctcactaccagcagggctcccctgatggctggcatgagcctgagctttagaattactttgcagtgtctagtggtttcccccttccttggtttctccaaatgaatccaaccatatcttttttttttatttttaaaaagatttatttgttttattttatgtttatgtttgttctgtttgcatgtatgtgtatatgtgtagatatagatatagatatagatatagatatagatatagatatagatatagatatatatcatgtgtgtacctggagccctcagaggtcagaagagggtatcagatcccctcaaagtggagttatggatgattatgagccccttgtaggtgctaggaatagaagctaggtcctctgcaagaacaagtgctattaaccactaagccacctttcctgttcaaccacatctcataggaaagccttggctgagcatgagggtcacctaggattcatacgaagtccccttcatttcaagtgacacctccaggaccttacaggaccattttccttctcattctagggcctctgagtgagaagcaggaagctctgatgaccaagagccctgcatccaacacacggcgtcctgaggatcgtagtctgggacccatgtggcccatcacccagaagattctgcgtgaattctatgggcctttcaacacaaggctggcacaggtcttggatgacgaagcatttgcctggaagacaacgtgagagctgagtcccttctgcagaagctgggcccactgactctgtcattgccatgactttaaaagtctccaggcggagaactgtcacccacagcgtggagaaagccgctggagccccacccaatcctcttctcatgtccaaggcacctggtgtgggaactattttaaagctttccttgccatgttcagcagctctgctcttgattgcaaggctcgtccacctgaagccttggaaacgacactgggggtaggcttctgtctgttcccagagtgccttggatctcaggagggcagtggatctctggcacccagtgggtaggaagaggaagctacgggaggccatagaccagccttgccttccttcctccaggagagtttgtctgggtgtagggttggacagctctgggatccgattaaggccatgttctggggctgcccctcacgtgttatatcccagcaggccttgcataaatcgacaaccccatgtggacagagaacagagctgcttggagaatggaggctctttcgtttttgttcgtattcccaagtcagcccttcggtgacatcagaaatgagccctgttccctttgctgtgctcagaagaaactcagaagtcagcttttggcagtaggctcgtctctctgacctattctgcccatacactttgtttatgcccagcgtagagaaggagcgttttaaaacaaactgcttctcgcatttgactggccctgcctctcttttctgctcccttggatgttttccttaaggacttcagtttatatttggaaagggaagttttgctgttaatgccagaacagaacacctcaaggcatcgaacagtggaaaaggaaggaagtgaagccctccccatttgtgggggtcactggagagtgtggggatgtttttggttctggctggttacaggctcccccctgtcttcctgttggaggaatctttatccacattctctgtcatgtgcagccaaagttctgtaactcactaagggtgagtctcaagacacccttagaatgtcctcagaaacacatctcacaaactaagctcgggccacatgtggtgtcactaggagatagctttgatttttatgaacctttccaggcctgctagcagcttggttcgcaaaggatatgctgaaagtcttgtcattttaaaaaaaaaaaaagaccccagggaataccagagagaacaacttaaacccacttggcacacaggacaaggtggggatgtcacaaagcttttcattggagcgttgccaagggatgctgcctgtgaagctgtgttctcaggtcaggatcctgttcaccagcgtcagaaagtgtacacaccacatgcccgactgtcacttggacgtgtgagaaaagctgggctttggcagcaggaggctgtgcagttgctcgactgtgtgagttctgctgcggtccacccttgttggagatgggactctcagctcattggaaggttccgggagagctctgggcatcagcatggactgggctcgttctgctactgaaggggctgtgtgtcatgtggcctgtgttccaggacaattctcccttctctcacggtggccacttggctcggcagccagtgggaaaatctagcctgagtacaaggatgctttgggaagaaatgacgagagagagagagagagagagagagagagagagagagagagagagagagcgagagagagcgcaagctcaagcgcaagcgtgtgagaaagagcacgagagagtatttatttggaataccgtgtgtgtgtgtgtgtgtgtgtgtgtgtgtgtgtgtgtgtgtgtgtgtgcgtgcgcgcgcgagtgtgcgcgcgaacactcgtgcttatactgagcagggccctctcagctgtcttgttgatggggcttctcctccattagagacatgatgcctttatgaattaatttctccaacccttcgcctgtcatttccaggacatatcttactgccccacaccaaccacgactctaagagattttttctgacgcactcctatgcatgtgaataacatgtcgcgtgattctgcttcttacagaagtattgccaaaggtattatttccaatattatttggttcattgctgatctttttttatacgtgcagccccttcctttccgccatgcgtggccatccggacccagtcttctctctattgctccctccccgggggtcaccggcactgcctttgcttttgctcggttggagccccctcttgttgagagcacaggcagtgttttgggtgatggctcttgagcctgtcaccccaaaccaaagcgaaacacagacctggtaccgaagacacttcgtattcccaaagccgtgtgccagggtgtatgacaccttccctcccttgtcgtgtaaggtatgatatgcgagtcacatttattctgtacttttactcatatttaaaataattaaagatggacccacacaactggtgcctgccaagagtgagtcctccttcacaagcttgctggccagttgtttccatgctgttctgtgcgcgtgcgtgagtcccggggcgggaaggtcagcacttcccctgccttcctgacagtcccagagcagacacagggccatactcattccctggggaattcctgtggaggcctgctgtggttgggagtcagggtgggaggttccatccagcatcaagtgcccttcacgtggtcgtcagacatagggatctaagactgaggtgacaatgggctttcagaatttgagtttgagatccttggtgcgtcttgagtgtgactcatccctaggcaggcagggtcccgctggcactcaagaaatatgggcaagcttggagaaggagagggtgtaccagtcattgttggtcaccttaacaaagtaactcagggcaccttacacacctttccacaggtttcctaatcagcaccaacagtggtcaaccatgttcagtgttcatgaacagtgttcaactatgggagcccatggggacatttcacattcattcaccacacaacccatgcttactgtcactgctcatgtgtcagtctaaactcagggggccagtgcattgttttctctatggcctctttctgtggcttccctgtgcctgctctgtgacctccccccctcacatgaccatctctctgtgcaggtccctgatacctttccctctttcctttcctctccttctccttctccttcttcttcttcttcttttttttttttttagtttttcgagacagggtttctctgtgtagccctggctgtcctggaactcactctgtagaccaggctggcttcaaactcagaaacccacttgcctctgcctcccgagtgctgggattaaaggcgtgtgccaccacgcccggcttccttttcccctttttataaagatgtcaccattaagggtctcatttaattcataaccttttgaaaaagaattctctttttactcagaggctcaacccatttgggacgtcaacacatcaatttgaggagaggagtagttgcaagagggcttacttcccacttagaagcttggatcatgctgagcacagcgtggtcctttggtcagtcccacctttctcccaagccctgctcctcattgtgatgtgttgagtgtggagctagacttagcacagcctggggctggcttccctcagcaagaatgctgctgtctgagaggatagcgggtggtggatttgagaagccagacaggccagggcatacttctgaaagctagagttccctgtgcctggagctctcccctacccttgctgctaggaaacagcctgggtggtgctgtgcagaatggcatttctctgttggggtggagactgcatcctgaggagagccttgggccctgtgggtgaggctaatctagtggagacttgcaggaaaaatgagctttgaggagtttggttttccctgagctttggaaccagctcccctgaggggcaccagggaaagaacgtggcggggcagggactgtgagcttttagccactgctgcaacaaaatcacttcatctgaaatggctggcgatcccagagagctctgaggagtaacccccttagtccaggcctttggaagaatggcctgcagccttgctaacatctatctctgtgatggcttcaggctggccttgcttctatgaccccagccctgtcccattgatcgctaaggtcttcatggtgacttcaaacacagtgaatttctcatcgtacagtcccagagggcagcagtctcagaccaggcactataggctgaggcagggtgggagctgggctgcatctcctgtgatcccagggcaagctgtgtccaggccttttccagctttgagaggctgccaggtactttggcttgtaggcttctttctagagtgccatatttagtctctgtttccctctgcttccctggtcacgtggcctctgatcacaccctgcctctcatcaggacccttagagttacccgggataatctgtggttactgcctcatctcaagagctcatccacaaagtgtctcttgttgggttaagggaataattcatccataggttctggcatctgtgctctgacatcttcagaggccatcatgcagctgaccacaggagagtggccctgggatctggccaggccagcaagtgagatgtaacaggtgcccagtggcaggtcccttgtagctttaccagtggggaccttaacgtgcctgaggtagcaacagttcagcagaggctctgagctaaggcccttgtattctgtgatggggcgggcgggatggagtctcagctgcaagccctttggtttgtacctttcctcgggaaactcacctcgccgagtgctgtgcaccctagacaggactacatggctgcatgaggagtgtcttttgagggcttacggttgcctttgctttttagtgcttacgaatctactctggcagtttctcagttgcaaccactgggcagcttcagtttctaaagcctggctgttgttgagttcatcgtgttgcagagacgacttcttgtaaaaattacaaaaatagaatccttagttccccagagagcctcaagcttgcaacctccctgcccccagcttttgttaggctgacctccaaccccactggcatccatctatataatggtccaggctgcccttgccttcctgccctctgccctattgcattggccctgggcctggacctggtcctcccagtctggccagcatccttctttgtttttcttccttggctgctgagcatggctcaggcagaaggactggctatgggcagtcatggggtccctggaactgcaggttactgtcccaggaggaatgcatggcctcagtgatgggcgacttccaggtaacatatcaaacaggaatattggctgaagaggagcaacaatgtgtctcagttgccacctgcaagtgggtgtgccctatacagggtcttcagggcagccagaagaggaaaggactctttcctgggcagcacatgatagcaaccctgtggtggggcacagccacggacatgaaatgaaccttctgttccaccagagaaaccccttactggggcagcagtctgtgggagtcagacttcttctgggatttcatggggtgcataaaaagctctttatattttgaaaaacctcaagagagccaggccccggtcatatttaaagcaggtgggtctcagttaaggatgagatatgggtcataagtatacttgtggctcacccaacacaaaataatgggatgaccccgggggctgaactaggtcttgaagaatcccttcctggctaaacatagaaaggctaggtcttgaggatggaggtgaggtggcacctcccctcaccttagctactccttaccgaaaggatgctccagttggcactttcaaatttcactcctccagtatagcacaaaagaagaggtgagcccgggaaggcccgtgtcccggcaggctgactttgtaaccatggagacactacagttctgatatcctcatgagtgggtatcagagttaacaaatacaaattgagtatcagagagactgcacacctgcctgaagtcacaacaaacaggtccgcagaaaggggtcgcacaataccaactcaaaaattttaatttttacttccaggtcaatgcttgtagccctggtgctatattgtgtgaccttggtaccctggtgttccttcttcagtggactacctgcatcctgactgtcataaatccttttctcttcgggcttcatttcaaatgccctcagctgcttctggggtcacccaggctgggggtctggatggtgacaaacttcttcatggaaaccaaagcacattaaagacactcacttcgctcaaaggcttgctgcactgagcctcggcctggcagaggtgccctccgtttcctaccccagagtggatggcccatgggctcagcctcccacacagacaggctactgggggctggcctatggtgaggtgtcccataagacctgagtcacagcctaaagagaagggttccaccctctggccccaggcctgcctgggcggcaccaaggtacacaccctagctagaacttgttcaaagaactaacatttcattttctcagtaaatattttctgaacatctactttgcacaaggcactgggccaggcaatggggcgaggctggcctgtagttcgtgtgcatattcatctgtactttctattgtcaggaagcataggtggttcatctgtgtgtgtgtgtgtgtgtgtgtgtgtgtgtgtgtgtgtgtgtgtgtgtggtttgagagagagcagaacaagcctcagccgcatggagcctggtgctgccgaggacaaagcttggtcctttatctaaagtatcacagaactctggcagccatgaagagatctgatggagacagagaccttccatctgaggcttcctcatcctccttgccctctgtactttgtcacctccctgtgtgctcagtccctagaccaagcctgatggcatggctggaaacagtgatctggttttccccaggtagggtaaagatgatgccccagtatgccctgctgagtctgcactggcactgggctcctgctgaatctccaacctgtcctccatgagagccaactacacatgccctgtccaccctcagcaggcatctggcaccgtcttgctctaaaatcccattggacagcaaatacccaagatcccaaagaataataacatttaatcagcacggggaaggccctaggagccgtggaaaggctgttggggcaggagggctgcagcctggtgtactggggctcactgtcaggaggaagaggaggcacagtcaccattgtggctggtggatgatgagcagggagttagcatttaagaaggaagctgtttgagaggcctgtggggctaagagcctgagctaaaaatggcgtctgtaaaaggcacctgccatctatctgagaggctgtccagctttgttaggctacaggtcacccagccccagagggaagccctatcaagcaagcacgctgtgttcctgtgttctgaaccccagcactggagagcaatccttttctctcagtttgctcctgggctgggctgagagccatttatatgcaagaacatcagggcaaagcccaggaaatccctcatttatggatctttaaggggtctctctacctccctcatcctctagggctggtaggtaccagacaactaaagcaggccctgtaccccgtcaccccatttaaaactactcaatgacacacttacttgacacctacttacctgagaacagtcaaggttcttacacccccctcctctctctcctggaaaccctgggtgtcatggcgtagggtggcccatttccatggtggagctgtgagtgacaaactctttctaagggacctctgaactcgcctcaccaaacccgagtgagggatagaaaacattcgacatgctttctcactacagcttcacagccctgcatggctctcctggacccattactgtccacccctgccctacgccagatgctgcccttctctttggagtcctggcatcctcagctcacgcaggatggagtgggaaggccttctcatctctttacccagttgctccttcagacagacttcagcttctccacctcaccctcagcttctccacctcaccttcatttcagctccagctgctgccctctgcgctccgggcctccttgcctcaccagccttctgggcctgagacctggtggttggcatgcataaatgtgtgaagtgtgtgtgtgtgtatgcatgtatatttatgtgtaagtatgtgtgtgtgcatatgtatttgtgtgtgagtgtgtgcatgtgtgtttgtgtgtatgtttgtatttatgtgttagtgtgtgtgtgcatgtgtgtttgtgtttatgtgtgttttatgtgtgtgcatgcatgtgtgtttgtgtgtgtgtgtgcatgtgtgtttgtgtttatgtatgtctatttcccagccttgatcacttggttatgttaagggcacttatcacataagcgtagcctgaaatctgtcatctgtatcctgcttggtttatggtccttccactcagcagaaccatcaactactttaggcagaaggtctttctgtccataggcatgtcctcggagcctagactcagcaaaccttagagcaaagaaatgcaaaatggtgccctcaagctataaaccaaagaggcatggccttgggattcccctggggtcagggatggccttagaaaccgtcagagagatctttggagagctcagaccactggcaggggctgtagatggccagagctaccagtcagtcctgggaggagatgctaagcagagccctggagactgataagatctggaagcagagggtggggagggcagggagaacagctagggaagggacctggcaggaggtagaagggctcagggtctccaagaatggctggactcaagaacacatggactgacctcctttgtgtgactccatacaggggacctggaggtcagtccatgtggagtgtaggggtgtgtgtggagtgtgggggtatgggtgtggggtgttcttttctttctttcttttttctcacggggcgtgggaactagggagtgtttgaaaagccactgggagcaggcacacttgttattcgtggtgatggtgatgcttcctctcacgtgtgggtgtctttctgaagctgtaggccttgtctccagcaagcagttcaactctgcacttgtatattttgtgcccaaatgagttaggcttgtgtgcacatatgtactcgcctgtcatgtgtgcacatatgtacatgcctgtcatgtgtgcacatatgtactcgcctgtcatgtgtgcacatatgtacatgcctgtcatgtgtgcacatatgtactcgcctgtcatgtgtgcacatatgtactcgcctgtcatgtgtgcacatatgtacatgcctgtcatgtgttcacatatgtacatgcctgtcatgtgtgcacatatgtacacgcctgtggaggcccaaaggttgacttctgcttctttctcaatcactccccacttttctttttcttttcctattttcatgtgtgtgtgtgggggggggcagacagagaaagagagacagaaagggtgacacataaagatctgctgctgattctgtgctcttaagtaatgttagactgtaattaagactgtaaaggctcctgcgactagccagtttggaaaactgctgatttatctaatatttaattaaatagcatttttgttttgttttgtttttcgagacagagtttctctgagtgagtctggaactcactctgcagagcaggctggcctcgaacttggaaatctgcctgcctctgcctcctaagtgctgggattaaaggcatgtgccaccactgcccagcattaaatagcatttttataatgtccaaaacaactggcataaagaggcttgggaacagatataattgaattgtggaggctataaaatcaactggagcatcttgcagaatggcctaaaaccaggagagccaaaacgtcctgagcatcgtggtgggatgtttcctgacatggtaaaaagcctgacactggaaagtccagatgtggagcatctgtggtgacagggcgagaacagtcatgctaccactgactgtcacatggtaggcaccaggtcccttgagagggtacctgtgagtttctcactggactccccctcaacctttggggcaggtcctgtctgtgctctggttccagtttgagggtcatcaagctgaggtcctgagcctaggagaggcagagcggggggccttgcgcttaggtctgttggcctagagacggtcctaactgcagattctcaaatcagagtctgtgaaaagattcctaaagaggcaggtggagccagcgagccagcggaccaaggctgggctgggcggccacgtagttctaaaggtagagccccaggcaggtagtgagggccaagatcagttggggtagcagctttaatgccattcacccacaaaagcccaaggaacaacccatgggatccctcttggctttaacctggttctgtcctcatggaagtgtcacagtggtcttactgccttcctctacatgggctaagacgcactgggttgccacggccagccagttcttaagttggcttacgagccttgtggtcagcagtttgggttgctgtgggttcgaatcatgctggaggaatggggttggggttgatttcttccaggactgccctccagtccacacagaggccattgaacctctcaacagtgaccatagcaactgcttgtttcttcccacctccacatgagataatccagggaactcctgccatgaacagcacagtcagcaaaatggaattctggaaatttcctacatgagcgagccagcagttgttcaaaaggcagcgtacaaaggctcagcttaggtaaatttcctatccccgcatcaccctctgcttcccctcactcatgagcctctctatctctacccacactcttgctccatagagttgcttccttatttaccccaaggccaacttcaagggttatttgcttcttgtacaagagctgggcccatccccagacacacagcagtgcagagcattttgaagaatggatgcctagaaagagtcggacagtctcagtttctccgcttctgattggggtggaatctagaggttttcataggggcctctgttgactttggaaacaacccacttgctccatccactaactcctacaatgcctttgcaaaagtgtgtgcaagagagggtgggaactgggaggagaagtgggcagttctttccctaacaccttgggatagcgctgctagcaaccaggaagatctgaaaggtagccctgcactgctctcttgtggtttaccttggtattgcatcagaaaggcctttactagtctttgagcaagtaaccccaccaagacaggagggccacttttaaatgtagggatcacctttgacctgggccaggattaacctcagtaaaggggtatttgacacatctgaaatcagtcattgggcagtagttctgaagagatccagcagtaaccgtggattcttccacatacgacttgctcccagcagagacttacaggaagtcctgtagagcgtgccaacagcatccccaggaaagtgaggctggaagaaggtgcacagatgttggcctggtctctatccaccactatctatctctgacctacaccacagccgggaatgggctaggctaagacaccacccctgcaagcatctt

SEQ ID NO: 94 - DNA, 3938 bp, Mus musculus
agaggtttcattcgccatctgcaagtcactcccaaacttttcctcccagcgctcggggagtcaggttgacgcgccctgggtgcggggtgctaggcgcggggctgggcgcgcgctcccgcggagtcggagctgcagaggcttccgagatcgtcttgggcttttcaggtcacctagcattggtatgaatctgctcctcaagaagagaaaatattctgaaggcatgtccgtttacctgtcaacgaggaacccataatgtcttctcatctccagtgtggctccatgctctctcctgatgctactccaactttctttggtgccatgggaaaaacctgaagcacgagcagagtcacctccaaatctgtgctcacttcattttgttgcatggctggtgcggaacagactattggaatttgctcctgtgtgttgcccttcgtacctgaaccaaagactgtgcctcattctctagtgcattgctgcctgctgtcttcctcgttcatttctgttgcttgtgccttcctactgtcttctgtcatcacaggacacccttaaagtttctcactggactcctcgagggctggcccatggctctctaagccagctgtccaaggtctctaccatgaggcattgcattaattgctgcgtccagctgttccccgaagacacacacaaacagcaagttgcctgccaaggaggcccccatcacagtcatcaggcgtgccccacttgcaaaggagaaaacaaaattctgtttcgtgtggacagtaagcagatgaacttgcttgctgttctcgaagtgaggactgagggcaatgaaaactggggtgggtttttgcgcttcaggaaggggaagcgatgtagcctggtctttggattgataataatgaccttggtgatggcttcttacatcctttccggggctcatcaggaacttctgatttcctcccctttccattatgggggctttcccagcaaccccagcgtgatggatggtgagaaccccagtgatgtgaaagagcatcactaccagccttctgtaaataacatctcctatgtaaaggactatccgagcattaaactgattatcgacagcattgctgccaggattgagttcacaaccaggcagctcccggacttacaagatctcaagagacaagagttgcatatgttttctgtaatccccagcaaattcctcccgactagcaagagcccttgttggtatgaggagttctcgggcaggaacaccactgacccctacctgaccaattcctacgtgctctactccaagcggttccgctctacctttgacgctctgcgcaaggttttctggggccacctgtcccacgtgcagggcaagcacttccgcctgcgctgcctgccccacttctacatcattgggcagcccaagtgtggaaccactgacctgtacgaccgcctccggctgcatccagaagtgaaattctcagccatcaaggagccgcactggtggacccggaagcgctttggaattgtccgcctgcgggacggactacgagaccgctaccctgtggaagattacctggacctctttgacttggctgcacaccagatccatcaaggactgcaggctgcctctgcagagcagcccagcaagatgaataagatcattattggtaggttgtactcagactatctctacttcgcaagttccaataaatctgcagatgacttccacgagaaagtgacggaggctctgcagctgtttgaaaattgcatgctggattattcactgcgcgcctgcgtctacaacaacaccctgaacaatgccatgcccgtgaggctccaggttggcctgtatgctgtgtacctcctggattggctgactgtcttcagtaaggagcagttcctcattctccgtctggaagaccacgcatccaatgtcaagtataccatgcacaaggtcttccagtttctaaacctggggcctctgagtgagaagcaggaagctctgatgaccaagagccctgcatccaacacacggcgtcctgaggatcgtagtctgggacccatgtggcccatcacccagaagattctgcgtgaattctatgggcctttcaacacaaggctggcacaggtcttggatgacgaagcatttgcctggaagacaacgtgagagctgagtcccttctgcagaagctgggcccactgactctgtcattgccatgactttaaaagtctccaggcggagaactgtcacccacagcgtggagaaagccgctggagccccacccaatcctcttctcatgtccaaggcacctggtgtgggaactattttaaagctttccttgccatgttcagcagctctgctcttgattgcaaggctcgtccacctgaagccttggaaacgacactgggggtaggcttctgtctgttcccagagtgccttggatctcaggagggcagtggatctctggcacccagtgggtaggaagaggaagctacgggaggccatagaccagccttgccttccttcctccaggagagtttgtctgggtgtagggttggacagctctgggatccgattaaggccatgttctggggctgcccctcacgtgttatatcccagcaggccttgcataaatcgacaaccccatgtggacagagaacagagctgcttggagaatggaggctctttcgtttttgttcgtattcccaagtcagcccttcggtgacatcagaaatgagccctgttccctttgctgtgctcagaagaaactcagaagtcagcttttggcagtaggctcgtctctctgacctattctgcccatacactttgtttatgcccagcgtagagaaggagcgttttaaaacaaactgcttctcgcatttgactggccctgcctctcttttctgctcccttggatgttttccttaaggacttcagtttatatttggaaagggaagttttgctgttaatgccagaacagaacacctcaaggcatcgaacagtggaaaaggaaggaagtgaagccctccccatttgtgggggtcactggagagtgtggggatgtttttggttctggctggttacaggctcccccctgtcttcctgttggaggaatctttatccacattctctgtcatgtgcagccaaagttctgtaactcactaagggtgagtctcaagacacccttagaatgtcctcagaaacacatctcacaaactaagctcgggccacatgtggtgtcactaggagatagctttgatttttatgaacctttccaggcctgctagcagcttggttcgcaaaggatatgctgaaagtcttgtcattttaaaaaaaaaaaaagaccccagggaataccagagagaacaacttaaacccacttggcacacaggacaaggtggggatgtcacaaagcttttcattggagcgttgccaagggatgctgcctgtgaagctgtgttctcaggtcaggatcctgttcaccagcgtcagaaagtgtacacaccacatgcccgactgtcacttggacgtgtgagaaaagctgggctttggcagcaggaggctgtgcagttgctcgactgtgtgagttctgctgcggtccacccttgttggagatgggactctcagctcattggaaggttccgggagagctctgggcatcagcatggactgggctcgttctgctactgaaggggctgtgtgtcatgtggcctgtgttccaggacaattctcccttctctcacggtggccacttggctcggcagccagtgggaaaatctagcctgagtacaaggatgctttgggaagaaatgacgagagagagagagagagagagagagagagagagagagagagagagagagcgagagagagcgcaagctcaagcgcaagcgtgtgagaaagagcacgagagagtatttatttggaataccgtgtgtgtgtgtgtgtgtgtgtg

SEQ ID NO: 95 - protein, 550 aa, Mus musculus
CIAACCLPRSFLLLVPSYCLLSSQDTLKVSHWTPRGLAHGSLSQLSKVSTMRHCINCCVQLFPEDTHKQQVACQGGPHHSHQACPTCKGENKILFRVDSKQMNLLAVLEVRTEGNENWGGFLRFRKGKRCSLVFGLIIMTLVMASYILSGAHQELLISSPFHYGGFPSNPSVMDGENPSDVKEHHYQPSVNNISYVKDYPSIKLIIDSIAARIEFTTRQLPDLQDLKRQELHMFSVIPSKFLPTSKSPCWYEEFSGRNTTDPYLTNSYVKKRFRSTFDALRKVFWGHLSHVQGKHFRLRCLPHFYIIGQPKCGTTDLYDRLRLHPEVKFSAIKEPHWWTRKRFGIVRLRDGLRDRYPVEDYLDLFDLAAHQIHQGLQAASAEQPSKMNKIIIGRKDYLYFASSNKSADDFHEKVTEALQLFENCMLDYSLRACVYNNTLNNAMPVRLQVGAVYLLDWLTVFSKEQFLILRLEDHNVKYTMHKVFQFLNLGPLSEKQEALMTKSPNTRRPEDRSLGPMWPITQKILREFYGPFNTRLAQVLDDEAFAWKTT

SEQ ID NO: 96 - DNA, 106373 bp, Homo sapiens
  misc_feature (1)...(106373): n = A,T,C or G
tcagacagcatctggcccatttctgggttggatggtactctgaacagggcactgattcaagggccaatgagtcccatcccaactcctgcaaagctgtgtgcattttgccaactgcatgagcttgtagacggggcagtgtcctctcagtcctactcaaacccttgcaggctcagcttagctggagcacctggaagccattggtgcagagccacagactcagccgctagtgtttatcaccccagaggttgcaaagtgatggcctgtgggactctcctgcaatctgatggcattggttctcactgtgttgtacaattattttttctgatttagttgcccatccaagatttattttttaagttgggctatttcacaataatgttcaaatttcagactcccgtcctccatccagcgggagctgagacatagctgcttccttggatgggctggtgtgctccaccgtgctgaagacccgttccctgttggccacctcaggtcctctcattcatttcccagcccccctcgcctgggtaggtcaggactgcccaaccatgctctacactatctaagagaagccagaacagggcaggtggcaggctgcggtgtctttgcctgagctaacaggcatgccctagtatagtgccgggcacaaggtcactgtgggatgagcattctcttgccctgtcccttgcagtgaggtcagaagaacactcactgcccctagaccctgtgctctttgagggggatcagcttctactcccatccttcccctgtggcttcagcacagccagtagtttgctgtatccttgctcagcccctgtccttggagactggggtgggctggagacctggactcagagaggccaagaggccaggagggctggcttcaccagggaccagaaggcccaaagcccaactctggatggagggaccagccgtgaagctggcctccctcagggtttcagggatgtggcccacaggtgtaggcccctgagctgtgtctgggctcagaacacgacacctcaacctcctcaaatgctcaggacataagaggcttagcagacaacaaagtagtaccctcttagacctggggatggcgggaggggcagggttttcactggatgctggaaccggggtatggagggcccttgggccctttcccagagcaagcttggggcagagggtggggagcatgaacagtgcttccaggtcttgagtcttaagggcagggggattgcaagtgggacccagagaagaaggtccagtcctgaggtgggaggaggggcctcagaggccatctctgagcccaagcttcccttgccggagtagattctccctggctgcttctggtgctctctccatcctctggcccctctcccacctgcattcctcttccccctgcacacatgcagtgtgcccagacagggctcacccagaccacaggggatcctaggcgatgcaaacatctagcactaaagacagcacggccacagactaagaagggcattttgttatcagctttcttaaaatcagaaagataaaaataaaactgatgcatgttcttaaaaactgatccctgtgagaaagcctgctggaccctgggccctaaactctggcactcactcatattcctgttaacaaggaaaaaggactcattagtacctagctggagttgagtaacctttgttttcttttcattgtatttactttgtgattttttttatggtaaatgatggtggtttttcctttgtgatgaagacaaaaattgtcatttaaaatgcatttttaaaacccttttttaatgaatgtttccaaatatagaccagaaatagggatgaatgccagcatgccaccagccagcctcaatgaccttggctggtctcattttttgacacccccagctcatcccacagcccattattgaagcaactcccagccaccatagaactccacctgtgtatatttcagtgtcaactgcttctgtgtgactatatcaaaagaacatggtgagtcagtcattgcacagggagtccctgtgtaaagcaaatccctgagcatggcctggagtgatgtggctgggaacacttgcctgggctggcttctcactgagtgcacaagaacttgcacctgatggggggcagccacctgccccagccctgacgtgcgcatggcacctggttcttccctgtctgtagcctttcagaccgtgggcctcccaagggtgggtgggagtcctggaggctcatgtgtgatgtccctggagcctgctcagaaaatatttcctgaagaagtgggacaagctagctggttggaactcctaacacaaagggtgaggtaggccgaattttaaatgacccctgggatggttaatttttgtgtcaacttggctgggccatggggtgcccagatatctggtcaaacatttttttctgggcctgtctgttggggtatgtattagtccattctcacgctgctaataaagacattaccagagaccgggtaatctaaaaagaaaaaaggtttaatggactcacagttcagcatggctggggaggcctcaggaaacttacaatcatggtggaaggggaagcaaacatgcccttcttcacatggtgacaaaaaggagaaatgctgagtgaaggttgggggaaagccccttataaaaccatcagatttcatgagaactcactcactatcatgagaacagtaccagggtaacggcccctgtgattcaatcacctcccaccaggttcctcccacaacacatggggattatgggaactacaattcaagatgagatttgtgtagggacacagccaaaccacatcagagtgttttgggatgaaattaatatttgcattggtagacggagcaaagcagactgccctccccagggagggcgggtctcctctaattcaataagggccttaatagaacatagggctgagtaagaaagagtcctctctctctctgccccactgtctttcacctgggatgccggccccctcctgccttcagagtcggactcaggcagagacttgtgggccaggactccttagcttttatgatcatgtgagccagtttcttatagtgcacaaatacctacatgtgtgcatttacacatacatccttattggttctgtttctctggagaattgtgaccttttcccccatcacctttacctgtgccctggtgtcatgctcgtgaatatgttgggttacgtaagaaacgagactctacaaatgtaattaaggttactaatcagttgactttagcagagggggttattttcgaattatcctcggtgggcttaatggaatcacatgagcccttaaaagctggcagaaaaggagggcagaggggtctgaagagtgagaaagacttgaaatgctgttgctgtttggaaggtggagagggccacatagaaggaatgggggtggcctctaagcatagagagtgcacctatgttggcacccagcaaggaaatggggaccttagttttatcagcagctaagacttggatccctccccaggaccggtaggtttgagcctagcctgaccgacaccttcccttcattcttgtgagacccagagcagagactccaccagaattctggtctacaggctgtgagattaaaaaaaaaaaggatgttgctttaagtcatgaagttctggtaatttcttactcagcaacagaaggtcgattcagagagggaggaaatccctttctgttcacttctcacaatgagtgataccgattttgggtgacccttgacaggggacagtcccagaagagaatcctcttccacatttcatgtcacggggacggatgtgaggctcagagggggtcacagcaaaggaggagtggagctgaggtcggagctgaggtcagatctggagtctgggtgcttgcagcccatgtcccaagtgctcaggtgagcctagcacgggtctggtgggggtggggcacacccctgaacaggtgctcacaccactccccgcccccagctctcacccacacccacagccatacccacagcaggcttcaattttgtctaagcaactcctaagagccaacccccatctaagagcagggagtccctggaagcagacaccagtgttctgtggtggcattgtcacaggactcatcttttcagaaccactctgtctattgcccctgagccactttgggaagccatgtggatggagctgatgggtgtccaggagccagggagggagacgggcccagggaagaggcaggaccacagctgcacagcctggcaatgtggactcggacctggctaaccttgttggtgcaggggaggcgctaaggatgggcatcaaaggtgtttagtcatggggctgacaggatcagatctgtgttttggaaagacccaggctgtgtaagtagaaagaaccagttagcagatgtcgggagaggaggcagggaaagtagcaggaagaggctattgtgacagcaccgagggatacacgagaccggtccaaaccagcagctctcaaaggtcaatgcgcgctgagggagcttgttaaatccacaggtgcccaggtgccaccccagacactctgattcagatgactggccccaccccactgtaatagaatctctggtactggggcctaggcatctgcattttgaaaactgtccgggtacttccaagatgagccaggcttgggaagaggacggtggctcactgaactggggtaaaggagcagcagtaaagatgtcatggagacttctcccacaggcgccacctgagaaggtgcacagtggacactcacagagcccggggtggtgggggtgaagcaggtctgggttggagctggcagcaaagctgggctagggaggagtgcccgtcgtgatgcactgctcgccgcgtctgcctgtgggtgttcatttctattatcctcctaagcaccgctttgtaacatttcactgcattaaatgctcaaccaggaagatgaaatttatttagaaggctgaggtatttcacatctagggcaggcgacgctgctctaaatttaccaagtcaacagctcatttttgctgttgaatgggttgtagatcttatgacagaagcaagtaagtgagaacgctaccagctgtaaactttatcttattggcgaaatgtctattatgcagctaaaaacatctacttaataggtgctgtccttcaacagttggtagcaacagagtcttacgtggtgataacaatgacattatgtctcttttatcacctgtaggttctttgtattgtcaattactggctgcgtattccttccggcctcagaggctgtaggataaagaggttgcaccattatgatgatgtggtcatccctggaggcactgggggtctgcatctgattttccttcggaggcttctgcctgtattttaggatccccagtcttcatcaggacatagtgaaaatcatatgaagctaacgaagtctgacggatgagtaagtgctaatcaagccaggtgattccaactgggtcattcgtaaacatttacaggctctgagctaggggaggggcatgcagagacatacaggactccgttcctctggaatagagttctgaaatcttaaagctgcagcagcacttttggaacaagcgaaccgcccctcagggggaccctgtaagagcagacggcgctcgtgaatatacaagtctggacattggtttaaaacaagccccattccttttttcactgaaggtttgatgcagagccgaagtctgctgttctaaggaaccactagttgttattgtcctaaatccggtagaggttttggatggggtgtaggaaattttcacaagaacccaaatttcacgtggatttgtgatgggttagcataccaaaatgggcttaaagtgcacttaatggatgcattactgcagaagggagccgcctaaccagagcattgctaaatttatgaaattgaaatgcacttcaggttactgagcagtctaaatttgtcaaagtcacagagtgggaggcaggtcgttactggtggcagaggtggcagaaatctgaagccaaggctgccaaaatgaatttgaagtcctccgcaatgaccccaagggctccctcacacccaggtgcagcccttttcagtggcaggagcaggacctggggctcctgagcctcagtgtttactgagcccctcctagcatgcaggaggcagagagtgacaaggtgtgtccgttctttgccctgccccacagcgcttccctaatgggtctgcccactatgaatttgaattcatgggcactggtgcacactcatggaataggcatggccttttgtctttgagtgtttggtttgtaagcctcagtctcctggcctgaaaaatagggataagtaatactggcctcataggcatgggaaagtgcttagcacagtgcttgtcacaaggtgggactttgaaggtccctttcttcaggagggggctgagtcttagtgaccttagtggttcccacattcagccctgtgagtggcacacagcaggtgttcagagagtgtctgctgaatgaatgaatgaatgagtgagtgagtgaatgtgattttaaggattgtggcaagtccctgacattccaggttgctggtgtccttgtagcatctcttacagaatctttattcaagttatacttattcatggattcaacctcattatgtaattgcatgttaacaaacattcaattatgtgactatcatgggtaaaactacttgcaataataatgattactaataagaactactattttcaactcttactgtgtcccaggaattgtgctgagtatttttaaaatactttgtcttcagtcttgacactagcccactgaggccatgtatcagccagctacagccacaacaatgctgtgtaacaaaacactttgcaacattcagtggcttgcaacaataagcattttccctgccttgctcatgttctgtaggttgcctaaagcagctctgagtcctgctgtatgtggagtgacatggctccagacagcgaatcaagttcaggtttcttccttgtgtgttcattctgaagcctctctggaagaggcagcaacatgttcgtctcatggtggaccaccagagcagaggaaagcaggtctggccctgcaagcacattccaagcctctgatccagttatattccccattatctcattgtctaaagcaagtccaaagtcaaggaatggggaagtacagtccctgcactggaaggctgtgacaaggatgcagacgtgtgataaccaccacgggagagcgaggagttgggatcaacagctcaattgactgctcgtaggtgctaccagaagcctcaaactgaggcatggaaagaagtgacttgcccagggttgctcagctagtgggtggcagaagtagaatttgaacccaggcaatttaaatccacagttgtgggggcctagagtgcacacacgggaagcggggatttattttctgaaagtatctgcatttttttttcttttttctttttttgagagggtgtctcactctgtcacccaggctggggtgcagtggtgtgatctcggctcactgcaacctctgcctcccgggaatctacgggcttgcgccaccacgcctagctaatttttgtatttttagtggagacggggtttcaccatgttggccaggcttgtctcgaactcctgaccttaagtgatccacccgcctcggcctcccaaagtgttgtgattacaggcgtgagctaccgtgcttggccagtatctgcatttttttcagccgtgacttgctaataccatgttggtatcaacctctcttgcagttacacatttatttgtctatccttccacccatccacagggacctggcatttgggtgttctttcaattctctgcagtaagaggctcaagtgcaattcttgggtaattttttgaaattaaggttgaaaggaaaaaaatcaccttctagttaatctcaggcacgtgtataaatacctttggaaagtccctggtggaattcatatcaaagcggcaccgtgatttttacttaaaaacaattttgctccatgtcaaccgtggtttctgacacctgaatttgaaagtgatctgggtgggcccagcgccatctccataacggagttatgtgtttacttggagggaggagaggaaaggcattattccctggcagtatgtgtggccctggaataatgttccacacacccttacagaaggggatttcctccttgctgtttccacagacccttccctgtgtttgtttaaacccgttgcacactggtctgacagctgcctggcccagggccttccttgcagacgcatgtacaaccaaccctctttaacagcaacctgctctgtgtcccctgatgcaattactcgagtatataaacctcactgaaaggcaggcttttcttgggagctaataaataagccccaaagccacaacgtgtgtgagaccttgaaaaatggcatcatcatctattgggaattgtgaaccctgcaaaaagcagctcgttgtattttcagaaataggtttttgtttaaaaaaaaaataaagaacaaaaatcactaagtggagtctatatggaaaaagcaatctagtctgagattctaaggcaagtctctttgctgcattcatctttcttcgcagattttatgtaagaggcattatttgcaggaaaacaagacaggattttaaagaactcccctctcatcccggtttcccatctgcagttataatcctctgatggtgacctctgcattagttgccatgggtgctgagcagaagtttatgacctcagggtggactgtagcttcaggggggcgagatgaagcctccggcaataaagagataatggggagaagccactgtcaggaatgacccttcggtggcatgtagtctacagttaacggagcactttcatttccacttctggttgcttcgaggaagagggtgctggactctggccacggggacacaggccggcaagagactgcagattctttttgtcccttggacctcagtttcctgagaggctgggcttggtgctccaagcgccctctgagcgaatctgccagaatttcatgtgtcttttctttaactgatggcatcttcagcccagagtcagtggagtcggccactggtgccgctttcttgccctcgggctgtccaggtggttccctggggcagccgactccaggccactgcggcaggccgtggcgatcggggtcctgcagagctttacctcccccgcggaagcaaaacacgccgggccaaagagccgggccagccttcccgggatgcaaaaatacaacagagggcgccgaactcaccagcgctgtggccttgaatattaatgtacgggctggctccagaccgccaagttccttaaagatgtctctggcggccgggcgcggtggcttacgcctgtaatcccagcactttgggttgggggggcggacggatcatctgaggtcgggagttcgagaccagcctgaccaacatggagaaaccccgtctgtactaaaaatataaaattagcctattttgcgtggtggcgcatgcctgtaatcccggctactcgggaggctgaggcaggagactctcttgaacccgggaggctgaggcaggagactctcttgaacccgggaggcggaagttgcagtgagccgagatcgcgccattgcattccagcctgggcaacaagagcgaaactctgtctttaaaaaaaagaagtatctggcaaggtgtcactgccagatttcaggggtttcgatgtgcttttatttggaatcaccgcaacacacaagcagtgttgactcggagggggagggggcaggggccaaacccaccgctcggcgcacacgccttgatctcacattccagactggagctgatgtgtgtcagcgcgacatggggcggggggagggttctcctcggatgtttcattcgccgtctgcacgtcactcccaaacttttcctcccagcgctcggggagtcaggttgacgcgccctggatgcggggctagaggctcggggctgggcgcgctcccgcggagccggagccgcagaggctcccgggctggactcaggcttctcaggtacaagttaggtgccagacgccgaggtggggtcggcgaggagnnnnnnnnnnnnnnnnnnnnnnnnnnnnnnnnnnnnnnnnnnnnnnnnnnnnnnnnnnnnnnnnnnnnnnnnnnnnnnnnnnnnnnnnnnnnnnnnnnnnnnnnnnnnnnnnnnnnnnnnnnnnnnnnnnnnnnnnnnnnnnnnnnnnnnnnnnnnnnnnnncgagctcgacgagccgaggcaggtttgggccccgggctccttggcccggcctccccgaggcttcagcgatccccagcgggaggagtcccttcgccattggtcctggccgcgctccgggcgccctgcgcgcttgaggaccccgcgggaagggttacccagcggcgacacacgccccctccctcgcagagaggacgcggccggagcgaggggacaggggaccgagcagtggcgtggtggcgccgtggatagccggaggccggcggggggcgcaagccgcgtggaacgcaccggcgggctgtccgggagaaggagcccagtagtcggaatcggggcgcccctgcaccgcccagctctgggagccgcaggcggggaaccgaccgacggacagaccagtgctttcacggtgtgagcgcgcgtcgtttggcggtaggggacggggattccccccagccttgcgctccgcccccacacccctatcgcactttggggaagtttccaggcgcggcccggggcaggtaagtgggcatccgccactctctccccggttgcgagctcggatgcgcttccagaaccctggctctagccttgcggcggttccgggcggggaggccagagctctcccgcgcctaagcccgtgggacccggttcagggaagggggatggcgggggcgggcctgggaagagataggggagcggctgagccccgagnnnnnnnnnnnnnnnnnnnnnnnnnnnnnnnnnnnnnnnnnnnnnnnnnnnnnnnnnnnnnnnnnnnnnnnnnnnnnnnnnnnnnnnnnnnnnnnnnnnnnnnnnnnnnnnnnnnnnnnnnnnnnnnnnnnnnnnnnnnnnnnnnnnnnnnnnnnnnnnccctcctccttcctcctccccgccccgcccccactgctgtcccctccctgcgccccgccgcgtctcgggaggcggcgtgactcgggagttgccggcgcttcccggcggtggcggcgtctctggccggccttggtgcggcgagccgagcgaggcagctctgagccgcgcggtgaggccagaggcggggagccggggctgcggggcggcgaagctggggagccggatggcagcggccggggcgcggaggcgacgctggcggtggagatgtaatgcgagtctgttgggttgtgtgtgccgggagataggacgcggtggctgtgggtggctgggtggcgggctgtggcgcaattggccccctgggatggcaggatagaggcgccggggcgaagggaaccttgcctttgggaaaatgaatgaagagccgtggaagcaccttcccaactcctccaggcaaccgatgggccggcgtgcgcgcgagtgtgtgcgtgttgaggcttcggagccgcccgggtcctgggcacagctgcttgacctccccgtcgctgtccgggtgcccacgttcccgcccgccctgcgcccggggccggccggcgcggctgggacggcgggtatagaggaggaaggctggggctgggttgccggctgctggcggctggaggtccgcgcccagtgtagggaagtcttcgaaggaggctgccaggctggaggctgggaccagctcctgggggcgggggcccttcttcgtctgcctgcgtgcgcggagccgctgtgacagctgggcgccttcgccttgttcacgttggttaagttaattgtaccgagttctcgggaatgaagtgtggctccgggatgccccgcagagggatgtgacaagccggtcagtgaggctgagcaaaggggctaaccttgcctctgggcgccctagcagtgcccccagcccctctttatcagctgcaattcctgagtgttgtgggatgcctcggtgggttagggtagccacccagcgttggggcagaaaggcctcggagggcatctgcacccccgaggggccctgaagtaaactgaggcctagagatttgcccagcgtttctcctggaccctccttggaccttcctggaccattatccatcccccgctttcctgcttctcctcccaggaccggcaaccttgcaaaatcaggaaccctcccttccagaacatggcacttactaattttacaaactgaatgttgaactaggatctcttgattgatacataaagacatacatagatcatatatgattttattcaaagtagtataggaataaaaatgccttctaagtaggtaggtttttgcaaacaagtttttcttccccaagttcctgagaaactgtcagaagattttctttcttgccacctcctagatgggcacacagagctggtgaggtaaagtggcttgttatggccttcctgtgggcacataggtgagctggaggtggagctgcaggtctgggcttccctccaaagtccagctccggaggagagccagctcaggagccctctgcagaagtccaaccctgtctttgcggctctctcctctgggctttggatgattgcagtgagctggcttgtaggtgaagcatgcaggggtaattcatccaggatattgtccaggggggtggcaggcaggtcggcccacagtggtcacatgtgtgccttgcttttcctggatgatcaaagctcgccatgtctgagccactgtcctggccagggacccagcacggtcaccgtggctgctgtgagggctgcagtttccttccacacctttgtcatccctggttgctgctgcccctggccaggaaaagtgagatatcagaaacatttgatttttcacatgcctggaagagagaagattaattcctgcatcaagaagaagtgtttggggaaaggttggtaacgtgggaagcggattctacttatttggcgtcttgagaaacagcagacaagaaattccaagttaactagctgggccccaggagtctgcagtaggggaagctgtagattagtgctggactgtggtagtccaagccatttcgagttcggctggaaggtcccctgctagtggagggggctggggagaagagggagaccccagggctgtcctgaacaggtgagcacatgcccatctacaggggacagactagactcagctccagccagttggggggaaaacagtgtcaacaggtcttgtgaattttcgagaggattctccagcctgggtatttaaatgtgggctcaaattctagaagtatggtagagggttaggggtgagtgcccttccaggaggtctgaagcttgccatctggcccggtgcttatctattgggaagggtgtcactgcatcagagagcagggcacaggagccacacccattgtgggcccagggactaagaactgatggctgcccatcatgcctgcggccaggtccctaggctggaggtgaggcgggcagagctccttcatgtactcgtgtgccatgtgttcattcagcagctgttgaatgaattgccatgatgtagaaagtcatctgcatgaaccttttcatgtaattcctttcaccaaatagatcctacagctgagcctctgggatgatttggcggggctaggacagacagggtcccagccctcatgggatggggacaagcggaattggctatgtagacagacaaatggtccagaagctgccataagagcccagaagggtggtgatgcaaagcaaggcttgggagcaggggtcagggagtggagggtggactcgggggagtgtgaggagtctccttttcaggtgtggacattgaatttcagagcagtgggtgggaggcacccaccccctgaacaggggatgctcaggtatgatattaagttgggagtgacttgcccaaggtcacatagccagtaagtggaaagtcagggggtctctgatctccagctcttggccagctccttcatctccactgtactgggctgaggcctcttagaaactcccagaggtgtggacactccctgtaattggcagctgtcatttttcccatctacacgttcaggccctgtccccgttcctagggcctcagcaggcccaggattgcagagatgccatttggagcatatttgtatgaaagaagagtcgtctaaattctaaaagcagagactgtttttaaaagtggtagctgacttgggagtgtcattgatctgagcaatcagccagcggacttctctttagcagcttgtgatttggaagtgactcagtcactggtgagaatcacgcagcctccctccccttctggtctgtaaaggggatgctcaggtatgagattaagttacttcaaagggtcactctgttccagtgctgtgaatgaggagatcatgtttgcacttagctggctaagtgttgggaggctgagtgtttccactgctcaaggcatttcttcattggcctgcagtatgagggtctgatttctttactgagatagtttctcctttcaaataaagcactgggacaaaatgatttatgtgtagacctgtgtctccacagcaggagatggaccataaatggaacagttatctaattagtgtgtccagtctaggtgtctagttaggagtgtccaggaagaaggagaaaggttttgtgtccatttgggccaacatagactttttaaattgtaactatgggagttggggaggaagacagttcatcgcaagacctatcacgtgctgcgtccctataggtttgaagctggccctctgctagacaggtcacacaggtatatccctttgtgtcctttaaagggctgggaagctgttggagatgacacacaccaagctctcagccatccggatgtgcaggaggagggattgggaatgacggtagaggcaggagggaaataagggggtgaggggagaagaacaactgtggctccagaaggaggaggcggcgtgaatcagcaagtggttaagttgtggggaggtggcaagtgggaagcagtttctcatcttcgctgatttccaaagggatggagaggaaaggaggctgtctgcagcaggacctgcagcgtttctgccctgcaaccctgggccaggtgcatgggggcagagagccagcgctcagcacagagcacagcactcagatcagtgggcgaggcggagctcgtgcaagtcagagttatgtaacgccgttgacaggcaccttatggggcttggcaaagtgcagcaggagcccggggtagcgactttgagattggagtgttccgggaagacttcgccccctggcttgagggcgggtgtcttttcagagttaatacctgccagtgcttggcacagtgcctggcatccagtaagtgctcagtaaacactggctcgggtgatattcttcagccccggagctcctaaccgtgcatgtctccatatttgattccagtatattctacctcaaaggatataggcaggagcccctgcaagccttggctccagctaggtttccttagggtggtggcttcactctctggactctgtctcctcatctgtgcgaggagaacactggtaaacagctacccttcaagacccttcagctgaccttgcagccaggctgtggagcagctccgctgtgcccatatttgatgcaattaaccagagagaggagaccgcgtggctctaggtggaactgtgctggtgtagctcgcttgtgaatgttacatctcaccccactctcagcttaaaagagcccagagggggcctggagggcgggggggtgggggctcctggcttcggcaggctctccctgatgcctattttacatttctagaacttatcgtggcccaggcctcttagatctctgaagaaagtaaggctggcagatcctcaaaagcagagggtatcattataatggaaacttggacactttccagaattgcatttgtggtaaaaatattgaaacagacagtccaggcacccaggtgcctggaaaataccccaacatgggcaaataattagatacaggccaggcacaattatgtttttctgacaataggctggaactcggtggcttagcattttctcttgaaacagaatacgcccctgccggacccttttgctccctgtggtcaaaaagatagtggtgtggccagcaagggggagggcatacaaggagaagtggcgatcccatccctcccagggtggccctggatctatctcagggaggttctgtcctgcttttgcttttctgtgtccctgtaggtagctgtcccgagggactgggcccatggcacctttgctaggaggccagagcctgcatttcagagtctaagaggtcgagagaggtgtaagatgtattatcttacccttccacgaaagtggtctgggcagctgtgttcccttttgtaacccctggcagctcactcatgctgatggcggtaagttcacctgtaccttcacgtttcttgtcagccaaatatttggcgcccgtgacacggaagctcttttagcccaggtgttagatcgcataggcactgggtggggcagggcaggtagtgggttgagcctgggatccacgctgactcaggttcaagttcatgcagtgctgcttcgtcccattactgtggctctgaacaagtggcttagcttgcatctcggtttccccatctgtaaaatggggttaatgatctctacctggttgggtggcttgagtatttgaaatagtacaattcagggttcaggggagctccccacatggaatnnnnnnnnnnnnnnnnnnnnnnnnnnnnnnnnnnnnnnnnnnnnnnnnnnnnnnnnnnnnnnnnnnnnnnnnnnnnnnnnnnnnnnnnnnnnnnnnnnnnnnnnnnnnnnnnnnnnnnnnnnnnnnnnnnnnnnnnnnnnnnnnnnnnnnnnnnnnnnnnnnnnnnnnnnnnnnnnnnnnnnnnnnnnnnnnnnnnnnnnnnnnnnnnnnnnnnnnnnnnnnnnnnnnnnnnnnnnnnnnnnnnnnnnnnnnnnnnnnnnnnnnnnnnnnnnnnnnnnnnnnnnnnnnnnnnnnnnnnnnnnnnnnnnnnnnnnnnnnnnnnnnnnnnnnnnnnnnnnnnnnnnnnnnnnnnnnnnnnnnnnnnnnnnnnnnnnnnnnnnnnnnnnnnnnnnnnnnnnnnnnnnnnnnnnnnnnnnnnnnnnnnnnnnnnnnnnnnnnnnnnnnnnnnnnnnnnnnnnnnnnnnnnnnnnnnnnnnnnnnnnnnnnnnnnnnnnnnnnnnnnnnnnnnnnnnnnnnnnnnnnnnnnnnnnnnnnnnnnnnnnnnnnnnnnnnnnnnnnnnnnnnnnnnnnnnnnnccttccatattcctgggatggtgtagaaaccaccacgtatagacaacaggaaagttacacaggggagcttcctcctcatggaaggaaacatctggggtggcggagaacagtcgccctgtggcaaggaatatgatgtgctgggctccgtgcccggcccacggttggagggtggtcaatggcatctgttaggtacgtacttggtagaagtggccacagtgtgtcaaatcggtgttgttgtctgctgtaggaaataatctggctttaaattcaagaacatctctttcctacttgttggcagagcatgattgaggtaatggtgatccatggatctcaaggtcacattctaagttgaacgcaattcacagggagctgaggtagtggttgactcctagcctgggcctggagaagcttctctgcctcctctctcttggtcccagccccccacagggcctgtgcttttaccagacctggttctgtgtttgcaacgagacgcctggccagccgggcctggacctggctacacttgggtcccccggccactggagagggggagcccccacatttgcctacttcatcatcgagccccccacccccactgccttcaggaagcgtttgccagtcattcttgctatctgctccccgtacctcccttccccagccaggtgtggatccttcctcctctgagcttctgcagttttcctctgttgtatttctcaaccttgaccctgtcccacactgtgctgggctccagtttcctgggtgcagtctgctctcccagcctgatgaggctctcttcaggaggagggtgtctggggctcacggtacatccatgtagctggactctcacttagtggccagtgactgccatgtgctgcattaacgcgtcaattaaaaatgattcttccaaaggctaggttctcctggaggttttatgtgaacactgagtttgatagtgtggcacaggagagctcacacttgtcactcaatttcccaaggagtcgagagtctaatggaataaccttggatttcctggcattaggttttggggctattaaaacatagtgaccacagttttttgtgtcttgagagccttaggggaaaatgttatggaaatttggttgttgtttcaggaatataagcggagccgtctactcaggcgagaaatgtggaggctgctggtgtttcttatagctggtataaatagcttggcttcaagttccatgctcctttgtttggaatgtaaatatttgcattaaaaatataaagtatgtcctggcatgtatttttagggactataatttccaaaccccaaatcagactatgggtctactgaggattaattttctctgctttgtgaacctgtgtatgtaaagagtcttccaaatgtacacaccaaaccctgtttgctttgtgcatggaaggaaccgccaggattacaagaaagcagggttgccccggggagtgtgggccgagggcttgtgtttctctccacacacttctgatggttctgcctggtagctgcagcggctcagggcggtggggtggaggagttttggccgagatcttgtgggtatcatcaggggcctggcttctctgttgttggtttcctggacatccaggtggggatttggctgcagctggctgacctctgtgtcacgtaaccagacgcttgactttggagttgcagttgctctaggaagatgttcgggagttttagtgccctttctgtggtctggtggagggagcaggaagttctcatgtccggttcagaggtgaactgtgaaggcctctgtgtggtgtcttcctccactggattcctgggggctgtttagctttaatttttctatgaaggacaacctggatgattggttaatcccttactgtgggtgggatgtcatctctggtctggcctcggcctgttctcggtagtggggggcttgatggggcagcaggagctgggcatgccatttgcccctggtatgggggagcttgttcctaaggctctctgggcagccttcaatggtcaccttctggcccaaaggctctaacggagaaggttgggccatggaggtcagctggcctgcaggggaggaccgaatgcaggtgggcccccaactggcaacctccctcttgtctcatcacaggatgaagggcagatgagaagacagccaggagggtcctgggccctcagctgtgactccccgagaggcaggtaccaagggcttcctttgtccttgcttcccagccagcgcgtggcccctgcccttgggagggtcagctcctcctccgtcccactgaacactgatgcctcaggactggactccttggggcagcagagacccttccgtctttccttccctagctctgccttgcaaaggtgcagcctcctgagcctcagagtgtctgacatctctctgcctgggcaccctctctgaaacattgtgtgggcttagaaaccgtgagccttgggaaggaccatcttcctctgagctctgggtgtgttgaactgcggaggcttaccacttcctcgcctgtggtcatctccagcctgacccatggtggcgtgatcctctctcatcatccgtcacagtttttaataaagaaaatatgttccagaaaggccgagtccccatgccgcatcaggtcagtgatccaagtgcattatagtgaaagtcagaggaaatagctgcttttaggacacgctgaacttgcctaagaaagttattagtgggaataaatgagggggaagaaagcatgctccgactaacgagaacagtatcagcctgacattttgtgtcgtcctaactttgaaaagctatttatacccacttgctagcagtttctatgagaaattagatatgaggagatgtacagaagagaagagtgggagctgggtgactgtgagctcctcctcagaaacatcttccaggcaaaaaaaagaaaaagaaaaaatcatttgctcacctatcgacaatagaaaatccagggatcttttgcattgtataaaatttggctcagagaagaaaaatgatgtattgaaaagaagatgaagcttcagttgccatttgagtggtggaaaataaatttgctttcggcccttaaaatggaaataagtcgatagaaaaatgcaggcctgcccccttttgagtcagcagtttttttggttgatgaaagggtgagaagacgtgctcactggaagtcacccgctggatcacttaggaagccgcagaagtgccgaaggacatgcatgtgtatctttcaaagttctcaactgatttattaaaaaaaatcataaagcagacttttgaaaaacctgttcaatctattcttctttaacagctttactgaaatgtaatgcacacaccataaaattcacccaaagtatacaattccatgttttttagtatattgacagatacgtgcaaccactaccacagctaattttagaactttttttaatctcaaaaagacatcttgtacaccttagctatcacccctttatctccccattcccctacatgtacccttcagccttgagcaaccacaaatctacttcttgtctctgtccagcccaattcctctattgtggactttcgtatgagcagaatcacatagaatgaggtcttttgtgactggcttcttttactctgtgtaactgtcatggttcatccatgctgtggcatgcgtcagcacttccttccttttcatggctgaataatattccatcgcagggatagaccacagtttcatggatccatttgtccattgatagacatttgggtggtctccacctttggctcttatgaatgaggcggccataaacgtttgtgtacaagcttctttgggtgtggacatgtgtttccgtttctagggttatgttttatgagacgttttcactttcttctaataataagattcattttttaaacaacaccctttccctggccctagaaaaggctttgttcttagatgggatcccgatccccctgtcagtgatcctggctgagatactgaattgtctgaattttagagctggaaaggccttcgggcgaacgtggttcagcccctttttatagatggggaagctgagggccagagaggccacacataaagagacaggattgaataccggtttttggagttacaatccaattactccaaaagttctccctaaactcttactaaaaccccaggttgccttcttgactggcctggggcagcagattaaggtgggttgggtgaacagatggtggttagcttgccctcttttatgtgattatgggtcaaggttttcagtcatccaatgtactcttgcctgttttcctttcacccatctgtctgtccatccaatgtccatctgatgtccgaggcccagaacatctccccatccaccagcggccgaataagaacagcaccttgtggcgccagcatctttctagttctttctcccctgcggtgatgggcggcccggctgcttatccggggaataattaaattaggaaccaattcagagaatgaaattttatctgatttggccaagcccgtaataagcaaggggctgtaattgtgactccaggatacattaggaagttgttttttcaagggtacgctgggtgaaagcattgaaagaaatatgtggagaccaggccgggagatctccctgggccaggtttcttgcatggcctgggggtgtggtcccacagggcggctgtgtcctcaggctggtccttccagcgtttatgtttccaggcaccatttagctctgatgaggtagataaaagtgttttgtggctggagtgttctctgtgcttaggaaagttctgttaaaatccttatggatatctatctcattgttatcactgatattctaaagcacctttacaactgtaataagaagtaaacttggcagaaactctgtggctataaatcaggggtgccgctttgcaacccccacggagcttattgaaagaaatgcacatactttggtcctacatcagctgttacatcaagtctccggggatggatgctgggcatttgtgtgtgtgtgcacgcgtgtgtgtgtgcatgcgtgcatgtgtgtgcatgcatggacctggattcgttaagctctttagctaagaaacactgagggaacttagcagtgattgtaatcattcttctaatgagaatttccagttctcctatggcaaagataagggacagataattagcacagtggtctcaggaatgagcctcatttgtcctcaatctgtgatgagactttgtgactgtctttgagtttcatgttcagattccctgattgtaactaacacacattgttcatcacttggtagcagtggtggaattttagatctgtttttctcttggggaaggaccccattctcatccccacagtggcccaggctggaggcccaggagtctcctttgacagatagctggtcagtgcagaattgcttcctttgtgtctctgccactggaaggttatctgttccttcagaacaggaaatgtgtcttattcaacgtggcatccccagggcctagtccatgggaaagaatgattgggccgatggacagacagatgggtgaaaggaaaacaggcaagagtatagtgaataattgaaaactttgacccatagtgcagggatggtgagtgtctttcagatcgtctgtttatagctggggaaacggaggcctgcagaagtcagtgacttgccctaatccttcagctttgatcaagaagaacattggggagcctggcccttcaatgtcttcaactcttctgactcaggctctgcacatcctcttgagagtcaccctccagtgaaaagaactctttattgaggccctgctgtgtaccccatgctgttctaggagctggggatctagcagtgagttagacacacagggtcccagtgctcacagagggcatatcctcatggagagagacaggcagcagacaaggtcgcaaatatcagagaatagacaggcataagggccatgtgctggagtgaccagctggtgtgcgggaaaggcctttccacaaaggtgacatctccgttgattcttgaatgttcagagggtgctgctgtctgatgcttggaaggagggaacagtcagtgccaggaccccaaggggagaacctgttgatgggatgggattcatttatgctcgggagaaagagacttggtttattggacgcctgggttgattttcttctcttctgcatcctctgcactgacatttgcagctctgccttctccccgtcccgtctctgggtgaagaacacctgtccgatgctcgctggcctgcagctgctgcagagtttcagaaaacagggctagcaaaaaacaaagcaaaaccccaacatccctgtcctctcactaagggcttggctggggaggcagagttatttttatgtaagcacatgcttgaggggggacgtcttggggtgggcagctgaaaccacactcataaaaacaagaccgaaataggactgtgaattcccaaaggtgaacacaggccgttaacttgaatttggtgacagttccatgcagcctaggtcctggagcgggaaccctttggagggggatgaggcatggaaaactgtttgctgatttggcctcttctttaagcattgctttccggccctggctgtgacagagacctggcccttgctcaggatttgagccccctcaaggggaagttcttcctccctcctggtgctgcctccagctgtttctgtctcctcgtcagtaagaacctctgtttcttgagggccctcctgttggttgtcctcttgttgcagccacctccctacctgcgagggagtgggccccaggctgcctctccatcccaggtcctgctgttaacctgggtaaccgtggtctccatggggcagcactctggcctcccaggtcctgcatcaggacaccctgaaccttgtctactcctggactgctccataccacatggagtccgtccttgttaatgacgtgttaatgccaggctttcttgtggaaaccacacccaagacaccagctggtcaacctgacacacagtagggcctcaacggattgtgtcatcagttattttcataaactttaaatctctttctggtctccccagacatccttaagagtgatcctttgtcacattgcaaagttttcccaataaatattggtcagtagttgtgacagtaatatacatctccattttatgttgttgactaatttttaaatggtggacaaaacataaatttttctacattttaataaatggaaagataaaagaaatttttttttctgagtagtttggtttagaatcattccagttgttcattcagcatctcttcccaagtcacatgagtcctacaccaggcagctgtggctgtattgacatgctgaatgcttgctcagagtccccataatctcttggcactcctatatgctgcctcatacttttattttaattttttattttgaaataatttcagactcacaagaagatgcaaaaatagtagactccctgtgtacccttcactcagcttcccacagggagaacatcttatgcaaccctcagacatgatcaaagccaggaaactgacactggtacaatagcattaactgagctgcagaccttatttttcttattaaacctagggatctacagcattttagaagcattttagaatttcataagctttagcattgttgtttgtcttttagaggatgtttcaatcccttccaattgacaatcagttaaaattcgtttccgtaagttcaacaaatactggaggatgaatttcacaggttccacgggtccacatggcgctctatgggtgcatcgtctctgatgggtgcacagaggtgaccttctacctcagatctgagagattctgagacataaagaaccttagacagtagtttggtttataggacagaccaggggagctggagttctgataatggaaaccaggctgcattgagtatttagtatgctttaggttttatctactttatttcatttcatacgctcagcaacctttgaggtagatacagttaacatccccattttacagatgtaagaactgagttcagaggagttcaccctgcccacattcctgcagctggatggtagagttgggcgtggaatataggcagtgtgaagtcagagactgcttgttcttaaccttgccgggctccctccttggctcaggcctgcacagtgactgctgtgtgccctggggctgtcctgacttctctgagtctctgtttctttacctgcaatgcaagaggcttgtgtgagatctgccgtgtcccttccatttctgagtgcaggtggttttattggtgaaaacaattctacccgtagagctagaaacacccaagcaacatccaaatgaaatttgtaccttgccccttgtaggtgcttttaaggttggtagaatttctgcagcctagtttggtttgatgggagcctcaattccaattgaattatgctctggtgtattttaattaaaccatctacaagctgattttataaagaggcagaatccccatgtagtgagctgtgcctgcctccctctgtgctcaactctggagccgagtgaggctcgtaataaccagaggactgtgcgagctgctcaggctcggcctcatgggcagcattaattgtgagatgccaccggaacgagatgcgagggcattatcagcatatacttaattgattttgcattctccacaaaggaaggttaaaattaagcttgtttgtaaatggtgtttaaactgcacaggcttggggatgagttgcagaaactaacagagcagggcactggttggagggcctaattttctctttaggtggtggacagagcacatcactcaactaaggtaaagattttcccatttaaaggggctgaaagagtgtaagcctcggctcgtaaatttgacagacaaggcctccgcttgagtgcctcagggatggtctggactctggggatgaatgtgtaatcacattagcgtgatgagttaaagggccccatatttttaaatcctcaggcagagctgcattagagaagatgctgttcgagatcagacttatgataaacaggctcatggaaacagcctttgctatcctcattcctggtatagaatgtaagattctgattgtcattctgacatgccccaggaaaggtctctgctcaaacccaagatgagctttaaacctgaggtggaatgccgttctctaagtatctgttctttggctctaacatataccaggaatgagaacagcactctgggtgtgttctcactctcctttaatcctgataagaaaacattttaagtatctccagatccatctatataatttgcaagacgcagtgcaacatgaaatgcatattaaaaattattaagaattggccgggcgcggtggctcacgcctgtaatcccaacactttgggaggctgaggcaggtggatcacgaggtcaggagattgagaccatcctggctaacacggtgaaaccctgtctctactaaaaatacaaaaaagtagccgggcgtggtggcaggcgcctgtagtcccagctcctcgggaggctgaggcaggagaatggtgtgaacccggaaggcggagcttgcagtgagccgagatcgcaccactgcactccagcctgggtgacagagcgagactccgtctcaaaaaaaaaaaaaaaaattaagaatttaaaaatagggaaagcagaacaatacattctgtatagggtgtttctgagcaaagggccctgtgtgattgaccatgggtccacgcccttggagttggctctgggatcttgtaggatgctgatcctagaccaatgtgatttatagcaacttgtgtgaattgtgaactccccgggggcacgggctgcagctgaatcaccttggtgtgctgggaggggtctggctggaggcctgacctaagcacacgcttaggaaatgcccgttgagctgaatcaactaactcatggagccatcagcctggtctgctggggaaatttcatgtgactttctcagtctccacgcatcgggaatctgggacagtctaccgctaggctcttcagaacagacagggacaaggaccaacattctctaatgaaactcactgacttgacagctcagctttgagaagagaaaacctgaatacaaaacccatctacattatgtgtgtgtataagcctcaagtcctggtgatttttcactgtaaaatggaaaagattgacacacagtggctctccagtacctctgtgtggttaatgtgtgtgtctgtcgtgactctgtggctcagtcccaagagaggggcagcccatctcccctggcttttcatccctgatgtcctccctgtgagctctgctcctcccagtggagtaaaatgctcctggagacagtctaggattttaggggccactgtaggtcatccttgtcattctggatcccggagaatgccaccttgcaaagttgaggggggcatagtgcatcttggtaaggaaataaaatcccgcccaggaagcatctctccctggagcaagaggcttggaagggcccgggactcctttgtgctgactctttgttccttccctgcaggctggcccagactcagagttgccctttcccctttgccagtggagagggagagaggagcatccagggccagctgccaaagacaggggaggttctagccaaggaaagcccggacttttcaggttttaaattggaagagggcttcttgaatgagcattaaagttacttttttattggaagggagtgtagggggtggatgctgtgctcagcatacatcaggagagagctgcccaagtcagatctcttccgagcagcgtcttgggggagagactgtgcaccaccgctagattttcctccctttgtcctcggtttgtacagaggtcactggagatgtgagctcaaagggagccgggacgctgtgctctcctctcattgtcacaagtcgatgggcctgaataggctgtgacacttgaagaaagaaagaaaccatcctttatacctcctggctggggagagacagcagggcaggaagcctgcagtgctggaggccaaagctactcccatggagcctcagatgtgtggagggaggtctgtgctgttcctgggtgtctgggattgtaccctccccaccgtggggatgcacagcctgttcttaacttattcagcaaataacaaacagcacctccatgttcaagcaaaagctggctttatttattttccccattaagctatccacagtcattgttttcactttcaaaagcaaaataataggaaaaaacttcacaatatttgtattacctgatgtaggagtctgagagaacttgaataataagtctggcttagaagtattaggggaaaaatcttgatacacaaaagagaaacagaaacatgaaaagaggaatgtgctgaaacagtcctccctgcaaaacatcattaactccgcgggggctgggagcctgtctgtcttgtccacacactgcaccccactgcctagcacagccgcattcaaaaggaaagtcagccctggctgctgggaggcagtggcgagtgagacatgcccaggtcctgtcctcatggaggttagagtctaggaggtgaatgaggtggaaacacttaggcaaaggatcatttaatttcagttgtgatgagctggggacaggaacgggaagtggtctatgagcaagtttgctgatgccgtgagcccagtctggcagaggcgcggggtgcattggagagctccaggtcataatggaggaagctgcgcggagggagaggaggcagagactgcagacgtggcgaaggtgttgggtgtgcagggggatgttatgtaagtccccagtgaggtgcctggacccagagttctcattttaaggcttagaatgtgctagaatccttgtttctagagactggattgatgatcacaactgggcgatgctcccaactaggcccccgcccctacctgccacctgaattgtgccctttgcagttgggtggcacactgtttagtgtctcctgctcactgcctccagggttccagggacttgctgattttctgtctctactgagagatttgagaaattcttgaagcaacttgccaagtagaaactgtctaatggcatcagtgcaaggattcggtgtctttcccagccggggggcactggccctgcagagatgaagtggaaagatctcgggagggagagcaagctaccttcctgggggtgcagcaggcgtgacttgagnnnnnnnnnnnnnnnnnnnntgcagcaggcgtgacttgagcttgcgctaatcacacccacttctgtcctgagaaagtcttctatggaaagaggctaaaaagactatgtggaaaatatctcttttaaagcccccatttgagacctctcccctgccctgtgtgtgcctagcccgtaggttgctgccaaggtgagcaggcccgggatgtggctggggaagatctacagcctcctggccgagtccacccaggaggagccatttaagaccctggaaacccatcagacctggcaactggaggtcattagccgtctgactgagaggcgggtcgtaaaataagccctaagtggttacgagctctgttaaccattttaaaatgcacaaacagaggagctttggtttggcgcctctgaaaggaaatgggcgtcgtctgatgggagaacattcgccttcatggtcaaggcgcaaggaccagcctgcattggctcattcatgcgcctgtcgaatggttgctgtgccctttgcctcttccttggtttctgatggggcagaaacttaccaccatgtatctagctttctttttttggtgaacttttaaggaattggagtataaccttcatgcattaaagagcatctatcctaagtgtgctgcttgatggattttcacaaacagaactcacctatgcaaccagtacctagatcaggtatacagacagcaccccaggacccctgggctctgttctggtcattaaccacctctcagcacccatgcaagggaaattgctatcctgacttccgcggcctgggtttttggcctgttttgtgctgtctctaactggaatcgtgtgtggttctccgttatatctgggttcttttgctcagtactacatctgtgagattcttccctggtgaagcttgtccattttcgcagctgaattgtatttgtccgttctactgtgggtagacactgtgtgatttccagtttttggccctacaaatagtacaatgaacattctagttgatgtcttttgatcagcatatggatgcctttctgttgggcacgtagctaggattggaattgtggtctttgggagtgagtacgcccaagcttcagtagataatgccagtgttccaaacaattgtactcatttaccgttcccatcagcagcgtatgagtctctggaaagatgaaataagagcctggaaaaaatgtaaggtgagactgactcccttttgtcctctgcccaagttcccaaaaagaagagaccctgggggataacagctggccctttttgcattgaatgggtgcactggaagagataaggcttctgggatgccccagaaagatgcacctgtccctcctggggttctgcccacgtggtcacgtttcactggaagccagtctgtttctgaacttgcggatggggttggttggtctctgagaagagcccagaattcagcattttagtctccatgctttgggtgtctgcatgcaatgaagcaaagcctccaggctcatctttgagatgaaagtggctggcctggtggctggcctggtagctggcctgggttttctcttgggagggcttgagagctgccaccatttaatggctcagtcaagaaaggtttttatttgtagatcagtccagtctcagaaccaaatggttctgcacccaccccctggacttccaacccagtgttctaggtggagaaagagctttccctgtgccaaaagctgttgtttggtgtgatgaggggtccagagcagtgggaagaggcagctgacatttactgagcctcctgcatgctcaggagaactccgaatgcaggtgtgctggtctccccaaccacacaggaagtggaagaagagaggactctgcactgtccctgagcagcagagccccagctggggtgtgtgtcctgccctggctctgtcaaatttgtaactcacaacagtggcagtggctggctaaaggagacttggaaggaaggaaaacctgtgcccgggttattgcccggctgtcttccctaccccaagtagattcagtaaatcgggggcagggcttggaagctgttggtaacaaatgccttaggtgagttttactcaatttggggaagcagtgacttcccagacccttttgatgagaggctgggtaaggagaggaatggaggaaataagaaacagatctcacgctccaggagcgcctggcctgagcagcctcgtgcaggaagctctctgaggagctggacaagctctgtgtctgctgctccacagggtcatgcttgaaatgtgactaggacggccgaagaatggaaattttacatctcatttacttttaactaatttaaatttaaaagcagatacttaattcagttattagaaaacttttaagaatgtttggaacagcttgggtccataactccttttccgactctaagtcttatgaaatctagatacagctcaggtacttcagatgaaaatgtagcatccaaattgagatggacctaagtgtaaaatacacactggaatttgaagacttagtatgaaaaaaatgcaaatttttaattaataacttttatactgactacatgttgaagtggttattttgggtctattcgagttgaactacatgaaaattaacctcacctggaacatttaacctaggtatgggctcacactctgtttttgttgggcagtgctgctctgaggcactttcttgctggaatttgactcagagtgctagggagttggaggagaggagagaagccccagctgtggccccttgtttggctcacgtgggagcagggtttcaggctgatggcacacctggccctatagatggccacaaggccacctgtgatgggtctgttgggctctggctggcctgtccatctccttgggtactttgcccaaagagggaaactgcccgttccctccaggtagtgcctttagaaaacgagaatcttctctaacgctctgggctaggaagagagagctgagcacgtctcaccctgggctgcactgcatctcacacaagtgggacatggcctgctgctggtcagggtgagaactctgcctttaagttagaatcaaatcaaatcaaatcaaattgaattctttaccccagtggggtagagagcaccgccaaatactaagctacaggaatgtggcccagaaagcaaattaggttttatttctgcctcctgcctttgccccgctgtttctggaagagaccccatagacagtgccgtgaagggcagcctacggagtctgtggcaggcagggactcgcaggtgagcctggtagtgggtcggcgggttctcatccatggcgctcagcccgtctgaggtcatctgccctcttcttcattggattctggaagcctccccaccagcctgcgagatgcagctgaacagggacttgttttgtttactgctgcatcccagggctctacacttgagcctgacatagagtagggctttaataatctttattgagggccgggcacaatggctcactcctgaatcccagcactttaggaggccccggccagacagatcacgaggtcaagagatcaagaccatcctggccaacgtggtgaaaccccgtttctatttaaaaaaaaaatcagctgagcatggtggtgtgcacctttagtcccagccactcaggaggctgaggcagaagaatctcttgaacctgggaggcagaggttgcagtgagccgagatcgagccactgcactccagcctggtgacagagcgagactcagtgtcaaaacaaaaacaaaacaaaacaaaaaaactttactgaatgggttcatttggaggatgccccttaaatctgatggtcaaatatggccttcatgttgaccttcctgaagtgacatccccgtaggtgggcatatgcatttcccttgggagagattcccagaggggcctctggcttgggattggctaggaacctcagacctacattgtgtttttactctagatctgtaagtgcagatttttcttttttttccagaaactgtttcttggacaacacagcaactactttccattgcaaagaaaaatcctgtcctttgtgtgctctctacaaagcactcacacagccaggctatatcatttgttcctgacaacctgctgggggggacatcaccattttctgcatgtccccaggaaatgggcgggaccacttgtccaaagtcctacagctaaagggaggcacagtgacaccttagattcaggggaactcccatcttggggtgacttctttgccctcagtatattccacatgtcatggaacctaatggataaatctggtttggtcaggcctggagcgcagaactgttaaaggcaggcaatgagagaaaaatctgcgtccttcctcgagggatgagctggctgactgggaaggtccaggctcaggctggcctctgcccaggtgtcctatggcaggggctcatggaggagcactgttcctgttttctgggtcccctgctctgcctcacctgtttaaagtcagtgactcaaatttttaaaactgtgaaaccgtaaactgtccatccctgttcagccttccccaggccacgggccctgcacgtgtcactgcttgttcatggttctcccctgtgttgcctttgaggctcactcatcttgatgactcagagacttgccagagaccctggnnnnnnnnnnnnnnnnnnnnnnnnnnnnnnnnnnnnnnnnnnnnnnnnnnnnnnnnnnnnnnnnnnnnnnnnnnnnnnnnnnnnnnnnnnnnnnnnnnnnnnnnnnnnnnnnnnnnnnnnnnnnnnnnnnnnnnnnnnnnnnnnnnnnnnnnnnnnnnnnnnnnggggtcccccaaacaacagggactaacttgaactttgcaagactcttgaatttcctggctatatttatgatctgtatggcactgatttgtactagagctgagcctgcagaagtcagttgaacccatcctctctatattcaggaggactacaggatgtaggaactcaaacgggatgttgatctgtgggagtttgcaactttgcctagcagcacagacctgcctccttgggagaggcctctggggagggatgctaagccgatggatgtctgtgcagagacaagggactgtccttttcacctgagaggccattctcatcctgcctagtcctgtctgattcacatctgaccccagcttagcccagacagagacatgctaaagcatgttctgatactttctagcttcgattatctccttgtatgctttctttgtatacttagggcccaaaataccataaggtggaacattctaaagtaaaaatgatcccctttttattgtttgaaaatttgtgtttcttattaaaatagaacattttacagttattcacaagataaggtcttactttaaaaatcactattttcctctgtctttctgacttctttttttaattcaagaacagggatattaaggcaggtgatgaaagcagaatttttaataagagcatagtgatgcttttcacaacggacttagaagacattaaaatatatgtgttttgatctttttctggatttgaatatgaaggactagttattgcaacagacagcaaagtaattcatttcggatgcatttcagcaagccagccctctaggagacgctggaataaaatgtggaagtgtgtgacacagaccagactggacatgtacccggcccatcagctaaaaagccaaagagcaggtggaaacaggaataacagtgacagtgatggttaccatgatgaggagcactgccaacgattcctgaacttcccaggtgccctgtccttgcttggtgcttcccatggattatctcagtcttccctgtggctccattagactacatattgtcacatcatccccatttttcagataaggaactgaggtgggctaagtgtcaggccgtggagccaggatgagaactccagctgtctagataacccatgtcctggtaactgccactctgctcccgagtggtcagcatgtaaaccactgcagcgtggggactgacttcaccatccccttggctctgcctctgaccccccgagcaggtgagagctcgagccagctattccgggaattaggcatatactcattttttgcttcagttatttcactaattaaggcaaagtttctggtagtttgacattacgtatctggataattgcctcaatgtatcattttcactttgcaccctcagacacaacctttaatgaaacttgaaaacccaactctccttgggggaaatgatgctcacttctgtttctaggccaggcgcagtggctcccgcctgtaatcccagcactctgggaggccgaggccagcggatcacgagatcaggtgttcgagaccagcctggccaacatggtgaaaccccgtctctactaaaaatacaaaaattagcggggcatggtggtggtcgcctgtaatcccagctatttgggaggctgaggcaggagaatcgcttgaacccaggaggcggaggttgcagtgagctgagatcatgccactacactccaggctgggtgacagagcaacactccgtctcaaaaaaaccaaaaaaacaaaaaccatctgtttctaaatctgtttctgaaagtagttgagggcgcagacttccacttataagcttaattgcccaacatgcagaagaagtctccaacttccctgtttatcaggcttgaaagtcagccttggtttggggcagatggcctgctcctggtccttatctgggagatgagaggttccgacagtgtgatctctcaagtgcctcagtttggatctgagcttctgttctagcggcttccatgcccaactggattgcatatcttaggaagcaggacagaagtgcacctgcactgattactgagcaaattggtctgaataagtgcagtagatgccagagatttccacgaatgatgtgaatgtgatcactggccagaaaatatccatggacgataaatatctgggcttcatgctctgaaaaatgttcctaatctcttctttgtgatccccaaagagatttttaagggagtttggaagtctgccacttgcagaagtcctggtgttcccagcactaagtgcaggatgtggagtctggggtgcgactgtcttgtcactcagatggggctgcatgcccggcacagtgctaagtgcagccagttactctggaatgtgcaaatggcccctctgccccagctgcagagcgccttgcgggtggctcaggtcctagtggggataggaagaatgggacaaaaggaggaggctaagcccaaggcatgtgctgtcaccaaaagtgctggcttcatctcagaaagctgtggctgggttgggcttggttgctcaggggaacagggagacgcagcccaggaaatgagctgtggctgggctggagcccacctccccaggagggaggtgcatggcagcccaggtggggtgcccccatcctaagatgaaaggtctccacctcttgcttaaattgtaaggtgaacgcttttggccatttctaaggaaaagcacctttgggatttgttcatcatccttcatttttgctcaaggttttgggtgtgaaaacctcagaaaaactaagtcaaccaaagactttccagcgatgtcatcgactgtgttgtcatccaaaggggaaaataatcccagcttatgaatatttagaaagaagataattgcaaattgctttgtgaccgtgtaaactcgtttttttttttctttcccccagccagttacataagaggaggtgtgggtcagtcccagaaatagatgcagaagcagtgacagaacacgtcttggcggtggtggagagagacagccctgggttcgagtcccagactcgcagtgtgttagctaaagaagtttgagaaacatccgtctctttctttccatttcagcctcctcccccttcccctagctggtcgacgctcaaagctctcctagcccaacactctgtaacttgaggaataatgttttaaacccccaaatctagtcctcccataaaacccagtgaatctctcaaattgattaaatggaggcactcattttattagataggtaactggtattttgccttttctgaagggtagaagaggggaaaaagtgactgaggggaccaaataagaaaaaaaagacaaaaagacagaagaattcgggtttttagttgattccgaatactcgatgcttttgaaacgtttccaagtttcctttacgggaaaggaatgcaaatgatccaaaagggaggagggatttttttcccccttcttttttgtcctgagctcagtacctgggattttgcggcatgtgctgaaaaattatatcttctgggtgcagaaatttgcctgaaagggttatacgaaactgagaatgggtcaaaacaaaacaaaacggaaaaaacaagacttctggccacaggtaagaatcatataatttactgagacatatcattttggcatgttttgttaagggtgaaagctaatttggaagaggcaggaaggggctcttgaggttggtgggaatgagctgccgtaatggggcccgcagaatcacccttgtgtctgctcccagcaggactggcgggggaggggcagggagtagctctctgtgggtgtcgggaaccccagggccagtgaagcctggggccaacccccagcagtcccacagcagggttgggtgacaacaatttgcctgaaagtcatggagaaacaggttttcagtgacatagagactaagcctagaggcagaattgtaaaacctaccaagttttattacttatttactttttttcttctttttgagatacggtcttgctctgtcacccaggctgcagtgtaagtggcatgatcatggctcactgcagcctggatctcctggttcaagagatcccccgacctcagcctcccaagtagctgggactgtaggcaccaccactatgcctggctaatttttaaattttttgtagagatggggttttgccgtgttgcccaggctggtcttgaactcctgggctcaagccatcctcccacctcggcctcccaacatgttggaattacaggcaagagccaccgcgctcagcccaaattttaaatttaacccccgcccccaacatgtattgggcattctgtctttatgactgggctatgtttttatgtgtgttgcctgcctacctttagaattttcttcaggacttttttttgtaaaagcgaacaaaagaagagactcttttgccttcacagagctgataagactgtcagctggttaaggcggatgctagtcagacaagcacacacaaaaaacggaagtgggaagggttggaggatcagggcagggccagtgtggtctggggtttcagggaaggggtccttgcctgagatctgaagggtgagcaagagcgaatgcatctagcagggccagtggtgttggggaaaatgggatctggctaaggaggctgggagaggcagagatggacacacagagacagcgagataaaggccgccagcaggagtgggggctcgggggtggggttggggggatgcagtgctgcaagggggattgaatgttcccaggtacagcccagcaacgaagaggggctcagggcttgggggacctgcccaaagtcacagagtgggtatggttgtttcatgatctcgtggtgtctcccgggccgcaagccccacagcgccagggctgtgcctacgctgcgcaccctgaatccccatggactcccagtcaggggcttgcgttctgctccgtggccactgctgtacctttgcaaggatggggaaggccttggggatggggaggccatcacacaggcactttgactgcatcaagcgaaattcttacttattctgaaatgacttcaggtctgaaaactgtgtgctttgatcaaatatttacttttccgaaacagaaaccagagcaggtcttgattgtaccagtcagcttgaaccagtcagctacaatgacttttcgtaagtctatttttttttttgagatttcgttttagcccaggaggaaatctgctatctgcaagaaagtcctggccttcataatgaggcctgaattctttccagatcttatgagaaagattccactcttctgcgattaattcagagaggttactaatttctcataccatagatcgtttgctttgtgggagatgactgtgcctcagccaagatccacttattattttttgaacaagttttttttattatcatgtttacatagcactgaggacacaaaacaacgctggaagctcagctgtctgattcatacgctgtattgctgactctcacttctcccttcccctctctactctacctctctgcaaaagaaggctttccttccagagctggcagctgcccctgcttcttgacaggatgagcaagacagcggcggtttaagcaaggtcttcgctgtgctccggagagatgtgggtattctgggggaacatgcctttgttataatatttattgaatgttcacttttccagctctgaatactgaaacttagtgagattttttttttcgagccatgccccatcaacacttttaggttgtctctaatggaaaagagaaaagaaaaagattcatttttgatggactgggcatatccaagttcagtgtcttgggtgataggtctataaataaatacttgtttgacctattttacagaggttggaaatctagattctagatctgagtggagttatcagaaactaggtctgttatctaaaaagctagaggaaattgacaaggagaaggagggtctgaaatgaccttttttttttgagacggagtgtcgctctgtccccccaggctggagtgcagtggtgcgatctcagctcactgcaacctccacctcctgagttcaagcgattctcctgcctcggcctcccgagtagctgggattacaggtgcctgccaccacgcccggctaatttttgtatttttagtagagatggggtttcaccatgttggtcaggctggtctcaaactgctgatctcaggtgatccacccgcctcggcctcctaaagtgctgggattacaggcatgagccactgcgcccagcctgaaatgaccattttttaattagtttcttgtctggatctctctctctttgcctcctggtgtgttggtgggaccagcgttttcatggccacgtcagggtggagaagggctctctcccagcctctccaaagcagttttattcagacattgctggtctgcatgcagctttagccaagccccccaactcttgaaaatgggaaactgcttgatgagtgaatgtgaaagtacatgtccccatcctccatgaggtgagaggtcttcagcttgcgtttaagtccagccctgcctcttacttgcagtgtgatttagggccagccacttcactgtcagagcctcgggctcccttcatcctttttaaaagtattcggccactgattccggctcggctgggtctttatacaccaggccaaagtccttactgttgagctgagatcctgtttgcagaaacgggagggaggaaagaaaaagaaatgaggctgctggtggtggtggttgccgtttgttgagcagttggagttggcaggcactatgggcatatttttgtggggattttcccgtctaatctccacgcctgtccatggggtcggtactgccgttaatctccctgctacagatcagcgaagggaggcaccgaagtgcaaagcagtttgcccgagggcacacagccggtaaggggttgatacaaaccagatggcacgtgtggatgttcacctgcctctgggttttggcttttcatctttcctccccgccatgtttctctttccacaagggtatgtgcccgttcctatgtgcccagcagctgtatgggatgagatcctaggctgcctctgtcaaacgctctttgggcattggtgaacattcataaaacagcatcctctggggtcacattgtcccttttgctcttggagctggagttcctttggtctgtgcgtgtgtgtaaagatgcatgcccactccagggaattctgtggtctgcttggggttttccattgcagtggcagagaagacaagggaaaatgtccttcccggctgcactcccaggcctgtcatttggagttgaatggtaatagaagggtttttttttttttttaaatgatttatagtatgtctggaggaaagatgttattaattcaaagataacttgagaaaggaggggacacagtgcagcttggacagagcttcccactggtgctttgcgcagtctttagcccacctctgccttgccttatgtggtcctatggcctcatttcaattccctatttcacctgatctgacgagggaggcaaggagtgcatgcattttcaacagataaagaaactgaggctcagagacgtgtcttactggacgtgaactcacgtcctggaggcctaggcccagtccgttttctatttgccacaccattttttgtgcaacatttattattttttctttattatctttgtagttacaaaagtgatgcttgctctatgtaagtaaaattggaagcaagatggaatgtgtaaacagaaagcatagccccccaaatgctacccacaatcaacaatgggaaactgtgtggggagtgtattagtccgttttcacgctgctgataaagacgtgcccaagactgggaagaataaggggtttaattagacttacagttccacctggctggggaggccccagaatcatggtgggaggcaaaaggcacttcttacatggctgcggcaagagaaaatgagacagaagcaaaagcggaaacccccgataaacccatcagatctcgtgcttatttactatcacgagaatagcacgggaaaaaccggcccccatgagtcaattacctcctcctgggtccctcccacaacacgtgggaattctgggagctacaattcaagttgagatttaggtgggcacacagtcaaaccatatcagggagtgaatgtgaatgtgcatgtcccatcctccatgaagtgagaggcagtttgggcttcagcttgtgtttaaatccagttctgccatttacttacagtgtgatttagggcaagccacgtcaccccacccagagccaccgttttcttatctgcacaatggggcgattacacctacctttagcgttgtctaaaagtcagaaagagatgagaggaagcaggttcccagcttgatgcctgccataaaatggcagctcatcctggttcctttccctttctccctacaccagtgcttctcaaactttcctcttcgtactcaaaggtgaaagacagtgagagctccctggggtttcccaggctggccccgacagcttgcagccagcaaggcaagctggatctctgcaaattttgtgtcagttagtatatacgtggatataacttcatttgaaaacaatgttttcaatgtttgaaattttgaatattttaaacatggaagcttcagtttgtcttacagcttcatacagctcctggctaacctctgcacactggaggtagaggggctggcacacctccacatgcccacatgcccctgggggaagcacacctttgcacactcctggtggggttggcacacctccacatacccctgggggtctggcacaactccacacatccctgggggcctggcacacctccacacacccctggggggctggcacacctccacacacccctggtggggctggcacacctccacacacccctggtggggctggcacacctccacacacccctggggggcctggcacaccttcgcacattcgggggggacacacctttgcacattcctggaggatcctggcacaacacgtttctgggggggcagacacacctctgcacactcactcctgggggaggtacacttctgcacactcctgggggcggggctggcacatcaaacactcctggggaagaccagcacacacgggggagggttggaacacctgtgcacacactgcatgggtgctggcacacctgtgcacacactgaatgggggctggcacacctgtgcatacactgcatgggggctggcacacctctgcacactcctgaggtccctacagccaagctgggttggtactggagctgttctcctcacctcttggcaggcttagtaagggctgggtctgtctgggggcagaaaatgaatgtcagctgacttcaggtgaccccctggagaaactccactcgcctggctctaaaaccctccagaggacctcgccatttatttgggttgcttggtctttccatcagaaagaaataaattccaatgaagggttttcaggccgttcttctcattgaagggttaaccagattcttattttgctcatctttggaaataaaacaatgtttagaactacccggatcagcaaggccatctggtggggagtgtgcagctgctcccctttcagtcgcgccgcctgtaatggattcattctagggtgcatcgtgcatctgcagaatcatgatttgcagttggttttgaacgtgtgagctatgtgtccatgcgagacctttctcctctgcccgtcctgaaggacatctgggccgggcatcttccactgtcctgcagccttttcactcttcgtgaagtcaggtcaaagtgggcaaggggactctggggacctgagagtggacagagtcaccctgctccttctgtccttaatctgtagtctctgtgcattatactctgggctgctgcttttcattcatttctctatctgtgtcaaggaaaaattgttggacagcaactagaatgtaccactcatctttgtagtctaaatacaccacagccagaatgacccctattctgaaaatgggtcactttttcctggtaattgaggtttgatgttgcaggtgtttgagccccaaaaacgtgcaaaaagaataattataacatgtattaaacatcctgggctcctgagatcactgcacccatggaacaatgctgagccttccacattgactttgagatgaagagaatgagggtctaaatggtgaaggggtttgcctactgtcatgtggctggttaaaccgtgtggccggtgttcagcctaggccttgagtctccagttcatccctaggccagctcgctgtcctgtattctgtaagtcatttgggggaggaagtgtatagcattacattctctgggccacagtttccccacctgtaaaatgtaagtagtaattgtactgtcctcttagattatgacatttaaatagaataatccatatcaaccccagcctggtgtctggacacaaggaagccctcaacacatgttagctggtgtcactgttgttgtgactcagcaataagaactctgttctggatatttgctggatatttgccatgctttctggagcttgttccctgactctttaatttaaaagtatttattgagcacttactctgtgctattcaggattgagcactactgaccctggccttttatgaatcttgtagtccagcctcgcctccttacaagggagacgggtggccggtgggctgagtgatggctgaccgtgctccactgtgagccttgagttctgagcaggttcccctacagctgccaataacagcttcgttcgcctgctgcaggagaaaggtcacaggctttgcagccacacagaccagcggttggattttggccccaccactggtgagtcctgtgactcagggttatgtgtttaaccctgctgtgcctcagtttcccatacatgactcggggaatctcagtgctgacctcagagagtgccttcaagaagggacctagcatgatcctctgcaagtggcagacactggactatcaggcatttccttcttcttttgccgccaaccctaaactgactccgtgtgctgctgaaatgctttgcagctatatgactgtcctcgctttgttccctagagccattttggtagacgcgcttctcggcacaccctgtaagctcctcttgagtggcctctgccttattggaaaaccggagtcagtagatatacaagcatgagaaaatctagtccctacactggtgtgatttactactggaaataataaaatgagcactctgaaatagtttttctctccacttggtttcagaaaaaattattgattgtgtcacaaagacctttagagtcttttgtgcacattgaaatcattggggggagaactgcagcatgaacatatttgaagtctctggtccaccctgccccttcgctgagaaaacctgattattttgtgcatttcagagagactgggacatctgctgtgtttggcccatatctcgggtggttgcacaagggagctggagctgattaccctattagagagcaagctatcacagaataggaaaaagaccccattctccctcctgcctgccacggccagaggccctggttcactgaatcactgctgttgttaccacgcttgtttggcttcctggagcagagctagttcttctgcagattctctggggctgggtgggcttcacggctgtccttgaaatgggatatacagtcccgaatgtgggcatttttctggagcctctggagtctttgttctggcgttagatgggatgttcccagaggacccaggctgttcatttatttgtctgtacgaacggacacgctgcagcccaggcctgtacgactggacacgctgcggtctttgtctttggagccccagcaaatgcaagccctgcacatagtaggtgtttaaataaagaggtgcaaaagtgcgtgggccactaatctggagaaaaccctgtgtctcttttggattaattatctggctaataaagcaagcgctgcgccggctagtcaacgctcactgcaaaatcactggcctctgagcagccctgaaagacataacagatgaagataatgagtttgtattaaggagaaattaacttcagatcatacacccatgagtgttatggccaaaaggggtagtcccaaatccatatcttatatacggagaaacagaggccctgagagatgaagtgatgctcagggtgaccagccaggttagtgatcaggacaccaagtagctccctgccttgctgggaaggtccctcctttgctgctctgaagttttaaaatgcaaattatcatggaagccaccacctgggccgcagcgtgtccggtcatacaggcaggcctgggtcaaagtgtgtccggtcgtacaggcctgggcctcagagtgtccggtcgtacgggcccaggctgcaatgtgtccggtcgtacaggcctgggccgcagcgtgtccggtcgtacaggcagggctgggtcaaagtgtgtccggtcgtataggcctgggccgtggagtgtccggttgtacgggcctgggccgcggagtgtccggtcgtacgggcctgggccgcagcgtgtccaactgcacacagcccaggcttctttgatgtgcggggacaaaataggagttgggggctgcgcaccggggcctgcctcctgtgcatggggccagttccattcctgtccattgtctcagctgcaaaggtaactgacaagggacagccccgcctctccttcctcccctgcccctgcccgcctttctttctgtccttccttcccctgtccccacacttggcaccaggccagcctctacacatctccgttcccccatcccttgtctctgtcctggagctgtacctgtctcctagcacactttcctggctgcaggagacaagcctgagtgatgaatagagtctgaattgagacaggttaagactcaatgccccaggccgacagggcattcaaaggagattgaaggaggtaggggagtttcatcccatcagctgcctcctgggatgcttccctcaccttcctgtcctgtgtctctgggtgagactgcaaatctgtattctcggaagggattcctcaaaagattggaagggggaagggcaccaagggcctggagaagccgctggactgtctgaggccaggcctgggtggtggggtagaggttaggatgggctccctcttgagggatggtggaagactgagtgtcaggctcctgaggcctcttgacccatctttctataatgggctgcatgtccttggggaagtacagaccacactggccttggtttctcctctataaaaggcaggctggatgcaggtacccgcaggtttgtactggcaagctgatgatttgctggagcccacctgggttttgccctgggtctgagtgtacccaccatcattgttgagaggttccgggtgtttcttactgtgaatgactgcagtagaatcctcagggatcccaggagcttcactgtcttgcatttcccatctgtacagcagtggctggtttaccctggatctttggggatgggtgcgtttctggaaagttggcccttgctgttgagcactgaaacaagttctggatgagcatggtcatttggaggggggtgagcttttccagaattttccccacagctgcgccaggctcgccagagctacgggccctggtgacaggggtgcccgaatgatcctggccagctcagctttttagtaccttgttctactgtagaacttgggtgttacttcctgcatctgtgtggccacctgccttttccagggcatcccctcagataagtggcagacaggaaaattggacaccggtgtctggaattataatatatgcacactgaaagcaagtaaccctgcagtgaggacccaagggtctctccagtaataatgcaaggaatccgggtcatttaccgagaggcaggggagccagagatcacctccaaccccctccttgtgagctcttacgtgggctcctgaactgcatctagaagccaacttgacaccaggcagacaaacaaaagggaagcaaacacactttgttagttttacctggacctaggaatcttcacgagagagtgaagtttgaaggagtggccaaagcaagatgtttttagaccttttagacaaagaacaatccatttcagaagagacagaacagaagggacctggtggagtaatatacatttctaggggagtctctgggagatctatgggatgtgtaacggcagtggaagagaagggttactttgtgaagtgtatttatcctgggtcattgcagccccaagttcccaggctgtgctgaggagggccattttcttggcctggcaggggaagggtactcctcccagaggagtctatggcttggagtatgcaggaagagacaggtcagctggccctttctgaaactataatttctccaatgttttcgactcaaaataatcaacatatcaatttggcatgttttgggatggctcatccttccacggtgtgcggggtactagactctgggttaagcattttgtgtatgtgacctcatttcttcctcacatccacagtaggagactgagatcattttattcccattttacagatgaggaaacctagtcacagaatggttaaattcgttgcctgagatcatagagcagttacagacttgattcgggttgaaatgcaggtctgcccaactcccaagcctggcataatgtcttattttcgactgcttggaaaccatttttcctacatcccatctttctaccaagttgagaatcagtgagctcaggacgcaggggaggcgctggctgcatattgtagagatctgatcttggggaaatgcctgtttattatggatatggcttatggactaaaacaatagcattgaatgtacgttgtatgcatgtaaggtagttgtgattaaccaaaaccaatgttgatgacgaacttaacagagagtcaagtgtgctttaaaaataagcttaaaaaactgcctgggttttgtatgcacagattttgggccagccaggaagatccctcaggttgtggtttgagaatacctgttttagacaaagcacgggtgatgtgtcccagtcatcaggaaggatgaaatctggcaaggaaaccgtaaggatcagattacaggaagggcttgctcagggagaggaaggaagcaaggaagaaattagtaactgaaaagaggcaaggaggaaggcctcttcatcaggaggtgggggagtgtggggcagtggataactaaaacaaaacagctgtggttgtcataaacacattttgtcagaaaataacctggtgtgttattttctgatgtttcagccattgtgtcttgattcaggaacagctcccttccgagtttctttttgtttgtttgttggtttnnnnnnnnnnnnnnnnnnnnnnnnnnnnnnnnnnnnnnnnnnnnnnnnnnnnnnnnnnnnnnnnnnnnnnnnnnnnnnnnnnnnnnnnnnnnnnnnnnnnnnnnnnnnnnnnnnnnnnnnnnnnnnnnnnnnnnnnnnnnnnnnnnnnnnnnnnnnnnnnnnnnnnnnnnnnnnnnnnnnnnnnnnnnnnnnnnnnnnnnnnnnnnnnnnnnnnnnnnnnnnnnnnnnnnnnnnnnnnnnnnnnnnnnnnnnnnnnnnnnnnnnnnnnnnnnnnnnnnnnnnnnnnnnnnnnnnnnnnnnnnnnnnnnnnnnnnnnnnnnnnnnnnnnnnnnnnnnnnnnnnnnnnnnnnnnnnnnnnnnnnnnnnnnnnnnnnnnnnnnnnnnnnnnnnnnnnnnnnnnntgagactctgtcttgaaaaaaaaaaaagaaaagaaaaatcaaccctttattatgtctctggtgtctttaggaattggctgggatccagcgggtattggctgctctgggtgggctcagccaggtggccctgctccacctgtctccccctcctcctggccaagcaagtgtgcaagaggacaaatgagtacacaggacatgtcttagggcctggcacgtgccagctttaagcccacttctgcctcattctgctggccaaagtgagccacccaactcaaaccgaagggtggagaaatacgtcactcctgtagctgaaggccctccaaagtggcaaagaatgtgaacatgggaagaagaaaaaattgagaccaataatgcaatctatggtaaagagtaataaatgactatcaaattcccattgtgggccaggactgtgcatctgtaataccagctaacatttattgagcactgactatgggccagagactctttttttttggcagactcttgatctgttgcccaagctggagtgcagtggtgccatcttggctcactgcaacctctgcctcctggattcaaatgattctcctgtctcagcctcctgagtagtgtggattacaggtgtgcgccaccaatcctgacaaattttttatttttagtagagattgggtttcatcatgttggtcaggctggtgtcgaactcctgaccttgtgatttgcccgcctcagactcccaaagtgctaggattacaggcatgagccaccgcgcccggccgggctagacactcttttaagcaccttacatgaatgagttcactgaatgcttacagcactgccatgatacaggtcctgtgattattcctaagtcgtatccaaagaaatggggagaagagacgtttaatatcttgttcaagatcaaacctgggcaacctggctccagcactcgggctcttaactccagtgctgtacgtgatctgttgctagcggggacttcttttgaaaaatacagaggcccagaaaccttaagtgatttgtccaaggccgctgggtggacatggacttggaatcctaatccatgtgactgctgtgtcctctccgctgtgctatgggccagtgaatgttgacggagtggtgtggctttattctgcttattgactgggatgtgatcaaaactgtcgaagtccagatagaagactgaatctgatgatttataatttgtacagaactcttcagtcttgttggctttcttctcagtctcagcaacaaccttctatcttagagctacatgtgaaaaatgttccttctcctacttgttgatgaatagtccttgaaaaaatatatttccatatatatagcctagagaggaatgtcagcagttacacatactaatcagaagaaggctttgtgttttagtaaaggttaattaagacccattgaattttttttccttaaaacataaaagaaaaataatgtaattagctatttttttccctctctgtccccagagggcaaatgtaaatgttctacctaaatgaagctatttgtttaaatccatccagatttcttctgaagtttcatacatctttcttctgctatatcagcttatagctacaataatttaataagtttttcctagggtgaaattggatgccctttatcgatcttacactgagggggcattcaattacttaatctaaagtggtatttctgggtctctcaattacaattttgttataaatggcttgctaatgatgcttgggtgcataggttaatagggggtgtccaagcaagggctgggtaattgaacactttctattttgggacccgttatctgatttctctcctggtgccaggttcccacagtgatggtctgcagccatcaggctcagaattgagcccaggtgggaagcaatctcactgaaatgtatacctgaatcctttggtttaatacatgaacggaagtgccaagggccccgtcttgtctgagtcgaccggcaccaaatgtggacattccagacaggtgaagtgcagggggcatacatgactcctttctgaaggaagaaccacttgagtgttaggtttctgaatgactgttcttgggataatttgtggcctacggaaaaggccagatacagaacgtaacagcaatccattttcctttcaataccaccccgttaattggatttttcttccctgagttatgttctttaatagttatacatagtaaactattctatacatattttactatgtatatttactatacatagtaaaaattcttttgaggccaggcgtggtgcctcatgcctgtaatcccagcactttgggaggccaaggcgggctggatcacttgaggccaagagttcgagactagcctggccaacatggtgaaactccgtctctattaaaaatgcaaaaattagccgggcgcagtgatgcatgcctgtaatctcagtactcgggaggctgagacaggagaatcgcttgaacccaggaggcggaggttgcagtgagccaagatcgtgctgctacactccagcctgggccacagagtgagattccatctcaaaacaaaaaaaagaatatgtagtatgccttccttcttgcactcgagcaaatcccacccctgactttggccttcaagactctacagagcctggtccctgcctcctctcccatcaggtttccacccccaccagcctgtgccccagggcctaccctgccagtagccctcatgggctgggactccccacagcgtctctctacggggcctttgcttcccctggtctccacgtgactggcttccttcttgttcaggtttctcctccaacgtcccctctgaaatcaggtcttccctgtcaccctgtgtatcatacctcccacttctttaaggcagtagctccaacccaggggtgattatgcaccccagggggcactgacaatgcctggagacatttttggttgtgacatgtcaggggaaggggtgctatggcatccagtgggtgggggccagggtgctgctaagcatcctactgtgcgcgggacagccctgacaacaaagcatgggccagccctaggacggcacaaagaattccaaaaccctgttccaatggttgtattgctctctcccccttttctttattcttttctgcatagcctttatctagcagcatctgtgattatcttattcatttgggacttctttatagcttgtgccctgcagcccctacccctggtgggacagaagctccacttgggaacaggcctcctctctgggtcagccctgcaccactcgcgcccgtcaggggaggtcttgtctggaagccgccgggctctagggccttcacttacaagggactcacctggtcttcagattgcttgtccatcttactgagtatttgacatactatacagtggctatcgattttggtaaaaacttgtaaatgtaagacagttttatgtttttttctcagagaggcccccacccccacgcccaccgcagcccaggggtattttccaacaccagcaaatcctccaactccagaacctaactgattatcttaccagtcaattcaagtctgcccctaccagaggcagcctcagactctaccggtttgagggctcggtctcaccagactgccccacttcagatgccagtcccaagtattgggtccccaggttacccgcacatctgtccaaattggctaaaaaggcaagagtgtcccacaacctcctcaggttcagtaattcactagaatgactcacagaactcaggagagtgcttgactcatcatcagtctattatagcatagaatgcagaaacagccagcagatgagacgcatggggcgaggtatggtggaggagggtgtgtggagcttccatgccctcttcctccactccaccctcccagcacctcgaaggatccaccaacctggaagctgcctgagccctgtggtttaagggttttgatggcggttccattacaaaggcctgattggttaaatcatcagccactggtgattgacttaatctgcagcccttattccctacccggagtttggggggtttgttgaaagctgctcactgaggcttggtctttctggtgaccagcctccatcctggagctatcctggcccgcaaagtgtcaccgcatcaggatacactcaggtatggctgaaaggggcttgtcatgaatgacgaaaggtgcttctctcaccccatcattcagaaaaattccaaggattttagcacctgtgtaccagtacccgaggatagagaccaaatactcatctcttatttccacatcacatccctcatcttgtattggcttttggtctccccctacctggacatgcgcaacactcagctgttcttcaaaaggtatttgttgaacaaatgaatgaatgaatgaaagaatgctaggagctgagaaaacactgtatctgagtgttttgctaaggctcttgcagcatctcgaattgcctcctcaggtctttctgtttaggaagcgggactcgcagaggccgggctggttggtgggggcagctgccccgcagacatgctctgtggacccggtccgggcaccccatcttccctcctctctgttgagactgtcggctgctcatgtttttactttgcttgaaatgagctgcccctgcccttgtttaggaatgttttgcccattcgtttgggtccagattatgtacattcctatcttggagcttcaaagtccgtgttttgtttgctttttaaagaatctaattcgattttctgcagcagaaagacaggagggtgcgaattccctccccgctgagctgctggttggagtctcatttttaaccccggcttggccctgtcttggacatgtgaaaaaatgttttcttggctttaatgatggagtttccaagtaggggatcttgcccttttgtttctttagtttggaagaattgtttgtagcaagcgatgggtcaggggtggttgagcaagtttgaagcagaggttgatccttgaggtttctgacatgtccctccagctgccctcagggataagagatgggggtagggcctgagatgtctggcctggcttcccagaactggccccttctgcatccccgccccagcgcctctgcaggactcaggtctcagcctctactgaccagcctttctcaaactggctccttgataccctagtgagattccttggccaattaggtacttccaactttgtgtattatattcctctcttgtggattcacagggcttattagcatatcaaaggccctgaaaagttcagctgtaaagaattctgtgtaattttgtccattccacattttctccaaataatttaagcacagaacactcaccaacggcaagcagaacattttgtgggaggaagacattttgggaaacacagcttggctatttcttggccaccatattttgagaaaacatgaagttttcagtccaaggggcatgaacatttcttctgttgagttctgattgtttaatccttcagccagtacatggcgatcttgatgcgcggttagttaatgctgcctctatggagacagtgagggttgtttgaggggtggcgtgggtagagttggagatgagtctaccactcttgggtaattttcaattgctaaagaataatcatgtggtataggatctctcatctttgattccatttcaaatgtttttggcattcactgacaatgaaaaatcatcatcataatagttgatgatgctattattatcaatgctgtctaccttttatggtatgctaaatatgtggcaggcattattcaaactgtttacatgtagtagctaatttagcacctgttaaggtgtccttattatcctaattttactattgaggaaaccaaagctcagagaggttatgtggcttgctcagggtcacacagccaattagtggtgatctaccactgctagaaactgagtaggtctccttttatgcttatccatggctctttctacgacatctacaaagaagtgtcatttgggcaacaatatattttataaccacaggattctattaatgggtttttaagaatcatatcttgctcgagatgatgaaagtgaaaaattatgtcaggttctgaagctctgtgtcactcgagggaatcctatacattggatttaattgcttaataacttaaagtcaagtagttttttaatatgatacattctactgaaggagagactcatttcattgtttctaaattttcattaacttttgcttcctaatctgataataaaggttaactctaagaaagagactgctgatgccagtgagagggaaaaaacacattttctctgcctgctccctttctaaccatcctccttagtattcttgagatttttcattgactgaaaagcactgatatttcaatccatccctcaaatttgtagtcattgactgtgcatgactctgagaatgatcacaacatcctgggattcagagatcctgtacctgagaagtatcaaggcagagggattaggggagatgtagactatgcacaatgtgagacgtttgatgtggcgctggtggtgctgggattggggccatgtttggtggcagaaattgagccccaaagccagctgcaagaacctgaaacctcttcctttatgctcgcgattttctatgacttgcttagaaccaggctggcttggctggacttagaggtggaaaagagagtgagcatctgtctctccttggaggatgagctttgggttattgctattaccacacaatgtaataaagcttcttgtctttctgtgtaggaaatctggcattttttaaagtttgcgccccacaaagaggaaatattccaaaggtactcaggatgtaaaaggggagatcttcacagatgcctccgtggatggcatggcaatccatccatcaatgagaagaccatgatttcttttaattttctgtgtgtttccacattccccagtgagaattcttccacctttttttgtgccatgggaaaaacctgaagggcaggcagagctgctcccgaacttgtgaccttctctgaggttgcagcggctcttgtagaacatgactctgggacatcacttccttttgttttctttcggagctgaaccaaagaatgtgcaccctctttctctagtgctgtggtgtctgcttatttttgtatttgtgctttccatccatcttctgtgatcacaaggcattcttaaggttttctagcacgacttgcggacatccagactcgtggggggcccacccatggctcggtaagccagcagcccagggcactggcactaccatgaggcactgcattaattgctgcatacagctgttacccgacggcgcacacaagcagcaggtcaactgccaagggggcccccatcacggtcaccaggcgtgccccacgtgcaaaggagaaaacaaaattctgtttcgtgtggacagtaagcagatgaacttgcttgctgttctcgaagtgaggactgaagggaacgaaaactggggtgggtttttgcgcttcaaaaaggggaagcgatgtagcctcgtttttggactgataataatgaccttggtaatggcttcttacatcctttctggggcccaccaagagcttctgatctcatcacctttccattacggaggcttccccagcaaccccagcttgatggacagcgaaaacccaagtgacacaaaggagcatcaccaccaatcctctgtaaataatatttcatacatgaaggactatccaagcattaaattaattatcaacagcatcacaactaggattgagttcacgaccagacagctcccagacttagaagaccttaagaagcaggagttgcatgtgagtagctttgtgctaatcttgactgattggttgatttttagaaatgagtgcttttctttctatcaccatctttgggaacacagaaggaaaatgactaaaaaatgtcttagatgtagcaaggatcatttgacagccttatggatttgaatgcactgagagagtgctgtttgcttacgctatggagtgccaggaagggaatctgctgtcctgaacgctgggctaggcatgttcaagggccgctggctctcattattgcattccaggacttcttgcttgatatgtggtcgtggtagttaacagttgcttttgcagatcaccatcatttgggattttaaagttgcgttaaatttgattttctgcttctattctacattttaatctctaacggcaatttaaatatacaactagtaaaaagattctgcttaattaccgtgtgtgcgtgtgtgttgtgtaagtgtcagaaaggtaaattatggtagaatggattttaattaaacttttatctttattctctccaagttttttttttttttttttgttttttgtttttttttttgtggggcggcgggggagaggaaagcacagtcattgaccgtctaccaagttttgctttatttgttaatcattgtcaaatattagttcaaatttgaacacggtcgtcagtctcagggcaggttcccattgcggttagattgtgtctttgctcattttcccctcctctgtgtctctcctcctctgtttccttgcagatgttttcagtcatccccaacaaattccttccaaacagtaagagcccctgttggtacgaggagttctcggggcagaacaccaccgacccctacctcaccaactcctacgtgctctactccaagcgcttccgctccaccttcgacgccctgcgcaaggccttctggggccacctggcgcacgcgcacgggaagcacttccgcctgcgctgcctgccgcacttctacatcatagggcagcccaagtgcgggaccacagacctctatgaccgcctgcggctgcaccctgaggtcaagttctccgccatcaaggagccacactggtggacccggaagcgctttggtgagtgctgggtcccagggctcctgtctggtctcgttccttcattcgttcattcctcccgcaacgttagcgctggggttggggggcgagggcggcagaaagagatggcacaattcccttgttaggaggctgttcccaggcaaagacccagcagggtctggaactcggttcccagccatgcagtgagcattgattgccagctgtgtgcaggacacggggacgagtcagaactggcagctcttcttgttccgaaagcccgggcacatgacccgagcagtcagcagtaagtgccagtggccagtaagggccagcaagaagggcgtgatccgggctcttggctcccagctctgtgctattccctgctctgtgccgctcccagctctgtgccgctcccaagctctgtgccgctcccaagctctgtgctgtttcctgctctgtgccggtcctctgctctgtgccgttcctctgctctgtgccgttccctgctctgtgccgctccctgctctgtgttgttcccctgctctgtgctgttccttggctctgtgctgctccctgctctgtcctgctccctgctctgtgctgttcctctgctctgtgctgctccctgctctgtgctgctccctgctctgtgctgttcccctgctctgtgctgttcccctgctctgtgctgttcccctgctctgtgctgttcctctgctctgtgctgttctcagctatgtgctgttccagctgcagtcactgcacctgggggagactgagttgcttcaggcctcagcttctctgacctgccccgtctgccttatgggttccatatgataaccacatggagatcattctggaggccttgctctcagccctttgccgcaggcttaccatgaccactgcccatccctctctgctccagcttaaccccatgcaccctgcggtcctcagatcactgtttcctctctgtaaccttttccttgtgccaggagaggtttggtcactggagctgaggggtgatacgtgcctattgtcaaccagagtcctggcaggccacgagggtgttttccagtaatggactcaggttgactagaagggaatcttcaaagttttccctagaccaactcttaatgtgtttcctgacaaacgtttgctttcatccttttgatgttcgtcctacagtgagctaaagtgtaaatgtttcttttgtggtttagcagccgccgctgtaggagccagggtttcacatccctatgcatttgctggacgtgtctgaacacactcccttgctgtagggtgctcccccgaggctcacagtgatttccccttaatgaaaaccagctttctaccggcaggaaaggaggaagaacagaggcgggcctctggaatctagtcttcaatgtcaccttgaacctcttgttactttggccacggatgttctctttccaatttccattgacttcaggagttgtggtgttgggaagtggatttttaaatgtttgcaagtgaaatttatttatttttcaggcagggggtgaatttaagctgtatgtggccgatgccagaatccatgtctgtctagagtatgatcagttccccgtactgtttggacaaagggcagggtatttgattgaacagggggaggagagagaacatcaggcaggtgctggctgggccccatgaggaaggcatcatggagtttataggatactgcccttctctctcctgtgggcagccctcggtcctctctccctgtttgacacaacacatgcatcctgggtgtcatcgctgcccagccacttacgagtcccacctgtgcacaagttaaccagccccagactttgtccctccaagcagacatgtttctagctcttgagtaggtgttccagcctttaatctgccactgtctagcttagtggtggtatcttccagcccttgaagcatgcatggattgaagtgggtagccaggccgcatagacccccacccccatccccagcagccctttctgaagcttacctgggctgagcctcttgctgctgtcgccaggccctttaggcctttccatctctctttggttgctgtctgggaggccatcgctccagcagtagcaactttgtcctcagtatctcctgcttcttggttctcataggaatcgtccgcctaagagatgggctgcgagaccgctatcccgtggaagattatctggacctctttgacctggccgcacaccagatccatcaaggactgcaggccagctctgcaaaggagcagagcaagatgaatacaatcattatcggtaaggcttctgtgtcactctggcagggctagcaccctccctggggtcctggctcaggctccaggcctagcccagctctgcttcacctccagaacatttacatggtggcagcaaacttcttttgagcctccacttctccacctggctgtcactcttaccactacataaaatgttcacatcacttgaacattactataaagtggaaatgttgactttctaattctttggagacttaaggacagctgatggctttcttgagaagttgccatttctttgtttttaagaaattaagcagggatattgacttcttttcctgatgtactgatctgataagtttggatgggggaattataagtgcagttaactggttagtcatcgatttgctgcttggggcttttgtaatccctggccactgggaccatataagacggaggcagcttctcctgaaatagactcagctctgacacatcgcctataactaattgctgtttaaaaagcctagcccctgtcaacctcatgcctttgggcattcaaagtgaggttgattaataataatttgttttaaatattcacaagaatattttataagtaaacatacatatttactctttaaaatttattttttattgtataatttaaggtgtacagcatactgtgatgtttcgatggaaatagagacagtgaaatgattgctacagtaaagcaaattaacatagccatgtttttttcacagttacctttgtgtgtggggaggggggcgtgtgtgtggtaaaagcacctgaaatatactgtcttggaaaatttccagcatgcaatacaggattaataggattaataactacagtgcacatgctctaccttagatctctagacttgttatttgcctgacataattctttttattggattcagcttagaaggcgtttatccactgatgccttctaaaagagaaattgagtcacgttttgcttaaattgtttaccttagatagtgatctattttttaattttcctagatctgttatatttgcaatctccaaattaaataaatctattagcaactaagaggaattataatcagcccttcgaaagatgactttttaacttaagactctcctgtccaaggggacagacttatgtgcctaagtcctgacttaactcttttttttcttttaaactcaaagaaattaagtcactgggagtcacctccagtatgatttggctgttatctagttttttgcaaacttgggagtccaaactccccaaatctcaagtctgacttacatttcattgtgactcctataccatatgcctctgggaaaatcacatgttcttatgaaagagatgaaaatatgtattctccggccaggaaacagagactaagataatgaatgaaaaaggaaagcctcagtttggtctcctaattttgcttgctccaagattttaaaaagaatgaaaaataaaatcactgtgctgatatttacttaaagcagagtttggtgagttctatggtagtcttgtggtgtgacaagtatctagccctgcttgggccagcggccagctctgtgccttgcggccgttcatttttcctgttcctggactctgtctgcacctctgcaaagtgggattgttggaccaggtcagttctagactccttccagctctgaaatgtgactcagctctgccccagcgcttcctctttgttagattcggggcagaaacagcaggatctttcatcatcttgggcccctaggtcagagaggacctttcttctgctgtctttttgacagctagagtcacacaagaggttcaggattcaagtggcctgaacgtgatggctgaacttgaggccggagctttagacatgttgaaagtctcctgcctctactcccaggtacccatcgtggtactctttgtttcttgaattgccatcgtcccccttatgtcttaaggtccgagagaggaggggccgtgctttcctcccctgatctgtccctggtgccaagcacaatgctgagcacggattagacactaagttaatgcttcctggatggacgaaggatggatggtggctggatggaaggaagacagtcaggtggatggacaaacgcctccatggctctaaaaccagttcatttttgagatctgacagaatttgtgccaatttagctacagagttcacttgtcctttatattcttattcattgtgagtagaattttcaagggacttctgattgactcgttttttctgtatcctagggtattatctctttaaaaaaagaaagaacaaaaggccagaacagagctgttcacctggatgtgattacgcatccgacagaaatgataggggcctgcagggatatgatacacttgtcactgaccaaagagactcagtcatctggctcagtctctccccagataagtaactttcagatgtgtcctgtggtccttggcaaactgtcaggaaatcaagtgtagagctgattgatgaatttcctttttcctaaacacacacatatacacacacacatacacgcacacacactgtctctcctcaaaccctcaggaaatttggcttcatcctctgagagagtctgtgctgttggaatgcctgcctgtgtcttggcatcacctctgtgctgggacgtgtgtttgccatttacatccttcactcgtgaggaccatgatgaaatgtgaaactggctgggacccagttcccgttcacccaggctgcactgagtaggcgccagctgcgtgcagagcagtcgcctcgcaggagacagggcgtgtgagccctgtggcaaagcccctctctcttttagtcttagagtatgctctgtgatgaacagttacagcttcaaggaaggaaatcacactcaaattcctcataagggttagtgttcccaccctcctcctttctcctgacgctttggaaggaaatcatctagtaccagctccaggctcctggtctgctagaccagttctcggctcctcccggctctgaaatgtggctcagctctgccccagctctttctctttgttagatcctgggcagaaatgtcaaggcctttcatcatcttgggcccccagttcagagagaactccatctattattactagaaccatctactgtatagaacatatattggaatactatacaggaaaaccattttcaaaaccacctataatttcccacctagataactgctgtttatgttttggcgtgtttttctgacagactgcattctcagtgggcccttaaaatgccacagagctgtgcactgtgagcaaagttaaatactgtgaaactgggggcccaggtgctaggggaaggtttcatttttgnnnnnnnnnnnnnnnnnnnnnnnnnnnnnnnnnnnnnnnnnnnnnnnnnnnnnnnnnnnnnnnnnnnnnnnnnnnnnnnnnnnnnnnnnnnnnnnnnnnnnnnnnnnnnnnnnnnnnnnnnnnnnnnnnnnnnnnnnnnnnnnnnnnnnnnnnnnnnnnnnnnnnnnnnnnnnnnnnnnnnnnnnnnnnnnnnnnnnnnnnnnnnnnnnnnnnnnnnnnnnnnnnnnnnnnnnnnnnnnnnnnnnnnnnnnnnnnnnnnnnnnnnnnnnnnnnnnnnnnnnnnnnnnnnnnnnnnnnnnnnnnnnnnnnnnnnncgagccaccgtttctgacgcaggacttcatccacgcctttcagccaaatgccagactgattgtcatgctcagggaccctgtggagaggtgagcagtttctgtgtgttgtatttggggtgagaagaggaacttttgaagaacagtgttcccctctcatgacaaataagattttgtctcctttagaaaaaattaaacaggtcgggtacagtggctcatgcctgtaatcccagcactttgggaggccggggtgggtggatcgcctgaggtcaggagttcaagaccagcctggccaacatggtgaaaccccatctctactaaaaatacaaaaattaccagatgtggtggcacactcctatagtcccagctactcgggaggctgaggcaggagaatcgcttgaatccaggaggtggaggctgcagtgggccaagatggtgcaactgcactccagcctgggtgtcagagtgagactccatctcaaaaaaaaaaaataaataaaataaaaacaaacaaaaataaacggaacttgcaacgttactgctgtttcttacgtaagtgttattcttgaggctgtccccactgagttgacacatgttgcagatggttttcttaaccattctgatcctggtctgtgtgacttcagccccagcaggcctgaccaggggcacaggacggttccttggtactgtcaaggcgagggaaacacccttagaatcaggggtgtaagcttctccacgtggtttaactcctagaattctgtgtctctccacgtggttgatgcctttatccttgtctgcgttgaatgtacagtttccagctttccttgagagaccaaaaggaagaacaatgctgagcagagcagctttgctttaagatcaagggtttcccagtgtgggtgaggccagggtagtgggatattgaacagccactatggggcggcctggctggcactgggcactgcttgcatcatttatgcctgtgtgaatgcagaatctcagggctgccaggacctgaaaattatttggtccagtgctccctccaatacttccacatcagagctaagggggcacctgtctaatccgaggccctctgagtcagggaattctccgcgcaagatggccagtgtagcttaggacagctgtgttcctattttgagaccaggtctgttttggggaaacatccactcattggtcctctttcttctccatagagtcagacagaccaagtctaatccttccaaaacaggagaggctggcgatatttaaagacagggaccacagccctttgtgtcttattttcctttgggccaactacatcttcttatggattgaattgtgccccccaaaaagataagctgaagttgtctcccccagtgtgtatgactgtgaccttatttggaaataggatctttctttgcagatgcactccggttaaaatgaggtcatactggatcagggtagaccctcacccaccctaagacacagggagcatgcctcttgacgaggctggagtgatgctgccaccagccaaggggtgccaaggagtgccggcagccaccagaagccaggagaggagtggaacagattctcccctggcatcccagaggaaccacctctgccccacacctgggtttcagactccagcttccaggacactgagggaagaaagtcctgtcattacgcaccacgagttcgtggtgatttgtcctggcagccccgggaaactgacccctgggaccccttcttcaggtggcataccttcctggccccacgtatttgccaattataacaataaggcgtgtttgttgtggaaattttggaacatatattggaaaactgttttcaaactattaatttctcacctagataactactatttatgttttggtgtattttcttccagacttttctatgcaaataagtgtgtgtgtgtgtgtgtgtgcacatgggtgtgacaggacagtcttatgtcctgcttctttcactttgcattgttgccccccagaaacatgctttaaagtctgctctggtcacacttctgagctgatgtccctcttgtggagtctgcatggctcccgctgctctgagtatgacctggtcagggagaggctggatctgccctccctcagccccagcgctctgagcctgagctcttggtggctgtcccggtgccatgccttctagcaggtgccaggtgtggtttcgctccctgctctctgcatctcccagcccaggacttcttccactctgttctgaggcaggcactgacttgccgtcccttgccatgtcccacctgctggttcccgtgttttggaggcagaaatcggccctgctgagtggtctccctccatccagcagggctgacgcacactagccgagctctcatggtgacataactgtcacctcgagctgacccctcgccgcccccggaggtgtttgcatagctgctctgcctccctccccgacatggcccccagctgaagggcgcaagtgctcggtgtgctcatcaaatgttttcctgtcgctgctgcttagttcctcattctgagaaaggtcagaccacgccttaacctcaggggccgagagtgcacacagcagccttgtgtactgtctgggcacagagaggtgggggcccatctgtcgggactgggtttggtgtgtgtcagccctgctctgggccctgggagactggagctcccagtggggacgtgggcatggctgtggttggttgcagttctgcagagtaggaggtgaggagagtggggctccagagtggggagatccagaaggaactgacctggagaagactgatgccagactgggttttgaaggatgaataagagtttgctgtgtaaacaaggcaggaaggtgggttaagatgaagccttccaggcagagaggaggacaggtgcaaaggaaaacaccacatgttctcctgtttagggtggagccaaggtccctgttaggggttggagccagggtccgtgttaggggatgaaaccatgggccctgttaggggatgaagccagggtccctgttaggggtggaaccagggtccctgttagggggcggagccagggtccctgttaggggatgaagccagggtacctatcaggggtagagccggggtccctgttagggggtggaaccagggtccctgttagggggtagagccagggtccctattaggggtggagccagggtctctgttagggggcggagccagggtccctgttagggagtggagccagggtccctgttaggggtggagccagggtccctgttagtgggtggagccggggtacctatcaggggtagagccagggtccctgttaggggtggagccagggtccctgttaggggatgaagccagggtccctgttagggggtagagccagggtccccgttaggggtggaaccagggtccccgttagggggcggagccggggtccccgttagggggcggagccggggtccctgttagggggcggagccggggtccctgttaggggtggagccggcgtccctgttaggggtggagccggcgtccctgttagggggtggagccggggtacctatcaggggtagagccagggtccctgttagggggtagagccagggtccctattagggggtagagccagggtccctattagggggtagagccaggccagggtccctgttaggggtggagccagggtccctgttaggggatgaagccagggtacctatcaggggtagagccagggtccctgttagggagtagagccagggtcccctgttaaggggtagaaccagggtcccccgtttagggggcggagccggggtccccgtttaggggcggagccggggtccctgttagggggtggagccggcgtccctgttagggggtggagccggggtccctgttagggggtggagccggggtccctgttagggggtagagccggggtccctgttaggggtggagccagggtacctatcaggggtgaagccagggtccctgttagggggtggagccagggtccctgttaggggatgaagccagggtccctgttaggggatgaagccagggtccctgttaggggtggagccagggtccctgagtatgtttctttcttcctggagttctggtcccacctctgaggataccaacaccacaaaggtgagtgctggaacagaagacagcagcaccgtgcaggtgcaagcggctcagcaaggagcaagacctgccaaactcttctctcttaccccagcctgagtctgccagctagaaggaggctcacagttcacagcatggtccccccaagtagtcaccgtgttttcttcttttaataacaaatactctatgtatcctaggaactgaatgtgaaagcttcttgcctccctggtcctcagcctaacagaaatagttggtcaattcaaacacatattcagcccctgccacaggctgggtgctgtgctgggcactgagcatacgtgccctggtgaacaacagtggcgacccagtgcctaccccctggtagctggtgctttatcagagaagtgggcggcggcttcgtcatggctcatgtcctggtgctgaggggaagggcaggatgccagggcagcagcgtgtgttaggacgctgacccaggccttgcattgcctgctgtactaattagtactgctgcggaaaaagtttgccaaaacttagcagcttcaaacagtttctgggggtcaggaacctgggtgcagctttactgggtcctctacttaaggtctctcatgaggctgtgacctagctgtcatcaggctgggggtcgtcaatatgcttgactgcagaaggacctgctcccaagcgcacatggttgtgggcagaattcagcacctcaagagctgttggaatgagggcttcacatctttgctggcttttggcgagaggctaccctccatacctcaccacagggcctctccggtatggctgcaggctttatccaagccagcaagctagagcgtctgctagcagattagaagtcacgattttttctaacctagtcatgagtgtgaaatcccatcgtcattgccatattctgttggttagaagtgagtcatgaggtctagccacactcagtgggaagacactacagggtgtgaataccaagaaccggggatcactgaggaccgtcctaggagtcagccacctcccgttctgcacctgatcctcaggaaactggggcctgggctttgcagccgggagagtagcttccagcttgatcccagctctagtggcagaggaagtgtgtttatgtgcatattttctgtgtaagttactgacatagcagctgtttcatttcttcttaaacatttataaaaataagtaacaataggaatttcttctttttcgaagcccatgacccatggcctgtctgaaatggttggcgcgtttcccatctcagccagaaaggatgataaatactgtgtgtttaggtcactcttgaagaaacaaacactctgagcccaagttccatcagtctaacgggatcctgggccattagccctgttctgtgaccttgcacttctggaagcaggagattttgggggttgctggctgcaagttggattggtccaagttgttcttttccttctataaattggcttggagaggggaaataccacttttatttttagttttaggttcacattcagcctttacttctataattgatccaaagtagagggtttgaaaatgttggaattttaagcaaagtcaaatcacttttaaatttccagagaaggattcaagtggcaagtccatttttttttttttttttctggaggagaacagaggaataatggaaacaagtggatgggatggttcatatggccaaagaagccagccaagaattcatgttccagtttcctctctgtaagagatcatgacaatttaaaactagcttgatgcattcctatgctaaattggcccagttaattaaaaagaagccaccaattgcaagcagaatttttctttatttaatcccattcgtaagtggtaaagactattcttttcaaatgcatctcacattagcctcctgcctcttcatttgtgagacagttgatagtgtttgtctcttaattcagaggcagttatagcccccgttaaatgtgaaaaatgcgtggaaggtgctggcacctccaacctagttgcattcctcctttattcaagggacatttggagtggggtcatgtaccatctgttaaggattttaccgtgtctatgtttggggtttgattctgtgtgtagtcttaatgcaatgcccagaaacaacccaccacaggaatggttcattttcccattctgtgatgatgagtccaaagggaaggagaactcagcttggcgaagaattcaaactcgattttgacccaaacccctggagtcttggaacctggctagttcttttcttcatctgcttatataaactgattttttaaacaacccgttggactggtcaaatgattcagttatgacgataaactaggaaaggaagcaggcttttaatgaaatggattctgttataggcagtcactcatggggacacagaggaatagcagggctgaacatttgggcaggaatcctggtttcatcagtttcactctgtctgcagagtgtgtgagggggcctcagggtggtgcacagctttcacccgctgagtgtctgggaggtgtaccggggtcatggtggcaggaacacaggcattggaaccccagccctgtcacttactgctctgtaaactgggacaagaaacttaacctctctgtgccttattttctcatcggtaaaatgggggaagatagtcctacctccagggtagtgagagttaaatgacttaatatttgtagtaacgtgtttaaacagtgcttgacaaatggaaaatatgtaactattattattattaggtatcagttattactaataataacaataaactgatcactcatttactcactccccagagttgcaaaccacataaccaagttttggtcaacagtggaccccatatatgatggtggccccgtaaagttataatcccgtgttttcattgtgccttttctatgcttcaatacataaattctaactcttatgttacaactgctcacaggattcctgcggtacaggctgacagcataggagcagtaggctgtacctcgccacctaggtgtgtagggggctgtgccatctgggtttctgtgaacactctatgacattcacataatgacatcacctactgatgcatttctcagaacatatatatccctgctgttaagtgacgcctggctgtatttattgaacacccttgatgtgctagatgcaagctgtacataggagaggaaaatccatcccgtttgctctcatggagcctctgtctagttgagggagtagggccaggcttcatgtaaatgactgagctggggcagcccctcagagctatctctgggtgaggcttctcccatccacccatcattggacaggaccacctgtggaggcttaaccttggttgctgctggtggtctcttcagctgaggctcgttcccaggagggactgggctgtgagttattagcaggatggctccccagttttgcaaagctctgtaaataggaaggacccggtatttgtggatgcctaagcctggatgcacctcattcacctacttccacatcagagggagcaggatgcccgccctagggcaaaagccagcacacacagaagggagctgagccggattcatgccttcgaaccgcagcggaactttgacttgagaatctctcttgctattcaggcagcaccggaagcccctctccaaacagctcaacttcccccagcccctagaagcactgattgaaagccctggatgtgttctcaatcagaagagagcctggcactgggaatgtcatgcgatgttttctctagaacagatttgcacaaggattaaaacgcaggctgttcctagcactgagggattcattattgatttaaaccatctcaaagggaaattaggagaacgcctctgtggagaagagacggaatgaggagaaagccgtggggatgtagaggttgcagcaatagccacggatcgatttctctttctcacctctccctccagctctcactctttcctttcctctaagattttggaagattaagaattacaggggtccttgtgaggactactgtagtgcggtgtctttattgaagctgcctattgattcctggtgggttcaggcattttgcttcccagaagctgcctgttgacacaccttgatatgggccctggaagcggcacgaggtcactttaataggactgagctgttgagccacctgaggtcaagggggttggcctcgatcacagagcggggagggagagctggcagcgcccaggccagaaggacagctcgggtctttgtgaaggggttctctgaagactgttcaggagggactgcctggtgaggcgccacatcttgttattggtgggagaaaaaccaccaagctgaaaactcccaagtgttgaacactgtttatgttttggggaaatgtttgtgaagtccttggcagtcctgtgtattcccacatgattgtttggaaaggacggttccgagcaggaggaacactatagggaaaaagagctccgttgtgtctgtatctgcagagatcctaaggtgagatgtgtgcccgctgggctgggatcagggagggcacttagaaacgaccctggggcagccacagttcagggacctgtctcacccggagttctgggctgcttagtgaggttgacgctgttgaaggagggggtggcagcacatgtcacatactggccccgccccggtgtgcagtggccattgccctgcagtgaggggcccacaccctgcgcctggctttataaccaggggtagcccgccaatcctcagtgcaccccagttttcttgcttgtagaaacatctgccatgagagtcactggtgaatcacgagaaggtgctttgtaaaccacgccaggctcggagatgtcagggatgcttggtgtcgcctctgagaagtgctgcctcccagtctgtgaacagttaccggggccctgtgattggatgctctggaaggaacaaagaggggctgggaaccccactcgtgcacaaggaacctagggcctggtaggaaatagaatggccccaacaaacagggcacctgccattcatttgggcgtttttaggaccaaacatggatgtttgtaactggcagaaaatgagcctcaccagtgtcacccctgtgttcagtctaaggtgaccttggacattccctccagatcagctggcctggccagtcctgtctcatccagcctcctgatgagacagtcacagtttgtgattcagtggaacaaaagggctccgtctcagctacattaaatggcctttttttcctggtaggaaaaaaatatataatcattattgatggcaccatatcacaggctgggaattattgatcagtgatttaaattcggatgccagcaaatggagaataacaaggccaggtgccctggctccctctcattacaaccctcacgtggccacagcactgcaagatgttgttgagggtgaattggaggacatgagtgtgtccccatctcgggtcctcctgcctgaggaaatggggccgttccggtaactgtcattgaggagccagctggggggttggggggtgtttgaggagcacggggaggtggggccagcgtcaccggggtgagccagcccagggatggtcacctgctcccagccgcctgcaacttcagcaccagcttgggatcttttctcaaaggtggccctctgagaagtcccatacgtggagcagtaactggaggacatgtcagagctcaaggccaccaagcgcctgcccttgtctgagctgaagctgagattgaagcttgtgcgtttgggtgccttttgagctgggtgatctcagtgacttctgacatgagtccctgtgggaactgctgtgttagaaccagcagtcgctcatcagggttatgaaaacatcttgggactggggagtggtggtgttcacacagctgtgtggtgtatactaaaaactggcgaattgttcacattaaatgggtggatgctacggtacgtggatcatttctcaatataaaaacgatatgaacaaaaatacaaaaggaggaggaacccactatggagagaggttttcccaaactagtggccttggagccaggtcctgcagagttctccacatagaggccaggccgatgaacaaccacatcatcacttaggaacaggaaccgtcaaactctaatgagctattgcgatcaccaaggaatattagcttttccaagagatacaagatcccgcagtgtgttccggcttcatgatagatgcctgaattcccttttgctgttgctgtcacttttctagatgccggatgtgatgttccgtaaacacatttgctgttcccgaccgtggcattggagttcctcacgtttatcctaagtgtttatttgccactctattacatttgtaattgtttatcagtctcctgtgacttattaagtagttctggagaagaattgactttctcttccaaatcactgtgcacctaaaataataaaaacacctaaacaaacaaaacccgaaaactatcagtgcagacggccagcacccactctagtcagccgtggattcgtctccttgcctaagctcggagggcaggggccacatccagctgggtgaggcgctttggggtcaggcaggcctgggtttgtttgggtcccagccctgccctggagcttcctgggctgcgtgaccatgggcaaactccttaacctctctagtgtcagccttctcccccagtaaaatggggtggcccacatctcattatggggttgtgaagatagacgcagagcatgcatgcagcaccctgtacagggcatggtggtggtggccctccctaccccccagcatccacatcaggagtggaaactgagaacattgcaggtactaaacccggaaagcaatcacacagagccctggcgggaggagcagcagcagctcctgctttaatagtgatcaactcaccaacctctgctcgctggctcagaacagcacgctgtaagtgtccctgaatgaatccagcagtggtcttggctgtaagtgtccctgaatgaatccagcagtggtcttggctgtaatcatccagattttacatagtagggccttgccactgctggcctctcctttgtcccttggggagagacatggtcactttcagaggcactggattgatggagccctatgccccctaacatacatttcccatcccaccgctcctccaggggtcccaggacccctgcactgcacaggaaaggggctgagcagtaccccatgagcacgggcccagtgtgaggggccgcgccgacagccttctaaaataaccgcagcacagaaggcctggaatgcatttggacttatatttggaattgtcgttggaaacagtcctggccaaatgtaatacccatctgttcgggatggtttgagagtaagaaaatgaggtggctcagctggagggggctgggcagccctgaaactcagggctgggagggtatgatgtcccctggcccccacgctatcctggagccctccttccctccagcctaggctgctcctgccttctaggaccatcccctcgtgttagcctgccctgactggaggtatttccccttgcctgcaaccaggctttcttcccgaaccttctgcccgctggtcagtccttcaggagttcgggactgggctccttcctgctgagtttttgcatctccagggagagcagccaggtttggtgcccagcactgaaagcaagcatccgctgaggccgtgagctgcctgtcgcctggctccaccctcccacattcctcatgccgtgcccctgttaatgcatcctggggttgcatccgtgcccctgcagttctgtgatgattgatcgtgagctgtgtgttttccattacattggtctccttcccccacttcctcatgggatagtggattttgaagactaaaaggtagacatttcagtttgtttctgtacgtttcatcttgttccacagtgtgcctgtctggccttttgacgtccagtggatacttgttcttgatatgtttgctgttctcagcattttctgagtggctttaacctatccgagtggctttcccccacccaagattattaactcactcttttcccctggagagtagtcaagggggaaatgatagctttgttacttgaagacaatcttaggaagcattcgcttaattcttggggagaacccaaagagtgctcccccgtctcagtgctcccctgtctgagtgctcccctgaagggaagtgctcctgtccgcatttgccttccttcatgcttccttctgggaaatgtggccacatgaccccagtcctcccctaccctcagggccactgttccagggtctcagggtggcagagaagtattggcaaaaataactccttggagtaattggtcttccttagaattggggtttaaaatctgtctggtttcctagggcagtcataataaatcaccacaaacttggcttcttaaaacaacagaaatgtagtctcttatgattctggaggccagaagtcctaaatcaagatgtctgcagggttggttccctctggtggccctaagggataaaagccgtcccctgctcccagctcttggtggcctccagcagtccttggcgttccttggctcatagacgccgcactccaggctctgtctccgtctttctgtggtgctgtctgtcctctcctctttttataaggacacctgccattggatttgggaccaccgtaaatccaggaggatctcgtcttaagatcctacacttaatgacatctgcaaagaccctatttccaagaaaggtcacattcacaggggctgggcttcagacttggacataattctttggtgtccactatccatccaactacggaatccagatggtggccatggcttgtggtgaatctagtccctgttcagatgtctgtgacacagcaggatgccagggacccagcatagtttctcgcagtggggttcgaggggctcccaaagcccactgccagttctctgagcagatccaaagtacccagaggtgactgagaggccaaaggagtctcttttcatccagccgaggaaggagcgtggcctggctctcaaaggctgtacatgtgactcacaggaagtaaggtagtgagttcactttaacccacctcaaacagatgaaaatcagccgtttcacctgctaggggtgggcttgcctggttggaacagtaggtatgtcccagtttttcctagggattacttcttgatctctgaagaattgtatggaatcagcagattcctcatgaagtgactttgtatttaaaatcaagacaagcttaggtgcttttgttttatttatgagccaaatatctgcaagaaatgttattaccacaaagaaaattctcagtatggaaaccttcagccagtgtttgggtttgtgtgaggtaatttatgtgatggaattccagttccaccaaacaatttgggtagttctgtgggcatctttggtaaaaactgggcttcgaatacttatttaacgtgggattttatgacagtttcagaagcatctgttacttttcattgacgtagtttcttgggctgagccataatattgacaggactcataggaaatgtgtgagccaggaagggtacccctcagaccaattgccacctggcacccctcagtgcacacagccaaaccttgcttgaaggttcacgcgtgtctgattttggcacttattgaccagccatttaggtcatagtaaccatgagcgaccctatggcgacagatgccgtgtttcagttttgatgtgtcttctaattctgaagaaggaaaatagcacaggtgatgttggggacaccagtaataagctgatgtggtgttgtcttggggaatattctcaggcgagtgtggatctggggaaatctactcagtggccaccgagcccctttgctgactgtctctttggacagtttggctggccaggctgtggtagatggaacactcctgttccggtgggtgttttgattctaggaactctgtgggtagatctcaaactgctcaagacttccaagaggtgtcctctgtggacattggccgtggatgaattctagagggctgtgtcagaggcacccgatgtgccaaggtgggctacggaggtggatagcttctgggcctgtccctaagaaatgctgctcctcatatcatgacctcaattagaggggagggcagtggagaaggcgcatttgcaacagaccctgctataagggagcacagtttttgcagggtagtatgtggctgaaggtctgggagcgtttggaagtatggatggcggctgggcgtggtggctcacgcccgtaatcccagcactttgggaggctgaggtgggtggatcacctgaggtctggagttcgagaccagcctggccaacacagtgaaaccctgtccctactaaaaatacaaaaaatcagctgggtgtgatggcaggcgcctataattccagctactcaggaggctgaagcaggagaattgcttgaacccgggaggcggaggttgcagtgagccgagattgcgccattccactccaacctgggcaacaaaagcgaaactccgcttcaaaaaaaaaaaaaacgaagacggaaatatggatgtcagatacctggatgcatgggtgcagaatgagagtcacagaattgccttccctggaaagaggggaagccaggttggagaagttgaaggaatagaaagtatagagctttgaggagagagaagtgtgaccctgtggagccacgtaggccatgtttttcataagcccagtttcacccttggcccagagatgcaggtgtgtgtgcaagaagagagtgggacatatggcaggaaggttgaaaacagacaaaaagggctgcaaggagagagagaggagaaaaaagagtaggaaactcacaccctgaatgttctgttgaagataaaaacacctctttttttttttttttgagagaggttctcactcccattgcccaggctggagtgcaatggcatgatcacggctcactgcagcctcaacttcctgggctcaggtcattctcccacctcagtctccagaatagctggactacaggcacgcaccaccacgcctggctaattttttgtatttttagtagagacaaggtttcactatgttgcctgggctggacttgaactcctaggttcaagtgatcctcccacctcggcctcctaaagtgctgggattacaggcatgagccactgtgcctggccctgacatttattaaaatggcaatgcaggccttcttcaggaccattgtggtaggtatagggactgccatgacagtttttcagtagaggagagagactccgaatacaactaggaaaagtagggattttaaagccgaggcaggtggatcagttgaggcaggagttcaggaccagcctggccaacatggtgaaaccccatctctacgaaaaatacaaaaaaattagccaggtttggtgggcaggcgcctgtagtcccaactactcgggaggctgaagcaggagaatcgcttgaacccaggaggcggacgttgcagtgagctgagatcacgccactgtactccagcctgggggacagagtgaaactctgtctcaaaaaaaaaaaaaaaaaaaaaaagaaatgccaaggagcagggcgagggggttggtggctagaaaattactaaggggaaacatcaagggggaaggggtggggattctggctaaaccaacccgatgggattcttgctggagacaggccaggtggccaggcatctcctgggggtggtggactaggaacctgatcagataagaagggtggtcagttaaccaagggtgggggattctggctaaaccagcatagcagtgtcaacaaacaatattttgacaaatttagtttagagatctcactggtgtttattagcacggtccatgaacagggcagcatcccattcctgtaatacgaaggtgctcctgtgggcccagccaggttctggctttataggcagaaacgggctgaagaagcaaaaacaggcaacggagagtggattgttcatttcagagtgactttccttctagggttaaagcaaaggggacgtctgactggttgctgtgtatcccctggttttttggaaactggcccattccgagttcagttcaattacgtggcacctagcacagatgactctgttctggcctgtgggggcctattgcagaagctcagtccagaacagtagcctctcatacattttatttaacagcaggattcttgctaaaatagggtggtgcagagatggacctggaggtaaaaaagttaaggtctagttgggaggaggatacagaggagcctgaagtgggtcaaggaagacgatcagttcccgtgcggcagcattctgccatacgtgtgtgtggtgtctaggaacagatctgtgtccacgggtaaacgtgtaagtctgcaggtattcctgtgcatatgtgggggtgcttttacatcgtgttaaaaacaaggtccctaccaacctagaaagatacatctcatcatttttttttcaatgtcaggaatgcgtatgcaaagtagtgggaatttcatgcggaattgtaatattgtgagagcaacagatgctcttatttttgttcccttcagtagaggagagaggaatgagaaggtgcataaaattttcatggcttctctttgctagtgtaccatttttgtaatctggtattgtttgaagctccctgttactgtgaaaacagaggctgcctgagatgatagaacaagcaacaccataaaagcggctggtggtttgtgtggggccagtatagacatgtctgggtctggaagagcttaggtggccacgagaagggcgggagctcggagggatgagggaggtggctcatctgcaagggaaagaagaagggtggttgtgcttcaatcaggaaaactagataatgtaattgtacactgattttcattgtcgcccaaatggtgtgattgcatgttcatgggtagtaaaaatatgcatttattttattcacaggttgtactcagactatctctactttgcaagttcgaataaatccgcggacgacttccatgagaaagtgacagaagcactgcagctgtttgaaaattgcatgcttgattattcactgcgcgcctgcgtctacaacaacaccctcaacaacgccatgcctgtgtgtacccccccccccgtaccccccgagctggcccctggcagaaggagctggtttgttgttattatgcaagcggcattgtgggtttgcgtttcagcataggaacagagagaagcgttttaatgtgcaaatgctgttccccattattcatggatgtaaaagctgaaaactgatgggctcttggtctggctcctgccttcctccctgctggtcacctgccacctccccctcctccctcagcaggaggatgagggtgcctttaggaagattaccatttagcaagacacccagcaattagaatcggcagacacgaggacacccaactctcaaattgtcttaagagcattctcttgagcggtggattgttttgttggtttaaaaaactacccatcaatgattttcaatgcttctttgacagagtctcaattgaaaaacattttctgttgattcctcaatcgtatctcttgttcttccttcagaactatgtctgtaaatttctagcctttttgaatgcaaaaagctgttattggtgaattcagcaccttttagccccgggatagttttccatgctgggctccctgggctggctgtgtacttcaacagcagggcttatgcagcgagcattgccgctgcgtgttccagagtggctttacaagccttgctctgctcagcgtctcgcatagcaaggcaccaacaggcctgctgtggagtcttggaagcccccaggtggtgggacttcaggccaagaggctctgccccctctttcttactacagaggccgtgggatctgggaggcagcatgcaggggcagcaggtgggattccaggctgccctgttggactttgtagtttggcaaggaagatgccacagggacacaggtaaccccagagcctgctctggtgccaggtaggaggagtacactttggaaccagccattggtgtgggtcaggtttccagcttggccatttgctggctctgtgactctaggcagttgtctcagcctttctgagactcagttgctttgtcatacaatggggtaataatgctgctgtaccaggctgttgtgatgggtctgtcttgcattcctgcgttcattcttgccactatgtcccctgcatgacgctgggtcctggggccacagcaatgccaggacaggtgtggtccttgccttcctgtgcagctggcggggagagaagatggaggctgggcagggagctctggccaccagagaaccacctgagaacggggcttcaggcaggttcttaggagagggaatgtctgtgctgaggcctgaaggagagttggccagggaactgagagcagcgtgtgcagaggcccagtggtcagcaccacctaccatacagaacgcagccagccgcctggtgtgggagatggggggcactgaggcagggggcttgggtgcgtggcacatggggccgcaccacctggtctagcctcagaagaagtctagacatcaccctgagagagatgggacccctcagagggttttaagcagaagatagtgtaggagtggaaaaggaatatctcactactgtgttcatggctgaggcacctataataaaagactaacgcgagaaagcacacatacttgtttaacgtaaatttcatgtaacccgggagggagccttcataaggaaacggagacccggagaaacgggaaacctgtgcgtgtttgtgcttgggtttgatgaagagagcagtcggggagagggccatgattgtcaaagggggaatgactcaatggctctgtggccaccgtcacaggggacacagggtctcggagaaactctatttgtgtgtggcttgaccagcacagcttgtcgacccggcttcgtgacccagaaccactctcagctgtgactcttggccctggacccctacggagtgagtctgagagagcaggcagggcagcccacccggtcctcaaggcagctccctgagggcggtctcagggctggggctggcaggaggaaaggggcgctggcatgacgcctcaaggtggggttgtggtttcttccagcactgatcatgatgctgagcagagaggggtgcccagtgtgctgacagacacgaatcaagttgcagctgtgactcaggccaggcccatttcgtgccacatctacactttcctggtgcaggtggctcttccatcctgcaggcctcgcatggaggaccttcagtcctggcataaacagtaatagcagcagctcagagccagggctattatgggtcaaatgccgaggttggcacacaaatcggggaacgtgctcgcggactgggtttccccatcatcctaccatgcctgattcaatccacccacgagtccttttccctctttttcccagtatttctagagagctccactgttctaccctctgctattgccctgattcagccactggccctttcattgtaacctccacctgcacagcttccctctctctgggagacagcccctccccagaccccttctcaccttgatccgttgcaccaggcatctttctaagatgctgaactgccatcactattgatggggttcaaggcacactgcccccaaatataacagcttggcatttgagaaaacagcagaagcagaaaggccattcttgcctccctgtcccctcctcctctgaagctggccataaaatgctcagagcagaggtgccctccctgtacatcctaatctctgaagatccgggggcacagaggcgaatctgaacagacaggcctggctgtgtctcccccagtgcatgaccatgagataatttccctttacagggattcgtggctccgagctcacttctttggctggcactcatgctctcacttaatcagccagtatttataaatgcaaagcaaagagagggaaattccccagcattattaaatgatataattggaatcctaaacaactgtaattacaaacaaaatgtgtgacatcgtcaggagactgtctccaggtgaatttaaagcatggctgggggatttgcctactttagtgtgggaagcaagggtgcacctttgtcccctgagggtcagggggtgcaggacccctccaggaatgaatcttgagggaaaagtccaaggaaaatccaagaggaaccaaataggagtgttgtcccatctttgataggggcctcctttcagggaaggaagagcttggtgcacggccttcaaggcttgtctgaggccagcaccctgactgagggagggatgaggaggaggaaggcattggtggttcccggccccagccggccaggtgacccagtttgcctggctcccttctctgcccaagtgcctcctggtagacaagagccaccaggtggagcctgccgaggaggctgtgtgtgctggtcagagtacggatgggaagtgatggattcagccagtgtagactcagcaccaacctggcactacaccttaacacaggccctcccatgcctggggcttactactgggaaaactgaggctcagggaggcagccttcctctggagtcacagccagtaagcagaggatctaggacccaaatctaggccttttaacccagcttcccctagatgtgtgtttggcttcaacatttccccaaccatctgatcttcagtggttgctactctgcacccacagcgtggcaggccctggtccaagagagaaggtgcaggacggtgctgtgaccagttgtgtgcttggaatgaggcctgtgtctccacctgggcgtttctaccacattgtgccttttgaaactttctcctcttggtgatcctgcgtgactctcaaaacaaacccgataggtgggtgggaagacaggagtcagtcattgtcactgtcagcagatgaggacagtgaggggcaaggtatccggctaatgtggtcgtagaaggtgccagagccctcccctgcaggccctgggaccactgagttctctctgcaggaggctgcctgaaaaggactgggaaaagtggggcaggtgtgggctttgcactggggactcctaggaggaagtggcttaagctgggctgggtttagatggacagggagaggcagggcaggggggaactcctgacccaaggcacagtttattttaatagctttaaatagtgtttcttgctgcagaagagctaatatctaatatgcacgtacagtctgcttgctaccgggcactttgtaccatgcagagtgtgccgactcccatccagcgccctgggggcaagcccttggatagtttctcccacacagaagggagggtgtgcccctgccctcctgctgcgggtcagcactccgactgtgaactggagagcacagctgaaactgagccataagttcatgggcaccatcgtgatcctccctgtgttgtgtatgcttgagtcttcgtgataaaaggtttctaaaactccatctgtgagaggtgaaagggatctaacctttgttcattactgccagcccctgtcccaagccctttcaatgcatcgtctcattagagatcccctgaaatccatccctgttttacaggtgggaagactgaggctcacagaggttagttctcccatccatagctggtatcaggcaggctcaaggttcaatcctgggtctgctggcgtttgacactcagggagtttttgccttccctagctggctcctaaaagcaaagggttttgctggcaggaggcctgggcttttatgctcaattttgcgttttgctgaggatgacaagacagtagcttagcaggtgcctctgctcagaggagatccccaggggcaggctcagtggacaggaggggtgcagcagtaacagattgtcccttaatcttcagtccctggagaactcacacaccagagaaagagccaggcaatcagaaaccctccttatagaggtgaattttcatttctgggaggagaagccggtttccctccagatgtgaatcccagccctgccacagccctgggagggcagctttgtaaggcaccctgggccccggcacaccctgctggagtcattcaccgccttcctgtggcacccggatgcaggggcagcacagacccctctgcctctggccagcccccgccactgttccgcagcacaccctaccctgaggggtgctcagaggggccagtgagcctgcctcagagcagggtcccgagaagcctggtgcctggatgagcagcagccacagcccctgggaacttgtcagaaatgcaaacgctctgccagtcccagacctcctgaatcagaaactctgggtacggggccatggtgtgtttctcaggccctccaggtgggtgtttgtggggtccggttggagagccaccagggctcgtcaccactccctccttcgtgccctctggggtcggggagacttgctccagggcttgctttactctgactgtcttctctctccacccactccttttctccattgcatgcatcacaaggtgatcgcggaagtctgtttctttaccagttgagctctgtctccatgagattgcagcctccctgaggccagggccacttctgttagcagcaaatcaccattgcctagcagggtgcctggcacatggtggcacgagctcagcttatttgccaaatgaatgaatggggactagtggggaggctggctggggactcccaactgaaatccctagtaggggacggagaggctcggcctggtacctgtctggggagaagtggggactgggactgtgctcagctcagccttggctctcggtggggattgcttttccctggggccctgcatgggggacaagctccacaagcacaggtgacctggcttcaggtcctggctccaagggtattggccactgaccctgagtagccccccccgccctgccctgcacctccatgtttctattggtgaatcagctggcacggttaacttcaaaggcttcttgcagctctgatgttttctaattttaagcacattggacacttgccctaaatacgctttttatttttgttctattttgattctctgtcctataccgggaaaaggtgaggggaaaaaaaatctgctgggggctgtctttgtcctgtcttcatggtgcatatggttgcagtagtgatactgcctgcaccagaaactgtcacttcaggtgaccacactccccctgcttggcaagggggctgggggttggggtgggaattgaggggcgtttggagcagatagatcagagggaaggcacaaagcgggaggggagctagccccgggagaagcagccgagcgccaggaggcctttgccgcctgcagcccctgcggtttcctcttttcctccgcttcctggctcagccctgcctgctgaggaggaccatgctgcggtgcaggcctgtgtccacctgagacagcacagggggctctcatgaggatggacacaaacaaggtttcagagaactatctgtcaggtgcaggtgcccagccaggtgctcggacagactacagctgctctaaaacaccccagcctgccacaaacacctggctgctttccttctggaaagttctcctgttgaaaggcacgtcctctggaaaagaaaaacctcatcagactggtctcccctacgagggacggcctacaagcctgccagggagacaactgaaaagccccgggaggcgggtgacttaacagcgagttggtactcgtcatgattcgtactgcgttggaggcgacaacgcatgtttatttctgagaccggcacgttctcattttctctttagtttcggcccagcttgaggtcttttttctgagctggcatgtgaggtagcaacagtgtgggttggaaacagctaatgaattttgaaggcaacttatccactctaattgcttttcttcctctccatcctcctccatggttagaaaaataatgaaatgggaaaagaatagttagcatctgtacatattttgcccaatctttcattgtcttattattagcactgtattcagcagttgcacccgagaaccatgttgagggccagagtgcaggctttgcaaggagggaatggtggagaagccacagtccctgccctcaaggtcaaggtccaggtcaagttgggcaggaaaggaaatgtgacatgagagtgtctgcctaaaaaatgggaactccagggaggagcctggggagccaggaagtgctgcatgtatgagaggatgagctggaagtttaagccaggcccaggactttctacacatagaaagccatggaggctttaagcagggctggctgtggccagatcactgctttggaaagcccatgctggtggcagggtgcatatgagagtgcagagaccaggggaaggaggactagccaggaggctgtatcagcttcaggcaggtgtagatggggcataaacaaagggagtggtgtgaactggggagaggtgggagatgagaagttctgggcagacacagataggcagagcagggtccctgggcacttggagaagaggcaaggggagaagccctggagaagggggcctcacagcaaaaggggatgaggctgtttttttctggaagctttgctaagagtttagggtgaactgtggagttagaggaaactgttcctaagactgctctcacttctgacaccagttgcaagttcaggagagatattctccaacccaccttcaggtttagtaattttccagaaggattctcagaacacactggaggctattacactattggttatgatttattacagggaaaggatgaagattaaaatcagccaagggagaggaagtgcagggggcagactccaggaggggcccaaatgcggagctctgagtcctcctctccctgtggagtcatggacggtgttagtgccactggccatggtatgtggcaatcctcgtggagtattgccaggccaagccttgggggtccaggccttttactagggttccgtcacatgcagatgctgtggctgacctttagtctccagtcctaccagagtcagaactgataccatgtggcccaaggccccatcatcaatctcagtgttagcctgcctatgaccaaagccctcaggccaaccaagacacttctgtcaggcaggacatccaggggcccagacatcacccccaggagccgagggaaaggcccgagttctctctgagtagagttaaatcttcaccacacggcttgcagtaaggcacgagagaaggaacagaagggtgaagacccgggaaatgggtactggaaagtagaaaggacttaaatagaaacatcctcctgtgtacttggttcagtaatgattagatgctgaattacacacaccctcacagtcaaggatgttcctctggcatcaggcatttggctcttcactcatgtaggttgtctttggggtgtctgtggttgatttttcacatcccgttgtgtgctgggcatagaggtcacactgggaacagagaaacagccaggatattgtgcgaggaacatgtacaccattggtggccacaaccttgacctcttccctgcacttcagtccttacctgtgaaatggaggcatggcgctacccacagggtgttgtgaggatgaaatgcaacccctaatataggaattctttgcacatgtagcacaaaaccccccataaagaagcaagaacaccttgtgttaaaatccagcttctgaaagtaactttgctaggataactcttttgtggtacagtgaaatgccataccactttggaaaagtgccctatggtgttggggcaactgctcctgaaataatgcccttcttctgtggtcctaggtgaggctccaggttgggctctatgctgtgtaccttctggactggctcagcgtttttgacaagcaacagtttctcattcttcgcctggaagatcatgcatccaacgtcaagtacaccatgcacaaggtcttccagtttctgaacctaggtatgagtgtggtgcttagactgacgggccaaagcatgagctccgtggacttgttctgggagtcctctggggcaaatgcagacctggtcagctgggtgggaatgggctgagctgggaggcctggggatgtccttcaggaggcctgttaagtaccatttattgagcactagctgtacataggtcattgtgcacagtatggtgagggattctctggagagaaggagatggtttcccttctgggagcttatggtctagtgaagggagaggaggaagccatagctcacctaactgaatgacaggtaggatgccgtggggaaggtcagcactgtcatgtaaggtatgtgctgatggtttgggatcccagctactgcacggatgaggaaggcttcatggaaggaaagggcctgagagctgagctttgtaggaccaacaggatgtcaccggggggctggagcagaggacttggggcttagaggagggaacagacagatcattgcatcatctccggtattcttggaaattccaggagtcagagccgtgtggctgagttttggctgctgatcatggatgctgggcccctggggcatgagcgcctgccctcagcctgtggataccagcccccccaggggcctgagagtcactttgtggtgacaggccacactgctgactatggtgatggctggcagaggcatgtgctggcggagcgagtgctgcccatgtggacggggcaccaagggatggcttgaaaggctgagcaggctcgaacaagccgccctccttcccagaacgcctcctgcagccctgactaatggtcttgcccgggaacttggttaattgagtatttctgaaaatatatctgcctgccactgggacttgggcctctttgatcatttgattttgtttctcctttttttggagtttgatgagttctttcccttccaaggcttagaatcatctttctttgatttgaccacatgttgactctgtcccattaatgagcttgtcttttgtccccaagatggatagtaaggccaattctgtgtttcatatggccctaggatgctgggacatgctttttctgtctatgggctaaggactttggccagatcccaagagcccccggtaaagaggcttgagcagtgatgggttacaccaagaagctgtggcccagagggcggggcgttggggtcgcagcccttgctgttctgtttcagggcctctcactccagagggcggggcgtgtgcgtgactgacagcccctcccggccttttccagggcctctcctcactccagagggcggggcgtggcggtgactgacaacctctgccagcctgttccagggcctcgcctcactccagagggcggggcgtgggggtgactgacagcccttgccggcaggcctcttctccctgatctccttgctgcagatggaggttcagccagtgggggctctgggcacaagtggcctcctcccagccctcctccctatggccacttcacagcaagacgcacagggtgaaactgtgcaggcccagggaccttggcatgagcagcctgaagtagaaacgatgatggcggaattccagagggctgctgagcaggaaaaccgaaacccgtgggctgtgctcggcaggccgcacgttcctccaaggacgggctgacacccatggagagcagcccaccaagggcaattggaagggaatccttgaggtcagccttagacgctgtatcatcattaaatgccagctgggctcccccgagggtgggcatcctgcacccgccgcagaatttcttcgcaatttcctgatggtgtttccaccttcctccctcagtgcttccaaaatggatccagccaaagaattttaatccctaaatatgttctcttaaaggaaactcctgtctgaatacgaagcatagctgggatttttgcaaagtcccttttacttcctgccatgcctcctgccttacgggactcgtcttcttttattctagggcccttaagtgagaagcaggaggctttgatgaccaagagccccgcatccaatgcacggcgtcccgaggaccggaacctggggcccatgtggcccatcacacagaagattctgcgggatttctacaggcccttcaacgctaggctggcgcaggtcctcgcggatgaggcgtttgcgtggaagacgacgtgagagctgaattgttgctgcacgtgctgggcccgccaatgccgtcatcatcaggattttacaaatctctttgcggggaactgtttcactcatggtatggaaaaccccaggactctgccactctaggcacacatgaattataaccattttggaatttccttcgtgatgttcgagagctcagcaatggacccctcacagagctcctctatccgaggccattggagaccccagtttctcaagaattcagctctgctctgagcgtcctggagcttggggatgcagccagctggcctgcactgggtgtggagagaacacctagggaaggcagcctggccctgcccgcctccgccttctggagagcctctgggttctgagtcagcaagccagaggtcatgccacaggcctggctggaacttacacttcacgttccctttttttccccctagagatggggtctcgccgtgttgcacagactgtctgtattcaatggctatcttcacaggtgtgatcataccacattcacttctgaaacactcttgttgcgatcgctaacctcactgggacagagaaccgcagtctttcgagaatggaggctcttcattttttttttctcctttactccaaactcagccctccagtttcttcagatgtaaaccctgttaacgtcactgtttccaaaaggaaaaaaataagtcagtttttggcagcaccttcatctttctgacctcctcctattctgtccttgtggacttatgtttaacatagaaaatgaatgcgtttaaaacaaaaccactttctgcatttaaccagtcctggctctctctctgctgcctcttcatacgttttctcaagaacttcagtttataattggaagagaaatttttgctgttaatgccagaatgagcaacctcaaggaattgaacacttcatggaaaatctaggtaattcaagccctcatcaggtttacaagatcatcagagaaacagaggattttaatttttagttctggccggctacaggctccatttctctgccttcccattggaaatagtttatttccacattctccactgcgtgtggtcaaagttcctcacccagcaagggactatagatactcgtgtcccaattccaaaacacaatgcacaagctgaacttgggctgaacgtggcgtgttgagatttggaatgaggtttctaagagccgtgttcttcatggaattttccaggccacttggcagcttggtttaccgatggatgggctagagatcttgtcgtttcttggaagtcacagggaagattgaagagaacgcttgagcatccttggcaacagcccaggtgggacctggatgaagctttgcactcaagtattgtcaagggaagcttcctgtgaaccaaagttctcaggccaaggtctcgcccaccaaagccagaaagtgcaagcacccgtctacccagctctaacttgtatgtgtgagacagaccaggcttcgggggtaggaggatctgcagttgttcagccgtctttctgctggtgttgtctttctgccatcagagaagggacacacagcccgttcgaaggtgtgcagagggctctgagcgccaggatggccagggctgtttttgctactgaaggagcgtgtgtcctgaactcccacttgcagggacagtccccaccttctctatagccggcactgggagcagccgccagcagggaaatctggcctgagcacaaggatgctttagggagagatcacttcagtgtgtgtgtatatttatttgcagtacagtgcgcgcgtgtgtgtgtgtgtacgcgcacgtgtgggtgagtgcgtcttctgagtgggttctgttcagttgctaatgaggctcctccgctctggacacaacccttttatagattaatttctctgccaattaacttgtcattttcagtacatattttactattccacaccaaccataattacaacaagggatttttcttatgcactcctatgcatgtgaataacatgtggtgtaattctgcttcttacagaagtattactgaaggtattatttccaatattatttggtttattatgcggatcttttttatatatgcagtcccatcccttctgtgccactcaatgccatccagacatggtttttccctccaggggcctttctccagagggcacttcggctgcctctgcttcctctcattcgaggcccggctcttgctgacagaataggttccgttctgggcggtggttctcgagcctgccattcaaaaccaaagcaaattggagcatttctcacaacatggtattgaagttcctttttgttctcaaaagttgtgaccgtgttaaattgtactcccttagtcctgtaaggtatgttaagtgaatcgcagttacgctgtacttttattaatatttaacataattaaagatggacccataagagtgacgcctgtggagcgcgtgctcttcctctgcagccaagctcttcctggtgcatgagtgaatcgcagtggtttagtgtcgcacctgctcgagttgtgcaggctctgtgtaaagaggagttacagctgtgctggctgctgagagacgaggtgtgattgtgcgagcaacaggcagaagaaaactcaagaccagagagaaaaggattcagatgttagcagggactccctgtgcgagtcctgttggggtgtgagtcagggtgggaggtctggcccagccacagtcaggcctagcgttgtcttcagaccttcaaatttgaaggttaagtgaccacaggcctcattccggtggcctgcctggcccctggcagctgtgagtttgagacccctggtgtctctggcacatgtccttattgctgagggcaagcccgcagaaggaggtgtggtgtgcactcaggtggggcagccaggacaaaagaccacaaacaacggaaactgattttctcagtctggaggccagagacccgagatcaaggtgctgcagggctggtttctctgggggtctctgtccttggcttgctgatggctgattctctctgtgtgttcatgtggccacacacacacacccctgctgcctcttcctctccttataaggacaccagtcggagtggatgaaggcgtgctctgacagcctcatcttaacctcatcatctctttaaacaactttatctgcaaatgcagtgacattctgaggtactcgagattgggacttcaacatacgaatttggggcacacttttcagcccatacagaggggacatctcaggcttagggctctgaaagctgggccatcctgagcacagcgtggaccatggtgggtcccccagttctgggcagaccttcctgggggagccttctccccagcaccacctcccacagtggtgtgttgaggtagggggcaggtgtgtccaggctggaaatagggaagaccccatcttttcctgcgagggtcaggaatggctttacccagcagggaatggaggacgggtgggagtcaggagcaggacggctggggtgcatctttgagggctgagggtatgacctccctccatttcagatttcctctgaaagcctctcccgtgaggccacccactccccaccgagaaaccagccctcgggaaggatcctgatgaggagtatgcctcttccccacaaaatgaccctatttgggaactgaagcaaaggctgtgctccgggtggaggaactccaaggatccctgagtgtggagacagggattatgtgggtgactattttcctgttactccagaaatctcaccctccaggcagctgtgctgcctatggtgaggtggatcccatggggactgataggaaaacatcactctgatgaatcgggttttcccagtacttcaccgggcaaggttccctgcagagcagcagagacagaataggtcccgtggggcagaagctgcatcggccggaacagctgtcggcctgggagctttgtgaatttatgttgctataaaggagtacctgaggctggaaatgtataaaggaaaaaaggcttgtttggctcacgattctgctggctaaggattgagcattgggtgaaagcctcaggctgcttcacgcctggcggaaggtgaagagggcgggctgcgcagaggtcacaggggagggcagggccgggggagggaggtgccaggctctttttaacaacctgcttttgcgggaacaaatagagcaacaactcactacccccaggatggcaccaagctattcttgcgagctctgcccccatgaccccaacactggggatcagatttcaacatgaggtttggggtacacacatccaaactacagcagctactataaatcaccccaaacttagtggctcaaagcaacagaagtttatgatcttacagtgctggaggccagaagtctgaagttggtctcactgggctaaattcaagtgatgagcaggactggttccttccaggggctcaaagggagtgttttcctaccttttccagctttgagaggctgcctgctctcatggctcctggttctttcctctgttgtcaaaagcatggcatcttcaagtctaactctctccctctgcttcagagatcacatggccttctctgaccctcatgctcctggtgtcgtaaggaccctctcgatgacaccgggcccaccagataatccgggatcatctccccatatctggatcacatctgcaaagcctcttttgccatagaagggagcatatttgtaggctctagggattatgacatggacatcttcaaaggcccgtattcggccaagcacaggagggtggtgtggagagctggccagtcagccaagcgtgggatggaggaggtaccccgtggctggttccctgtgctctactgtacagctcaggcaggtctgagtggggagggggctgccctcagcagaaggccgagcttctggatgcgtctattttgggacagcgcaccttcccgtccaggcaaggccctgtgactggggtagtggagtaggtgggacagggtgacacgaggggtcaggccacagacccacctcctcctcaattcacatcacagtgtttttcccgtggaaggtcacctggtttccaagagtcagccttgtcccccacaatggagacaggacaatttctccagctcttggtagaagtaatttttgagtgcttactagttatttacctttttactttttaaaaaattcttgtgaagttactttgtgagttttccaggatgtgtgtaaactacacacatcagccacctaggtagttttgagttgctttgaagttcagctgttgttgacttcaaaggcagcagcttatgaaagttggagaaatagttagaacattttccagtccctattcaggggttggtgacctccgtggcccccagcctcgtggctttgggctttggaaggctggtgtctggtctcactgatggctacaggctggactcacccccaccatctctgtcctcaccaaccctgtccccagccccctggctcatccccagtatcctctacaaacctgctcctactcgggtccagggcaggaggctgagcactgtgggccatcctgggagcctcaggctgcacaggttgctgaccttggactgtaagggctgagtacgaaggcagaaggtggggattctcaggcaatgcagcaggcctgcgagagactctggggaggagcaacagggctctctaaattgccacctgcaagtggctgcgtcctcctaccatggggcacccaggacccagctcaggcttgcacctgggttcttccttgttgaacctgtggcaaagcaaggaggagacttggtctactccctcctgggcagcctctgctgactgccctataggtgctgggcactgtgtctgggacacagagactgtgaaaggcctcctctcccacagtggagagctgccagcagcatgaggaggccgggttcatgcagggtccttggcaggcctgagggccagtggggatcctgggggctttctggggtgtaccctcagctctgcatgctttgaaaggcccctttaaagtcaggtcctggtcagatctagaagcgggcaagtctcagctgaggctgaaacctcggcctccctgagccttgtgacttgcccagggtcggaggcccaacgccccctgaggaattctcttcctggtacggcagagaaaggtgggggccagggaatcagggtggggaaatcccagctgcctctccctgcaccctggcccatctcccccaggtcatgagccatcccccttcgactgttttcccaccataagggactatgatttacatctaccaaactctgccaccgacaaggacagtgtgggaagagggtgagccctgagtggagccaggtgagctggattcaaagcccagttccgcagcagagagcctgggagagccatctcttaaccttgggtacaccacaggccctttctgcacccacaggtctgtcttgctcatgagtgggtctcagagtttacaaatatagactgaggatcagagaggctgcatgcgtgcctgaggtcacacagctcagatccccagaaagagagcagaatggcagctcagacattccgagtcagtgcttttaaccatagtgctgcattatataccctcagcaccagccccaggcttccatcctcagtagcctgtctacatttcaagggttagttctccttcccctccatttcaaatgcccccctttcaagttccctcagggaaggccagtggtttttggggtcacctgggccagggttttctgcagctcaacccatcaggggtctaggtgatgactgggatttctagggggaaacaagggaaataaacatggctttttctgccaaaaggctctctcagccgagacttgctggcacggatattgcccctgccctgggctggctggcgtgagttgtctgcgcctccctgaaggcagacttcaggggctagctgtgatgggctagctgcggtgaggagtcccctgagccctgagtcacatcagaagcacattgctccaccccagggctcggccttgcccagggcctcaaaggcaccaaacgtatacacctgagctagaaagtgtaaaaaagccaaaatttaattttctcagcaaatattttctgaacatctactatgcacgagtcattgggccaggcattgtggtgagggtgggacattgttcatttgctcattcattgattccttcactggttcttccaacaaatattgagggatcgccagccatgtccttggtattagaggcacctgggagagcagagctggtccctgcctgcatgcagtgcagcagacagattttgatcagaaacagacaagacattgatcacagcattgcctgaagcatttcagaactgcaacaggcatgaggggcgatactggggacagtgacatatttctggtgagataccctcattcctccccagctactccactctatgacctccccatctgcctcagagaccaagccccaagaggaggctgggctggaactgaacccccagctttccccaggccacacgaagaccactcccagaatgtttcaggcctaccagcgcctctacctacgaggtcacccccaaggctgccatgccctgatcctcaggaagccactgtaccttgcattgggtcctatgtgtcccatggcccctcatccattctcaaaatgcctcctccactttcatgctctggctcaagatgactgaagtgtttccataaagggccagatggtaaataatattagactttgtgggcccaagaggaaaaacagggatattaggtactaatgtaacacagagaaaagaggttccacaaatatttagagatggaattcaaaatacaatagttgagtacaattttttggtaatacagctctgcttacgagaagcaaggggttcttttgggagtgggtaacatgctgcttcattgagggtcaagttgagtgcaccctgtcagaccctctgcagatgctcgtctggagatgccattcctaatccaatctcctggccctgttgactttgttggcagctcctcctgaaactctcacttggtctccagaacaacggactcctcgctggtcctcatcctgcctccatggctgcacctgctcttctttctggccatgaatgtcggggtgcccagcggctcagtccttagccctctcccataactgttcttatccagtccgtggcctcagacgccatctctatgccgatgactcctagacctcagccctgagcgcaggctggtgcacccactgcgtgacaggtggcgcccccagcattaatgactcagagctcttgggtctgtctctccacctaagccgcctccccagcagggttccatcttcagtcgcagtgaccagcccatgcaggccatgtcactgagctctacccgggcgctgctcgcccacacccaccctggaacccatcttgccggccgtcctgctcctgccatctcttctgcgggaaggctctgcccccagcttcctccttcaggctgacagccacttcccagtcaacctgaccaccctgaccaaacagccaccccgccccttcccaagccactctctcaccgtcctgtcttattattttgtgtaagtgatcagggaagggaccatagtgaggcaaaggcaccggcccggccagggtcagggaagggaccatagtgaggcaaaggtgctggtctggccagggccagtgaagggaccatagtgaggcaaaggtgctggtctggccagggccagggaagggaccatagtaaggtgatctcacttggtcatagtaaggagaccaatggtggatcctgcctcataggatccaccattctcccggctctgccccctcatcttgaccactcttgtattagtttggttgactattttctgtattttatgatcctttgacatcttgctggcctgggaaggactgccctctcgggactagctaacccctagatatagaggcacttggagcacaccttttgtgtgcaaaacggccaatcccagcccaccccgaccatctcccttcctgagcacttgcagtgggcaatgcagctccccagtcgccccgcgggccaggggccagaaacttggaagcccagacactctgagccccataaaattattcaaactcagctctagccctgcatagcccagttgctgtttgtccatttcttcctgtgaaaaccacagcaaaggctctggctcaccatttccccagggctctctctgcctcctcccctcggtgcttcccagtggccccacatagcccggtgtgtctcttcctcttgggaactgtgagtaacaaaccattgtgccaaaggcaatcttttttttttttttttttttttttttttttttgagacagggtttcactccgatgcccaggctggagtgcagtggtaccatctcggctcactgcagcctcaacctccagggctcaggtgatcctcccaccttagcctcctgagtagctgggactaaaggcacctgctatcatgcccagctaactttgtgtatttttttgtagagacagggtttcgctatgttgcctaggatggtcttgaactcctgggctcaagcaatccacccacctcagttcctcaaagtgctgggattataggcatgagccactgagcccggctaaagacaatcttctgagctgttggtctcactttacccgaataacagtgaaacctatgcttcaacaccccccacccccgcaccactcccgcatggtggtgagagccggggccaaggccctcctggcacctccactgtcacttttcccctgcagtccttcaaaccatgtcactctcttccttgaaaccctccccaaccccccaacacacctaggataaaaggccaagacctgctcatggccctcgaggccctccctgggttctaccctgccctgctgacctctgagacctcagctgcccgcactcacctcagccctggctatgctgacctcaccgccatgctcagcacaccaagcccttccctgtactggcctgtgaccctggggtgccctgcctggcacacccttccctgaccctggccaggctggcaccttcgcctcactacggtcccttcgctggccctggccagaccagcacctttgcctcactacggtcccttccctgaccctggccaggccggcaccttcgcctcactacggtcccttccctgaccctggccaggccagtgccttcgcctcactacggtcccttccctgaccctggccaggctggcaccttcgcctcactacggtcccttccctgaccctggccaggccggcaccttcgcctcactacggtcccttccctgaccctggccaggccagtgccttcgcctcactacggtcccttccctgaccacttacacaaaataatacctctcctgcatggccagcctccctgcttgatttgctcacagctgtcacctgagactggaccatctgtgtgtctgctgctgcttcagcagccctctgcccatcagggacctccgctccttgaggtgggaactctgttcatggctgcagcctcagagcctgaatcagtgactgcacataatactcactcaacaaacttagatggggcaaaggcatgtgtgatgatgctgtagagcaggcaatcccccacccctcgggcatgggccagtagcagtcctgggctacacagcgggaggtgagaagcaaagcttcatctctatttacagctgctccccatcgctcacattaccacctgagctccacctcctagtggtaacgttggattctcatagcagctccaaccctattgtgaactgtgcatgtgagggatctaggtggcacattccttacgagaatctaagatctgttgctgtctcccatcacccccagatgggaccacctagttgcaggaaaacaaattcagggctcccactgattctacatgatggtgagttgtagaattatttcattacgtatttcagtatagtaataatagaaatgaagtgcacaatacatgtaatgagcttgaatcatcccaaaccatcccccccaccaaactgtggaaaaactgtcttccatgtaactggtccctggtgccaaaaagttggggcctgccgctctggagtgtgaagcagggaaagaggacctcaccgtaagggccaggctcactttcctaaggaaggaacagggagagcctagaagaatgcaggccttgtgcaaatgtcagaacctccagcagaggagaggtctgcagggtgcatgggggctgtgacccagatggcatcaggaaagaggtggcgttaagctgagccctaaagactggcaggatctagaaaggtgggcaggcatgccgagaggaggggctggggtgagcaggggcagggagcagggaaggccaaaagagcagggaaggtctcagtgcctccggaaaggagtatacgaacattctgggctttggagtcagggagacctggactacaatcctggctctgccattgtcctctgtgtgaccttaggcagagggtttgatgctactgagcctctgttttcttatctgcagaatgggtatgcactcagactcaggcccttatggcgataagggttcacgcatgtaataccctccacatggcatctggaccctggaggtgggggcaggtcacctcagcaatggtcctcaggcacgattgttgtagcagtaggaggtgaagccacccaggtaagtgggcacaaggtcaaagagggtttgggtctcagggtaaatgcctttggttgaactagtggtgtattgagcttcccacactgacattttctgagcagaggaattattggttagcgcagggatttaggtcattaatttggagcaggtagaagtgcctggaaatggaaggactaaggctgaggcttctatggtccaagtgagtgatcacaggggctgggagtaggaagcacggctgaagggccatctcaaaggcactgtaccaatgggatggtgacatcactactgacggcacccacagagctggggtatatgtatgcttatgtgtaacttcccattttacagaaaaggaagctggggctcagggaggttaggtgactgctccaaggtcacacacttagtactggacccagtgttggaacccaccaaatctgacccatcttgtgcttgtcactaactgaaggatgtggcaggcaatggaggcaaggtcaaaggcaaagtcaagccccaaatggtcaaagacaaggattagacttggagctggtgtccagcctgagggtggaggggtgagggacatttaccgtagcaggggaaggctgggtcgagtcaacgttcttgcaacatccgtaattgcagcgttagctgggcaagttagatgggtggggaagtcctacttaaccacatagacatttcttaaacattttatttttacttcaaatatgtgaagtacagcacatct

SEQ ID NO: 97 - DNA, 4726 bp, Homo sapiens
tcctcccagcgctcggggagtcaggttgacgcgccctggatgcggggctagaggctcggggctgggcgcgctcccgcggagccggagccgcagaggctcccgggctggactcaggcttctcaggaaatctggcattttttaaagtttgcgccccacaaagaggaaatattccaaaggtactcaggatgtaaaaggggagatcttcacagatgcctccgtggatggcatggcaatccatccatcaatgagaagaccatgatttcttttaattttctgtgtgtttccacattccccagtgagaattcttccacctttttttgtgccatgggaaaaacctgaagggcaggcagagctgctcccgaacttgtgaccttctctgaggttgcagcggctcttgtagaacatgactctgggacatcacttccttttgttttctttcggagctgaaccaaagaatgtgcaccctctttctctagtgctgtggtgtctgcttatttttgtatttgtgctttccatccatcttctgtgatcacaaggcattcttaaggttttctagcacgacttgcggacatccagactcgtggggggcccacccatggctcggtaagccagcagcccagggcactggcactaccatgaggcactgcattaattgctgcatacagctgttacccgacggcgcacacaagcagcaggtcaactgccaagggggcccccatcacggtcaccaggcgtgccccacgtgcaaaggagaaaacaaaattctgtttcgtgtggacagtaagcagatgaacttgcttgctgttctcgaagtgaggactgaagggaacgaaaactggggtgggtttttgcgcttcaaaaaggggaagcgatgtagcctcgtttttggactgataataatgaccttggtaatggcttcttacatcctttctggggcccaccaagagcttctgatctcatcacctttccattacggaggcttccccagcaaccccagcttgatggacagcgaaaacccaagtgacacaaaggagcatcaccaccaatcctctgtaaataatatttcatacatgaaggactatccaagcattaaattaattatcaacagcatcacaactaggattgagttcacgaccagacagctcccagacttagaagaccttaagaagcagatgttttcagtcatccccaacaaattccttccaaacagtaagagcccctgttggtacgaggagttctcggggcagaacaccaccgacccctacctcaccaactcctacgtgctctactccaagcgcttccgctccaccttcgacgccctgcgcaaggccttctggggccacctggcgcacgcgcacgggaagcacttccgcctgcgctgcctgccgcacttctacatcatagggcagcccaagtgcgggaccacagacctctatgaccgcctgcggctgcaccctgaggtcaagttctccgccatcaaggagccacactggtggacccggaagcgctttggaatcgtccgcctaagagatgggctgcgagaccgctatcccgtggaagattatctggacctctttgacctggccgcacaccagatccatcaaggactgcaggccagctctgcaaaggagcagagcaagatgaatacaatcattatcggtaaggcttctccaccgtttctgacgcaggacttcatccacgcctttcagccaaatgccagactgattgtcatgctcagggaccctgtggagaggttgtactcagactatctctactttgcaagttcgaataaatccgcggacgacttccatgagaaagtgacagaagcactgcagctgtttgaaaattgcatgcttgattattcactgcgcgcctgcgtctacaacaacaccctcaacaacgccatgcctgtgaggctccaggttgggctctatgctgtgtaccttctggactggctcagcgtttttgacaagcaacagtttctcattcttcgcctggaagatcatgcatccaacgtcaagtacaccatgcacaaggtcttccagtttctgaacctagggcccttaagtgagaagcaggaggctttgatgaccaagagccccgcatccaatgcacggcgtcccgaggaccggaacctggggcccatgtggcccatcacacagaagattctgcgggatttctacaggcccttcaacgctaggctggcgcaggtcctcgcggatgaggcgtttgcgtggaagacgacgtgagagctgaattgttgctgcacgtgctgggcccgccaatgccgtcatcatcaggattttacaaatctctttgcggggaactgtttcactcatggtatggaaaaccccaggactctgccactctaggcacacatgaattataaccattttggaatttccttcgtgatgttcgagagctcagcaatggacccctcacagagctcctctatccgaggccattggagaccccagtttctcaagaattcagctctgctctgagcgtcctggagcttggggatgcagccagctggcctgcactgggtgtggagagaacacctagggaaggcagcctggccctgcccgcctccgccttctggagagcctctgggttctgagtcagcaagccagaggtcatgccacaggcctggctggaacttacacttcacgttccctttttttccccctagagatggggtctcgccgtgttgcacagactgtctgtattcaatggctatcttcacaggtgtgatcataccacattcacttctgaaacactcttgttgcgatcgctaacctcactgggacagagaaccgcagtctttcgagaatggaggctcttcattttttttttctcctttactccaaactcagccctccagtttcttcagatgtaaaccctgttaacgtcactgtttccaaaaggaaaaaaataagtcagtttttggcagcaccttcatctttctgacctcctcctattctgtccttgtggacttatgtttaacatagaaaatgaatgcgtttaaaacaaaaccactttctgcatttaaccagtcctggctctctctctgctgcctcttcatacgttttctcaagaacttcagtttataattggaagagaaatttttgctgttaatgccagaatgagcaacctcaaggaattgaacacttcatggaaaatctaggtaattcaagccctcatcaggtttacaagatcatcagagaaacagaggattttaatttttagttctggccggctacaggctccatttctctgccttcccattggaaatagtttatttccacattctccactgcgtgtggtcaaagttcctcacccagcaagggactatagatactcgtgtcccaattccaaaacacaatgcacaagctgaacttgggctgaacgtggcgtgttgagatttggaatgaggtttctaagagccgtgttcttcatggaattttccaggccacttggcagcttggtttaccgatggatgggctagagatcttgtcgtttcttggaagtcacagggaagattgaagagaacgcttgagcatccttggcaacagcccaggtgggacctggatgaagctttgcactcaagtattgtcaagggaagcttcctgtgaaccaaagttctcaggccaaggtctcgcccaccaaagccagaaagtgcaagcacccgtctacccagctctaacttgtatgtgtgagacagaccaggcttcgggggtaggaggatctgcagttgttcagccgtctttctgctggtgttgtctttctgccatcagagaagggacacacagcccgttcgaaggtgtgcagagggctctgagcgccaggatggccagggctgtttttgctactgaaggagcgtgtgtcctgaactcccacttgcagggacagtccccaccttctctatagccggcactgggagcagccgccagcagggaaatctggcctgagcacaaggatgctttagggagagatcacttcagtgtgtgtgtatatttatttgcagtacagtgcgcgcgtgtgtgtgtgtgtacgcgcacgtgtgggtgagtgcgtcttctgagtgggttctgttcagttgctaatgaggctcctccgctctggacacaacccttttatagattaatttctctgccaattaacttgtcattttcagtacatattttactattccacaccaaccataattacaacaagggatttttcttatgcactcctatgcatgtgaataacatgtggtgtaattctgcttcttacagaagtattactgaaggtattatttccaatattatttggtttattatgcggatcttttttatatatgcagtcccatcccttctgtgccactcaatgccatccagacatggtttttccctccaggggcctttctccagagggcacttcggctgcctctgcttcctctcattcgaggcccggctcttgctgacagaataggttccgttctgggcggtggttctcgagcctgccattcaaaaccaaagcaaattggagcatttctcacaacatggtattgaagttcctttttgttctcaaaagttgtgaccgtgttaaattgtactcccttagtcctgtaaggtatgttaagtgaatcgcagttacgctgtacttttattaatatttaacataattaaagatggacccataagagtgacgcctgtggagcgcgtgctcttcctctgcagcc

SEQ ID NO: 98 - protein, 525 aa, Homo sapiens
MRHCINCCIQLLPDGAHKQQVNCQGGPHHGHQACPTCKGENKILFRVDSKQMNLLAVLEVRTEGNENWGGFLRFKKGKRCSLVFGLIIMTLVMASYILSGAHQELLISSPFHYGGFPSNPSLMDSENPSDTKEHHHQSSVNNISYMKDYPSIKLIINSITTRIEFTTRQLPDLEDLKKQMFSVIPNKFLPNSKSPCWYEEFSGQNTTDPYLTNSYVKKRFRSTFDALRKAFWGHLAHAHGKHFRLRCLPHFYIIGQPKCGTTDLYDRLRLHPEVKFSAIKEPHWWTRKRFGIVRLRDGLRDRYPVEDYLDLFDLAAHQIHQGLQASSAKEQSKMNTIIIGKDPFLTQDFIHAFQPNARLIVMLRDPVERKDYLYFASSNKSADDFHEKVTEALQLFENCMLDYSLRACVYNNTLNNAMPVRLQVGAVYLLDWLSVFDKQQFLILRLEDHNVKYTMHKVFQFLNLGPLSEKQEALMTKSPNARRPEDRNLGPMWPITQKILRDFYRPFNARLAQVLADEAFAWKTT

SEQ ID NO: 99 - DNA, 2350 bp, Homo sapiens
cgcgcgtcgtttggcggtaggggacggggattccccccagccttgcgctccgcccccacacccctatcgcactttggggaagtttccaggcgcggcccggggcaggaaatctggcattttttaaagtttgcgccccacaaagaggaaatattccaaaggtactcaggatgtaaaaggggagatcttcacagatgcctccgtggatggcatggcaatccatccatcaatgagaagaccatgatttcttttaattttctgtgtgtttccacattccccagtgagaattcttccacctttttttgtgccatgggaaaaacctgaagggcaggcagagctgctcccgaacttgtgaccttctctgaggttgcagcggctcttgtagaacatgactctgggacatcacttccttttgttttctttcggagctgaaccaaagaatgtgcaccctctttctctagtgctgtggtgtctgcttatttttgtatttgtgctttccatccatcttctgtgatcacaaggcattcttaaggttttctagcacgacttgcggacatccagactcgtggggggcccacccatggctcggtaagccagcagcccagggcactggcactaccatgaggcactgcattaattgctgcatacagctgttacccgacggcgcacacaagcagcaggtcaactgccaagggggcccccatcacggtcaccaggcgtgccccacgtgcaaaggagaaaacaaaattctgtttcgtgtggacagtaagcagatgaacttgcttgctgttctcgaagtgaggactgaagggaacgaaaactggggtgggtttttgcgcttcaaaaaggggaagcgatgtagcctcgtttttggactgataataatgaccttggtaatggcttcttacatcctttctggggcccaccaagagcttctgatctcatcacctttccattacggaggcttccccagcaaccccagcttgatggacagcgaaaacccaagtgacacaaaggagcatcaccaccaatcctctgtaaataatatttcatacatgaaggactatccaagcattaaattaattatcaacagcatcacaactaggattgagttcacgaccagacagctcccagacttagaagaccttaagaagcaggagttgcatatgttttcagtcatccccaacaaattccttccaaacagtaagagcccctgttggtacgaggagttctcggggcagaacaccaccgacccctacctcaccaactcctacgtgctctactccaagcgcttccgctccaccttcgacgccctgcgcaaggccttctggggccacctggcgcacgcgcacgggaagcacttccgcctgcgctgcctgccgcacttctacatcatagggcagcccaagtgcgggaccacagacctctatgaccgcctgcggctgcaccctgaggtcaagttctccgccatcaaggagccacactggtggacccggaagcgctttggaatcgtccgcctaagagatgggctgcgagaccgctatcccgtggaagattatctggacctctttgacctggccgcacaccagatccatcaaggactgcaggccagctctgcaaaggagcagagcaagatgaatacaatcattatcggcgagccaccgtttctgacgcaggacttcatccacgcctttcagccaaatgccagactgattgtcatgctcagggaccctgtggagaggttgtactcagactatctctactttgcaagttcgaataaatccgcggacgacttccatgagaaagtgacagaagcactgcagctgtttgaaaattgcatgcttgattattcactgcgcgcctgcgtctacaacaacaccctcaacaacgccatgcctgtgtgtacccccccccccgtaccccccgagctggcccctggcagaaggagctggtttgttgttattatgcaagcggcattgtgggtttgcgtttcagcataggaacagagagaagcgttttaatgtgcaaatgctgttccccattattcatggatgtaaaagctgaaaactgatgggctcttggtctggctcctgccttcctccctgctggtcacctgccacctccccctcctccctcagcaggaggatgagggtgcctttaggaagattaccatttagcaagacacccagcaattagaatcggcagacacgaggacacccaactctcaaattgtcttaagagcattctcttgagcggtggattgttttgttggtttaaaaaactacccatcaatgattttcaatgcttctttgacagagtctcaattgaaaaacattttctgttgattcctcaa

SEQ ID NO: 100 - protein, 455 aa, Homo sapiens
MRHCINCCIQLLPDGAHKQQVNCQGGPHHGHQACPTCKGENKILFRVDSKQMNLLAVLEVRTEGNENWGGFLRFKKGKRCSLVFGLIIMTLVMASYILSGAHQELLISSPFHYGGFPSNPSLMDSENPSDTKEHHHQSSVNNISYMKDYPSIKLIINSITTRIEFTTRQLPDLEDLKKQELHMFSVIPNKFLPNSKSPCWYEEFSGQNTTDPYLTNSYVKKRFRSTFDALRKAFWGHLAHAHGKHFRLRCLPHFYIIGQPKCGTTDLYDRLRLHPEVKFSAIKEPHWWTRKRFGIVRLRDGLRDRYPVEDYLDLFDLAAHQIHQGLQASSAKEQSKMNTIIIGEPPFLTQDFIHAFQPNARLIVMLRDPVERKDYLYFASSNKSADDFHEKVTEALQLFENCMLDYSLRACVYNNTLNNAMPVCTPPPVPPELAPGRRSWFVVIMQAALWVCVSA

SEQ ID NO: 101 - DNA, 4735 bp, Homo sapiens
tcctcccagcgctcggggagtcaggttgacgcgccctggatgcggggctagaggctcggggctgggcgcgctcccgcggagccggagccgcagaggctcccgggctggactcaggcttctcaggaaatctggcattttttaaagtttgcgccccacaaagaggaaatattccaaaggtactcaggatgtaaaaggggagatcttcacagatgcctccgtggatggcatggcaatccatccatcaatgagaagaccatgatttcttttaattttctgtgtgtttccacattccccagtgagaattcttccacctttttttgtgccatgggaaaaacctgaagggcaggcagagctgctcccgaacttgtgaccttctctgaggttgcagcggctcttgtagaacatgactctgggacatcacttccttttgttttctttcggagctgaaccaaagaatgtgcaccctctttctctagtgctgtggtgtctgcttatttttgtatttgtgctttccatccatcttctgtgatcacaaggcattcttaaggttttctagcacgacttgcggacatccagactcgtggggggcccacccatggctcggtaagccagcagcccagggcactggcactaccatgaggcactgcattaattgctgcatacagctgttacccgacggcgcacacaagcagcaggtcaactgccaagggggcccccatcacggtcaccaggcgtgccccacgtgcaaaggagaaaacaaaattctgtttcgtgtggacagtaagcagatgaacttgcttgctgttctcgaagtgaggactgaagggaacgaaaactggggtgggtttttgcgcttcaaaaaggggaagcgatgtagcctcgtttttggactgataataatgaccttggtaatggcttcttacatcctttctggggcccaccaagagcttctgatctcatcacctttccattacggaggcttccccagcaaccccagcttgatggacagcgaaaacccaagtgacacaaaggagcatcaccaccaatcctctgtaaataatatttcatacatgaaggactatccaagcattaaattaattatcaacagcatcacaactaggattgagttcacgaccagacagctcccagacttagaagaccttaagaagcaggagttgcatatgttttcagtcatccccaacaaattccttccaaacagtaagagcccctgttggtacgaggagttctcggggcagaacaccaccgacccctacctcaccaactcctacgtgctctactccaagcgcttccgctccaccttcgacgccctgcgcaaggccttctggggccacctggcgcacgcgcacgggaagcacttccgcctgcgctgcctgccgcacttctacatcatagggcagcccaagtgcgggaccacagacctctatgaccgcctgcggctgcaccctgaggtcaagttctccgccatcaaggagccacactggtggacccggaagcgctttggaatcgtccgcctaagagatgggctgcgagaccgctatcccgtggaagattatctggacctctttgacctggccgcacaccagatccatcaaggactgcaggccagctctgcaaaggagcagagcaagatgaatacaatcattatcggtaaggcttctccaccgtttctgacgcaggacttcatccacgcctttcagccaaatgccagactgattgtcatgctcagggaccctgtggagaggttgtactcagactatctctactttgcaagttcgaataaatccgcggacgacttccatgagaaagtgacagaagcactgcagctgtttgaaaattgcatgcttgattattcactgcgcgcctgcgtctacaacaacaccctcaacaacgccatgcctgtgaggctccaggttgggctctatgctgtgtaccttctggactggctcagcgtttttgacaagcaacagtttctcattcttcgcctggaagatcatgcatccaacgtcaagtacaccatgcacaaggtcttccagtttctgaacctagggcccttaagtgagaagcaggaggctttgatgaccaagagccccgcatccaatgcacggcgtcccgaggaccggaacctggggcccatgtggcccatcacacagaagattctgcgggatttctacaggcccttcaacgctaggctggcgcaggtcctcgcggatgaggcgtttgcgtggaagacgacgtgagagctgaattgttgctgcacgtgctgggcccgccaatgccgtcatcatcaggattttacaaatctctttgcggggaactgtttcactcatggtatggaaaaccccaggactctgccactctaggcacacatgaattataaccattttggaatttccttcgtgatgttcgagagctcagcaatggacccctcacagagctcctctatccgaggccattggagaccccagtttctcaagaattcagctctgctctgagcgtcctggagcttggggatgcagccagctggcctgcactgggtgtggagagaacacctagggaaggcagcctggccctgcccgcctccgccttctggagagcctctgggttctgagtcagcaagccagaggtcatgccacaggcctggctggaacttacacttcacgttccctttttttccccctagagatggggtctcgccgtgttgcacagactgtctgtattcaatggctatcttcacaggtgtgatcataccacattcacttctgaaacactcttgttgcgatcgctaacctcactgggacagagaaccgcagtctttcgagaatggaggctcttcattttttttttctcctttactccaaactcagccctccagtttcttcagatgtaaaccctgttaacgtcactgtttccaaaaggaaaaaaataagtcagtttttggcagcaccttcatctttctgacctcctcctattctgtccttgtggacttatgtttaacatagaaaatgaatgcgtttaaaacaaaaccactttctgcatttaaccagtcctggctctctctctgctgcctcttcatacgttttctcaagaacttcagtttataattggaagagaaatttttgctgttaatgccagaatgagcaacctcaaggaattgaacacttcatggaaaatctaggtaattcaagccctcatcaggtttacaagatcatcagagaaacagaggattttaatttttagttctggccggctacaggctccatttctctgccttcccattggaaatagtttatttccacattctccactgcgtgtggtcaaagttcctcacccagcaagggactatagatactcgtgtcccaattccaaaacacaatgcacaagctgaacttgggctgaacgtggcgtgttgagatttggaatgaggtttctaagagccgtgttcttcatggaattttccaggccacttggcagcttggtttaccgatggatgggctagagatcttgtcgtttcttggaagtcacagggaagattgaagagaacgcttgagcatccttggcaacagcccaggtgggacctggatgaagctttgcactcaagtattgtcaagggaagcttcctgtgaaccaaagttctcaggccaaggtctcgcccaccaaagccagaaagtgcaagcacccgtctacccagctctaacttgtatgtgtgagacagaccaggcttcgggggtaggaggatctgcagttgttcagccgtctttctgctggtgttgtctttctgccatcagagaagggacacacagcccgttcgaaggtgtgcagagggctctgagcgccaggatggccagggctgtttttgctactgaaggagcgtgtgtcctgaactcccacttgcagggacagtccccaccttctctatagccggcactgggagcagccgccagcagggaaatctggcctgagcacaaggatgctttagggagagatcacttcagtgtgtgtgtatatttatttgcagtacagtgcgcgcgtgtgtgtgtgtgtacgcgcacgtgtgggtgagtgcgtcttctgagtgggttctgttcagttgctaatgaggctcctccgctctggacacaacccttttatagattaatttctctgccaattaacttgtcattttcagtacatattttactattccacaccaaccataattacaacaagggatttttcttatgcactcctatgcatgtgaataacatgtggtgtaattctgcttcttacagaagtattactgaaggtattatttccaatattatttggtttattatgcggatcttttttatatatgcagtcccatcccttctgtgccactcaatgccatccagacatggtttttccctccaggggcctttctccagagggcacttcggctgcctctgcttcctctcattcgaggcccggctcttgctgacagaataggttccgttctgggcggtggttctcgagcctgccattcaaaaccaaagcaaattggagcatttctcacaacatggtattgaagttcctttttgttctcaaaagttgtgaccgtgttaaattgtactcccttagtcctgtaaggtatgttaagtgaatcgcagttacgctgtacttttattaatatttaacataattaaagatggacccataagagtgacgcctgtggagcgcgtgctcttcctctgcagcc

SEQ ID NO: 102 - protein, 528 aa, Homo sapiens
MRHCINCCIQLLPDGAHKQQVNCQGGPHHGHQACPTCKGENKILFRVDSKQMNLLAVLEVRTEGNENWGGFLRFKKGKRCSLVFGLIIMTLVMASYILSGAHQELLISSPFHYGGFPSNPSLMDSENPSDTKEHHHQSSVNNISYMKDYPSIKLIINSITTRIEFTTRQLPDLEDLKKQELHMFSVIPNKFLPNSKSPCWYEEFSGQNTTDPYLTNSYVKKRFRSTFDALRKAFWGHLAHAHGKHFRLRCLPHFYIIGQPKCGTTDLYDRLRLHPEVKFSAIKEPHWWTRKRFGIVRLRDGLRDRYPVEDYLDLFDLAAHQIHQGLQASSAKEQSKMNTIIIGKDPFLTQDFIHAFQPNARLIVMLRDPVERKDYLYFASSNKSADDFHEKVTEALQLFENCMLDYSLRACVYNNTLNNAMPVRLQVGAVYLLDWLSVFDKQQFLILRLEDHNVKYTMHKVFQFLNLGPLSEKQEALMTKSPNARRPEDRNLGPMWPITQKILRDFYRPFNARLAQVLADEAFAWKTT

SEQ ID NO: 103 - DNA, 4718 bp, Homo sapiens
ccgcgtctcgggaggcggcgtgactcgggagttgccggcgcttcccggcggtggcggcgtctctggccggccttggtgcggcgagccgagcgaggcagctctgagccgcgcggaaatctggcattttttaaagtttgcgccccacaaagaggaaatattccaaaggtactcaggatgtaaaaggggagatcttcacagatgcctccgtggatggcatggcaatccatccatcaatgagaagaccatgatttcttttaattttctgtgtgtttccacattccccagtgagaattcttccacctttttttgtgccatgggaaaaacctgaagggcaggcagagctgctcccgaacttgtgaccttctctgaggttgcagcggctcttgtagaacatgactctgggacatcacttccttttgttttctttcggagctgaaccaaagaatgtgcaccctctttctctagtgctgtggtgtctgcttatttttgtatttgtgctttccatccatcttctgtgatcacaaggcattcttaaggttttctagcacgacttgcggacatccagactcgtggggggcccacccatggctcggtaagccagcagcccagggcactggcactaccatgaggcactgcattaattgctgcatacagctgttacccgacggcgcacacaagcagcaggtcaactgccaagggggcccccatcacggtcaccaggcgtgccccacgtgcaaaggagaaaacaaaattctgtttcgtgtggacagtaagcagatgaacttgcttgctgttctcgaagtgaggactgaagggaacgaaaactggggtgggtttttgcgcttcaaaaaggggaagcgatgtagcctcgtttttggactgataataatgaccttggtaatggcttcttacatcctttctggggcccaccaagagcttctgatctcatcacctttccattacggaggcttccccagcaaccccagcttgatggacagcgaaaacccaagtgacacaaaggagcatcaccaccaatcctctgtaaataatatttcatacatgaaggactatccaagcattaaattaattatcaacagcatcacaactaggattgagttcacgaccagacagctcccagacttagaagaccttaagaagcaggagttgcatatgttttcagtcatccccaacaaattccttccaaacagtaagagcccctgttggtacgaggagttctcggggcagaacaccaccgacccctacctcaccaactcctacgtgctctactccaagcgcttccgctccaccttcgacgccctgcgcaaggccttctggggccacctggcgcacgcgcacgggaagcacttccgcctgcgctgcctgccgcacttctacatcatagggcagcccaagtgcgggaccacagacctctatgaccgcctgcggctgcaccctgaggtcaagttctccgccatcaaggagccacactggtggacccggaagcgctttggaatcgtccgcctaagagatgggctgcgagaccgctatcccgtggaagattatctggacctctttgacctggccgcacaccagatccatcaaggactgcaggccagctctgcaaaggagcagagcaagatgaatacaatcattatcggcgagccaccgtttctgacgcaggacttcatccacgcctttcagccaaatgccagactgattgtcatgctcagggaccctgtggagaggttgtactcagactatctctactttgcaagttcgaataaatccgcggacgacttccatgagaaagtgacagaagcactgcagctgtttgaaaattgcatgcttgattattcactgcgcgcctgcgtctacaacaacaccctcaacaacgccatgcctgtgaggctccaggttgggctctatgctgtgtaccttctggactggctcagcgtttttgacaagcaacagtttctcattcttcgcctggaagatcatgcatccaacgtcaagtacaccatgcacaaggtcttccagtttctgaacctagggcccttaagtgagaagcaggaggctttgatgaccaagagccccgcatccaatgcacggcgtcccgaggaccggaacctggggcccatgtggcccatcacacagaagattctgcgggatttctacaggcccttcaacgctaggctggcgcaggtcctcgcggatgaggcgtttgcgtggaagacgacgtgagagctgaattgttgctgcacgtgctgggcccgccaatgccgtcatcatcaggattttacaaatctctttgcggggaactgtttcactcatggtatggaaaaccccaggactctgccactctaggcacacatgaattataaccattttggaatttccttcgtgatgttcgagagctcagcaatggacccctcacagagctcctctatccgaggccattggagaccccagtttctcaagaattcagctctgctctgagcgtcctggagcttggggatgcagccagctggcctgcactgggtgtggagagaacacctagggaaggcagcctggccctgcccgcctccgccttctggagagcctctgggttctgagtcagcaagccagaggtcatgccacaggcctggctggaacttacacttcacgttccctttttttccccctagagatggggtctcgccgtgttgcacagactgtctgtattcaatggctatcttcacaggtgtgatcataccacattcacttctgaaacactcttgttgcgatcgctaacctcactgggacagagaaccgcagtctttcgagaatggaggctcttcattttttttttctcctttactccaaactcagccctccagtttcttcagatgtaaaccctgttaacgtcactgtttccaaaaggaaaaaaataagtcagtttttggcagcaccttcatctttctgacctcctcctattctgtccttgtggacttatgtttaacatagaaaatgaatgcgtttaaaacaaaaccactttctgcatttaaccagtcctggctctctctctgctgcctcttcatacgttttctcaagaacttcagtttataattggaagagaaatttttgctgttaatgccagaatgagcaacctcaaggaattgaacacttcatggaaaatctaggtaattcaagccctcatcaggtttacaagatcatcagagaaacagaggattttaatttttagttctggccggctacaggctccatttctctgccttcccattggaaatagtttatttccacattctccactgcgtgtggtcaaagttcctcacccagcaagggactatagatactcgtgtcccaattccaaaacacaatgcacaagctgaacttgggctgaacgtggcgtgttgagatttggaatgaggtttctaagagccgtgttcttcatggaattttccaggccacttggcagcttggtttaccgatggatgggctagagatcttgtcgtttcttggaagtcacagggaagattgaagagaacgcttgagcatccttggcaacagcccaggtgggacctggatgaagctttgcactcaagtattgtcaagggaagcttcctgtgaaccaaagttctcaggccaaggtctcgcccaccaaagccagaaagtgcaagcacccgtctacccagctctaacttgtatgtgtgagacagaccaggcttcgggggtaggaggatctgcagttgttcagccgtctttctgctggtgttgtctttctgccatcagagaagggacacacagcccgttcgaaggtgtgcagagggctctgagcgccaggatggccagggctgtttttgctactgaaggagcgtgtgtcctgaactcccacttgcagggacagtccccaccttctctatagccggcactgggagcagccgccagcagggaaatctggcctgagcacaaggatgctttagggagagatcacttcagtgtgtgtgtatatttatttgcagtacagtgcgcgcgtgtgtgtgtgtgtacgcgcacgtgtgggtgagtgcgtcttctgagtgggttctgttcagttgctaatgaggctcctccgctctggacacaacccttttatagattaatttctctgccaattaacttgtcattttcagtacatattttactattccacaccaaccataattacaacaagggatttttcttatgcactcctatgcatgtgaataacatgtggtgtaattctgcttcttacagaagtattactgaaggtattatttccaatattatttggtttattatgcggatcttttttatatatgcagtcccatcccttctgtgccactcaatgccatccagacatggtttttccctccaggggcctttctccagagggcacttcggctgcctctgcttcctctcattcgaggcccggctcttgctgacagaataggttccgttctgggcggtggttctcgagcctgccattcaaaaccaaagcaaattggagcatttctcacaacatggtattgaagttcctttttgttctcaaaagttgtgaccgtgttaaattgtactcccttagtcctgtaaggtatgttaagtgaatcgcagttacgctgtacttttattaatatttaacataattaaagatggacccataagagtgacgcctgtggagcgcgtgctcttcctctgcagcc

SEQ ID NO: 104 - protein, 528 aa, Homo sapiens
MRHCINCCIQLLPDGAHKQQVNCQGGPHHGHQACPTCKGENKILFRVDSKQMNLLAVLEVRTEGNENWGGFLRFKKGKRCSLVFGLIIMTLVMASYILSGAHQELLISSPFHYGGFPSNPSLMDSENPSDTKEHHHQSSVNNISYMKDYPSIKLIINSITTRIEFTTRQLPDLEDLKKQELHMFSVIPNKFLPNSKSPCWYEEFSGQNTTDPYLTNSYVKKRFRSTFDALRKAFWGHLAHAHGKHFRLRCLPHFYIIGQPKCGTTDLYDRLRLHPEVKFSAIKEPHWWTRKRFGIVRLRDGLRDRYPVEDYLDLFDLAAHQIHQGLQASSAKEQSKMNTIIIGEPPFLTQDFIHAFQPNARLIVMLRDPVERKDYLYFASSNKSADDFHEKVTEALQLFENCMLDYSLRACVYNNTLNNAMPVRLQVGAVYLLDWLSVFDKQQFLILRLEDHNVKYTMHKVFQFLNLGPLSEKQEALMTKSPNARRPEDRNLGPMWPITQKILRDFYRPFNARLAQVLADEAFAWKTT

SEQ ID NO: 105 - DNA, 31085 bp, Mus musculus
gagtagtttcattttattgttttttctgtgctgtgtcttcatagttacacctcaatatttgttcttttctttaatggtcccttcctcctgtgtcccctagactgtgtccatggaacatgaaataaaattttgaagggctatgcccttcaaactctaactcactgatactttgtgccccattcttgcctcagtggcactatggtttagttactcctccatgggcacttgttgcctgcattcttcccttccttaaacaatcagtgtttaaaataaaatacaataaaataaaataaaataaatagctctgggcctattatgaggggaattcaagggaatagagcttggatacatttaagaaaaataaagtttttcttctctggctgtgacctctaggatatagccattatttctttatagccccttatccttctaccagctcagaggaagcgcctctcttggagctttcatggaatctcttcacaggtttggagaaatccttcactttcttcatgtcaacctctggcttagtaaatcacagccaaacattctcagagagccttagtggtagcagtttgcaatgtcaagcatgttgctgtggacaatagagggcagcacttgtcacatacttctagtctcagggcctagagtaggtctagaatcttcacaagaaaaagactgcctcactctgataagcatgaaatgccctctgttataaatctcatatatgatttggggtcatccacaagcatagtgagaaatcccacttgcccttctcccatggaataggatatctgtatcatacctccatcaagtatagattaccataaagtttatcttcccctacagaaagtctcattctccctaaacatgcctatctcaaccactaagtaagtgacttcaggtggaacttggacaacaaatggagagggaataattaagtcttagcttgggcttataagctgagtaaaataaaaaagattagctggaatgcaaaagtgcaaagggtagagactagtgggtttttgtggagtgcttttttttttctttctttctttctttctttctttcttttttttttttttttttttttttttttttttttttcttgtctttactctctgttttccctcaaagccaggaacaaaggtctcagagtttaaatgtgacttcaggcaatacttgttatctgagccccatctcagcagctgtcctttaagaaggacatttgagtccgttccttaaacagcgtttgagtacgtgccttaaacagcactgcaactcggctaaaaaggggtgagaacccacccaaataacatccccaaaagggtgaacaagtgtcactatacatgccatctgcaccagtatgcttagtgtttggcaccactcataaagggcagggggccaggtcagatgactgatgacagagaagaattctaaattgagtgtccatgaaacatgaggcgacaagatggcgctgtgccacaaggatacaccacacccggaagaccttagaaagtaattttaatatttattttaaatccggaccctaatttgcataagccacgcccctttttacctgtgccacgcccacagacattccagggtgtcaggtgactgccaggtgtcaatccagtgaagccccacccactctccacccctgcacatagtccctaccccctagctaacaggaagtgcttctagcttaattcaaacctgcatagacgccttcctgtctgtcaggcaggggccaaagccccaccctctaatgcccccataccctagtgtgggaaagcgccatagccagctgccccataagtctttgcagtactttactggcatatcatttcccaaatttggagggggctggaagtgggcgtggaggggacgaggtgagggataaaagcgtggtgtcattcgagcaggtgccttactcagtggtggagagcagaagccacttctaggggctctgttatcatgcacgctctaaaactccctctcaccgtctcttcagactcagactcagccccttccagccccgccgcaacatcgtcgccccggctggagggcccgggcaccacaaccagagcaccccctgctttggagggggctgctaatattgacccagccagcggatcatcgtccgggcaatttcggaagagaatcttgggcaccagtgactccccggtcctctttatccaccgtccgggaacttcaggaactacgaagcgactagagtacaggtaactaattgatttccccttgttcatgccttttgtgtatgagtgaaggtgcagtttaaatattctggtgtgggtaggtggctggggacttgggagagttagggtccttcagttagtctctgaagagggggaaggttgccgctaaaccggacggtcttaagagtgacttcaacttctgaggggacaaaaggacaactgggactgggacttaaagggctgcacaaagctacaaggaaagtatggtttcgttctctaatctaccatgcaaaggggagaggcagcgctctttctcttcccagcaggagtacacagctgtttttgcaaatgtgaaatttttctgtgtgaacattttccccctggtgtatgctccccccgctcctcccccccacccccaccccactcccggctaaactgtgcagaggggccagagattctagagcagtgtgggggtgtgtattattattatacatatatattatgtagatgtatgtatatatatatatatatatatataaaattttaaaagcaaagtttccctgtttttatatcctgtacctcctaactaccaccaggatactggagggtagatagataggatgatgtgccttgctattccctagcagggtttaagtacaaaaactgcttttctcctggctgtgtctgtctttaactccccctcccccccccccctccgtgttccctgtgcacaggcaggaatttggagcagcagccacagcactcccagttgcacattcatttgtgcacaaagctttttttccctgcaactgggatcccagactccttaatccaccggtataatgtttatggggagaagccctgccaccccttccagaagttgccttcctaaggcagatccatgtgccctttgttttttgttcccatccaaggtagaagtgtgaggagaggaatgggagacattcacatttttagctgtgacccctcaaagaaagccttttgtgtgcagcagcagttttacaccaccaccacccccgcccccagccaggcaggagccagattgtccttcccaaaggagggtctcctgcctctccctgaacagttgtcaaacttggcaaagtgacttctcaccaactgcttcctcccttctactgagaagggggtggggagagtaggcagctgaagggacagggtaggggggagtgctccaaccatgacaaggtgacccttgggcttccccatccagcagcaaggtggggggagggggccagactcagctggagaagatttgtttttgagataatctcaaggatttttgcttctcctcctcaggggacgagtaattaaaacagagctcactgtgcaagaggaggaggaggaagaggagaacgactacgacgactgcaggcccctaacccagggttctgagtctcctaaggctaaacttctcgtccagccagagctgcagaagcctaagtccaggcctgtgccaccaaggcctgagccgaggcctgagccacctaagcctgagcccaggcctgagccacctaagcctgagccgaggcctgagccaccaaagcctgagccgaggcctgagccaccaaagcctgagccgaggcctgagccaccaaagcctgagccgaggcctgtgccacctaggcctgagccaaggcctgtaccacctaggcctgagccgaggcctgtaccacctaggcctgagccgaggcctctgccaccgaggcctgagctgagacctctgctactgaggtctgagccgaggcccgtgccaccaaggcctgagctgagacctctgctactgaggcctgagccgaggcccgtgccaccgaggcccgagctgaggcctctgccaccaaggcccgagctgaggcctctgccaccaaggcccgagtcgaggcctctgccaccaaggcccgagccgaggcctctgccaccgaggcctgagctgaagcctgagcctgagcctgagcccgagctgaagcctgagccggaacctgagaagaaacaggctagagcatcccgagactccagccccgtgcccaagtgctgtggcctgtggcccaggagatccccacgctcccagaactgaatgaaacctcagaaacctcccaccagccccagtctttcctcagaggtgagtgtccttcaggtatacagcagaacagaggtatctctagcacaggagcatcagagctcctgcaaatgcaagactcagccaaggaaccagccaaggctaggaagtctagtcagtcacagtatctgggattcaggtgcgctccaggtgtcacttcttgggaacaaggggtgtaagccaagcagacacgaggcagcagtctctgtaatgcttccaggagtccaggggcaaaggtagcaaatgctggggaaggggggaggtcagacagctccagagggaaaggcagggttccagatgaggaaagaatctaaggaaagaaaaaagaaaaacaaactgttagctaaaaagaatctggaggccaaggaaagctgtgtgtgagggttcctgttcccccttcccctgactatgcatttacagctgtggtgctcctgcaccagtggcttgacctctctgtgtctatccccatttgtcaaagtgtgtgacagtctcaggcttcctggctgaactgtgaacagcaaatgacataacaaccaaagagacattctgagagctgtgaagggccttaggagagtgtgtgtcctaattctattgtgttctgaaggccatgggtttcctgtgtgtgaatggggtgggaagcagctagagagggcacggggccagaagcactgtggactctgccgaggaagctctgctgtttggtggccctgcagttcactggtcaggtactgggtagggaccagggaggtagaggctgtgtctggtggaatactggagactggggggcagcatgtaggtctgtgtccttgtgcctaagcctcaaatggcacaggcttcccagcaggtgaattccacccctcttccaggatatcatgctcatgccagaaagaagccaagaatcttctttcaaatgttggttcagacactaaaacaattacatagtggtatggcttcagtctatccagacccaggacactggccttccctgctgacccctctccagtgcccccacagcaacccttacttacttttggtgtgggttgtgttgatcagtttggtgcaatcctcatgttggtggttcaggtagtgacttcttcccaggcttgcagattggcatagagcattgcttgggtcttcctggtgtggagtccctatgtggtgtccaagaccgcagcccagttgagtgtgtcctctgtggcaggcatccagcacaggcatgaggaagagcatgctggggaccctcggagagaagtagggtgtgtaaaagtcttggcttattcctgagcagttagcccggagactacaacaagctaggaaaagtcacacggggggataaggaagccccactgcctggagggagagaggggagacaagcagaggccctggctgagggtgccagccaggcttagtgggtaagtctgaatcttaaaggatatttagtttcttcagaatttgagcttttaagcccagaaaggagacctaggctgcctcggtggtggggcagagcaggggagggcaaggattgggatcagcacagggctaaagtctagtgggccaggccctatctagaagaaacaatagaccccatgcatgcaaggtaggcccctttctaccttgtaggggggagagggtaggcaaaaataaggaaaaggagagggccttagagaaagaatctgtcgctgatcctagctgggggtaggctgtgtgcttttgagccctaggttgacccggaactgtaccaggctcttccctgccccttgagccacactttgactaaataaggtcaggtgaaggctctgtgggcagccacatagaggaagaagaacacatgcataccctggcccccaccctatcccgcctgcatgccctggtggctcttcaatggacaccttaaggtgacctcagcgttttcctacctggcaaagtccaggagttcatctccggggtgtgagtcagcggcttctccagagacctctggagggcagaaagcagagattaggctctgaaacaggccacaggttgtgattgctgccctctcagatgccccttaggaaaaggaaggcaggactccagaatcgggactctgttcccagaaccttgctcatctctggcctgtgccccttcttggggaaaggtagagaacccctctgccggcccttgccattttttttttctctaaaggagacccttagcagagggcttgcagcctaatctggcctcacaaggactagaggtgttctcaaacacctttttaatgctccttactcccaacaaatttacaagtctccctggaatgaggaacatcaccataccggtcttcctagctggaagcttcctcaaatctataggcacaaactcggagaggccagaaaagccagggatagaggctggtggatggggggaggggggcagcatgggtgtgggtggggggagacaggccagatgttcttggaatgggacacgggggtgattgatgcagactggaatttgaaaggggaacattccccacgtgcttcatgctccgggtggaaaatgggtggggtgggggctctctcagtcctgccaagataatatggagatgcctcgccctgtctaggtccccacacctgtccactgactttaactcctgcctccccagagcgttaggctttgagagtcctccctgcataccatcctctacgggtggttatagaggcaagccatgcttacagtcatggccccagggttttcctcattctcctgctctccagctgctcccctatctaacaccccacccccaccccccaggtcctgctagaatcatggcccttcacctccagcattgctcaactttgagggggtggccttgttcccagcaacagtacggtgagcctgtgtatggtgtgtgggtttaatatttgcctttaaggagctggactttccccagctaggattgggaggctagtggcagaaattttctgagaaaacgaaatgagggttctagcatccggcaacggtcaccactgtatcattctgctatgctctttccccccactttctcctctgctcccccattttttacccactttccacagtgcccaaacaaaactatttcctacattgttcatcgttagggagcggacacggccggataggcgtgtgttagcacaggggcggtcaagggtagccactgggggtgccccgggccccaaaactgagctagggacgagtctgcccccggcggctgcctggccccgacttcgcctaggctcgcggcgtctgagcgcgtggggcgcaggggcggcggggagccgagcggggcgccggaacctaaggagcctcggggagcagcgcgctgctccccgacgttccgcctccctctccgacgcccgtcccgctcggcctctgctacccaaaccctctcgttggctagaaggcgaaagaacgaaaaatgaagctggctcgggcgcgcgctctgtggcgtccgtgctcccaatctgcgtcgcctgtgcccctttcccgcgtctgggttcccccgtgagggcgcccctgctccgtgtgagttccttggcaccgcggatcctggcgccctgtccttcccggcccgggagctcactttctcaaattcagctctagttctctgtggtccccctacaacccgaggaacttaccggcttctctgaacctcaggacttagtttgactgagatccttgaaatttaagcattgctttggggggtgggggtgggggctccaaaatcggtcagcatttgttctgttcacagggaaaaggttttgttgttgttgttgtttggtttttattttgttttgttttgttttgtttttgatacttgctttccaaatattttaaagggtgggaattctgcctctgctgactcctcacaattagaatattttggcttgggcccccaagtttgcttctggctcctaaccattttaaatgcaagctcctatatatagatataaaaccaccattctcagttccctaaaatttaaagtaagcctgggtccttagtccttttgacaaaatttccttacttgggagagcggacattttgacagcatttaggcactgtctccaggggatgaggtagcggggtgttttccccatgttcctatcattttatatctgcagtaatgttcctgctgactctcttcccccgccacccgtcctctggttttattaacgtggaacactagattctgtagtctattgccctaactccaaattttacaagttgaatcccacccagacagctttaacaattttcctggcaccttcaaagtcccaacctttttttctatgtcctcccctaaatgtagacacctcaaatagccctcactctcatttctcggattccagaaaatggaaagagtacattcaccaatcacatctaaaattcacttaacaagacccccccccaaaaaattccacgaatacacactggtcacaaggctttggggctccctagagctcctgcaagcattctggccatggttagggttctttaaaatataaaatataaactctctcactaaagcccccaaagcaggctgagcaatgatgtaaggcatgaacttctatgtggcagagggctttccatgctatcccaagtcttatatgactgttccatgtctttctgggtcacagatggcacaaaattaactcttggccaagtcctttttctttatattagaatgttgaatgtctccaatccttgaacactgatcatttttttctgcatcaaatctgggtccctttaacttaacaatttggaaaaaaaaattttttttaactcagacaccaattgcaaaatccagtaccatcctgtatccttttcatcccccgtgttggctcatgcctggtgtcctcaaacattaggcaatattttccaggccccccaaaacacacttagtgttagccttgggtcacaaaaaggttctgatttctcccactgcaataccagctatacacccactcagcccccctacatttcaaacacaccccccccacacacacacacacactatcttgcacaatctctgcagattgcaaatttgggggattggttctcaggccccataatttaggaacccataatctctattccttgtaatgtagagactggccctgaaggaccaggaaactttagattcagaaattatcttcctgggcccccccaaattcaggtactccaaaacaaattgagatttttttcttccaaagagttcggtttttattaaactttaatgaactttgttgaatttatgacttctactggagtctccctatatttggataatgttttatggtccccaaagcacactgaaaaaaaaagtcccagatcccccaattcctaggttttaaaggtctgtgtcttacaaatttcctagctactaattctattccctgcaatttagatttcatcatccattgggtaatttttattgatccacaaaacagggagtatgtttctccaagaacaaacattgtccaagaaaacatacaaactcccccttgttcaacaaaaagatcaataggaatctgtttaggaaattaaaatattaaaagacattgattttttctggctttctcaaatggacttcttgcatttctaattccaccacatttagacagcatttcctcattctctagaggacttctctgaagccacagaaattagaggtgatttttcccgggtgttgtagggcccactggcttcagggtgaaccctagtctccactcccacccctcaaaagaactgacctgaattccctaaaatccatctgttgtttttcatctcccatttttaagcaattaaaattaagctcccctaaatttcatgttgggaattttcttaaacccaacagcaacaacaaaccacctaacttctacaaattagtctaggattttgtgggttccccaagctttctaaccaagatattgggttcccctcgttaggcctggatcaagatgccccccatttttgcatagaataattttcctcattccccaacttggattctaatttttctggaatctcaaatttagtcattcgccacagttttcccatttatggagtcgccttcgagtccccctactttgggccgctcattcccaggaccgcaaatcagacaagggtctgacttgggatccccgaaatttgatcattgtttccgctggccactttcggcagcttcccgtcctgcgcataacagtggtatcggcctcgtcacttctcctacggtgtcccagcggcagcacagattttggaaaagtgtgtgtgccccaaacacgcactggacactgcgcggcggccaggacgtgggcagtgttgctcccgtgtccaggaaaacgactgggcattgcccccagtttcccccaaatttgggcattgtccccgggtcttccaacggactgggcgttgccccggttcactggggactgcccttggggtctcgctcaccttcagcagcgtccacttcagcagctcccacttcatccgctctcccgcccttctcctccgatcctcctgcgccagcggacccgaccttcggccttgtggtgagctccccgtggcgcgctccctcgtgccccagctcttccactgcggggcaccggctacctcgcagtttgtcctcagggctgctgcggagtagcgcgggagcgggctgctggcttctccctcggcggcagcgctcctttgggctgggcgctccgaaacgcgcgccactttgtgtgcactctgcaaacaacgcggtggtagggaaagcgcctgggcggccaggaagcgggaagggcagagcgctcgggcggcttggagcctccaaccctacaggtcgagggcttggggaagcgagtgtagagcgcgggcgcggtgattgatggtcgggccgggaggttagccccgggtgcactggtttccgccagtagtggccctttagaggcctagaggtgcggaggtcgggagagggaaacaaggtgcaccggtttagaagtgattttgacttggtaaaaatcacaatggcttcttatatctgaaaccacccggggagagtttcttaatagcccggaattatcgcattggcccctggggccgaacctgcaactaagcaaattcaaagtgctgaggacagggaactgttatctgctcatactgggtggggtcccaaaggcgcgccgcttagaagcacttcagtgagctctggtttacaggtctggtttgagctacgtttcccgccctgcttctttttctgctgaagggcgcagacattgtgcgggggctccacgcggggcccagatttggcgtggccaagccagccttcccttcatggtgcacctggtggccccccaaaggctgctaggagatcccaggcaaagcagaggttaggggcgcttagtaagatctatctggctgctattcgaggtgcctcacagcccgccctgcctgctcaggcaggtggaggctgcgcgctccccccccccccccagccgatccaggggactgtcccctgcttagcaagtaggtccctgtgagaaccctctacccagctacctgcgccttaactcagtcggccgggatgcgcctaccttgtaaccctctaactgagcacaggtcctgccactaccactgaggcctagggtgccacgcacgttggttcgcaccacgcgcccatgttgcacaagcacagggcaccccggaaacatgacatgggacctcgatttttagggatagacacccaggatttagtgggcctgttggggcgcacagcccccccccatctttgccaccaggcactccactccccccccccaccggcaacccccgtgcccagggcccccgacccgcattccccgcgtggctcgagttgcgggggcggtcccggggcggggcgagggccctgcggacgcccattggcgcgggcgtaaggccagcggggcccgagcgggcgccgagccgcggggtggcgcggctataagaaccgggcgttggcgccgagttcgcctgctctccggcggagctgcgtgaggccaggccgcccccggcccccccttccggccgcccccgcctcctggcccacgcccgcccgcgctcggcccgccagcgcctccatccgggctggcggccccgcgtcgacgccgtccgccacctcgctgctgctaactcctgtgcagggcgccgtcggcgggccgcgctccgtcgggcctgcggatctccccaccgcctcctcctctatctacctcaacaccccattcctgcttcgccagaggaggcggtccccaccgcaggcagtccggcttgcaggtcgccggcgttgtcatcccccgcgcttcccctcccagccctccccggtgcgcagcccggctgctcccctcttttcgctgcagtcccgagcagctgagcgccgccacgcctgtcccccccacaagaagcccgggcttacgacggctgagggctccgtcgaccctaaccgagctgggtgcccgtggcggggtgacgcctccattcctcccccctcaacaccgtcctcggtccttcgaagttgcatcctctcctctgcttagggtgcgccccccctcgcgcacccgcttacccgccacctttcctaagctcccctcctgccccctccccgttcctcctcgcctcagactccctccccctcacgtccgccctctgccttcgcctacccaagtggattaattatacgctttctgtttctctccgtgctgtcctctcccgctgtgagcctacccgcctctcgctgtcctctctccctctctccctctctgtggtccccccctttcacgttcactctgtctctctcactatctctgccccccaactatccttgatacaacagctgacctcatttcccgataccttttcccccccgaaagtacaatatctggcccgccccagccctaagataccctaaagaagcagaagagacgcccccctccccaccaaaaaagccatctccccgttctgtcccgtcgcacattcggcctctgcgactcgggcagagcggcgctggcagaggagtgcccggcagaagggccttcgcccgctgttcggtttgcatacccgcagcagggagatgggcggcagcgtcgccggcttccaggtaagggctctcaggggccctgggagtggggggtgcgcagagcccggcttgggcatggcgggactggtgcggtgggtggggggctgggggctcgttccctaagcaaacttttgttcccccttgcgccatggagtgggggaaggggcgggggtatgggggctgttggggagggggtgtgtaagttgaactcacaggagacttcctggtgctttactgtgtgttggggaagggggggatggatgagctgcataaaatgtacgattcgtgctgtgcaggccctgtacacccccccccaagggtgctgagtgatgaggaggggggcagagtctccgaagcccaccctggtatgttgactttgtgccaatgagacaggaaggaaaagtgggtgggcggggccaagagccccccaaaattggtaaaagagtcaagccagaccccacagttagcttttccccccacccacacaccccaactctgtccccaacattcccaacctggaatgttggggggagaggggacggtttcgggctcagaagggcagaaatgttacagttcaaagagaaataactgcccctgccttttactgggtgtaactttccataggaggatgtgggaaggagccccctccctccccccattggtctgtgcagaaagggctgggggcgcacgatgaggcccccctcccactggtggtgctttgctaaggaatggtccaaggctagctcttgggggtgcaggagaaaagggactggctggaaggagggagggggcgggtgcaaagggggcggggggagtggtcagcagggagggggtggggggtagggtggagccgggactgggaggagccactcagacataaaaagcggaggcactgaccagttcgcaaactggacattagcttctcctgtgagaaccttccagccttttcctgtcttcatcctcttccagccccagcggcctccttacccaacttcaggtaaccagggctgtggagccaggaccctgctgccatccccactccggcttgcccagtggggtggtcagggcaccgggtagcctgaggcctctgcccttgcagccgggcctgctacctctcccaagccttcgttctccctcagcctctgtcctatgccccccactagatccaggcttccttacctgcccagtcctctacttttccttcctctctgcctccccactccaacaaattcgggccttccctgggccctcacctgtcccttgcctcctggtcaatctcctgcttgcttctcctggacacctgggctgaaccagccagtgtggtcttggctttgggaagggacttcgaggtcagctccgtctgcctgccccccgcccccagaactaactgctgtagctatagcctgctgatcgcaagtggttggtggcacagagggtattgggaggatcggtctgggtcttgatgaagtgggcaaagatgacttttagttacccaagggagctcgaacaaatttgtttcttgattattccgcactggtctctcacatgtttctttgcagcaagaaatcccctgggcctatggagcagagattgaggctgcggcctggagggctctacttaactgaagggtcaagggtggcttactgtgggtcatcgtggcctcccaccactaaaaaagctagctaaccattgtccccgcctgtagccacatagcctgtggagggggtgtgtccctccaaaatggggtgtttagcctcccaaggacccaaactgctgccctgggtaaatttagctcttatcagaaagatgattctatgggccataaagggaccctctagggtccctgaccatggatggcaagctctgaggtgcccaggaaagtctatacttggaggactgggtgaccctggagagcaaggctcacaggagtgctggctatcccattgcgctaaccattggattctgacatgggccctgctcaccatggcctgggaggtggggtggatgggtggggctggctctgctgcttagggaggggtggccagctggggggcgggtaggttgggaatggtccctttggatgcacatgctccatggtgggtggggtggagctatctgccatcttggccaatgcttggaggccagagtaggagtggcagtagtgatgtgcccttgggctggccccacccccatgatgtcatagcatggaaaccaggtccagtgtccagcactggcccctgctgctgtgggtgtggttaagctgcaattgcgcccatggatgggtggtcctcaagggtttcttacagttcaaagccaccacggggtgccttcctggggtccattgaatttctccacactcaaagtagtttttgacctcagcaattcaagtccccctgttttcacaggttaaataaatagtgacatggctgtctttcagattccaattgcatttttaattaagagatgataggtgtctttggtggggcctgggtgggggtgagccattctcctgggattaggggtgtggcttgggggcctctagctcaaagcctgcgtttctttctccaggtaccaatggggatcccagtggggaagtcgatgttggtgcttctcatctctttggccttcgccttgtgctgcatcgctgcttacggccccggagagactctgtgcggaggggagcttgttgacacgcttcagtttgtctgttcggaccgcggcttctacttcagtatgtaactccagagaggtgggggcgggggaagcaagcctccctggatggggtgacaattagtacactggtctggccttgctcttaagctaccccttcccccccccccccgggcaaggtcgtaatctcaaagtcacaagtctgatagttttaaaagtttttaaagttgataaaagcaaaaccaaatgtggatgtcaagtctcagccaggttgagagtgcacgtgtagtttgggggtacaaggggagagctggaccttggccatccaacttgaggggttcccaggactacaacatggggtgcttgcctgctttcaatgttcatgcttctcttgatttcccagttggggaaggggctgggcatgggctcactgctcacagaaggcagtgatggggacacatgggtggggcatgcctgggaggggcaggggcaccagaatggatgactatccttgctggcatgggccactctatcttcctcgcctggtcctggacacgcagcctcttcttcttcacttctgcctacctgcctgtgaactgctctggaaacaactactgctcatgggtactgcaggaccagtccttggtcgagagccactcctgcacggaggggcttcacagataggagggccccaagcccaacctcggaccgtgggggagagggggaagacgggagaagagaagggagtggtttttgggtgcctcactcctcccctcccgtcttgttctctcctgccctatcttcccttcctgtcacagttcagcgatgggggttgggggtgggcccctcaggacgggccccaagtacagggaccacacctgtgtccaccatggccccctcgaggggctcaccccctcctcctccctgttttccaaaccactccagtgtggcctctggtctccatggagtctgtgggacagtgaagctgtgctgtgttagttaccagacaggaggcaccagatgccaggggctggtcctgcagcatgcacctttatttttcctttctgggcatcttggcctgtctggctcacacttctaccacatccctgcagggtgacctagtatccggccagggtctagtggaagggcaggggtagttccttcttcagccttcccctcctggggggcggggctggggtggccaccccaatgggtgctgaccccagtagacactaactgaagttgtctgtcctgtggaacttccaggcaggccttcaagccgtgccaaccgtcgcagccgtggcatcgtggaagagtgctgcttccgcagctgcgacctggccctcctggagacatactgtgccacccccgccaagtccgagagggacgtgtctacctctcaggccgtacttccggtaggtagcgaggtggggttgaaggaattatggggtgagacaaagagaccactcacttcttgatttggggtaccacgaagcccccctcacacattttactgtcagcctctgctcattaacatagatatttcagggaagttgccctgaggtggggtgactctagtggggctggggatatgcgacacctagatgggagctcaggctaacatgataccctgaaacctgctgactagcacctcctctccaggacgacttccccagataccccgtgggcaagttcttccaatatgacacctggagacagtccgcgggacgcctgcgcagaggcctgcctgccctcctgcgtgcccgccggggtcgcatgcttgccaaagagctcaaagagttcagagaggccaaacgtcatcgtcccctgatcgtgttaccacccaaagaccccgcccacgggggagcctcttcggagatgtccagcaaccatcagtgaatcaaattatgtggtaattctgcaatgtagtaccatcaatctgtgacctcctcttgagcagggacagttccatcacgtcccacactaagatctctctgctccactccctccccaggtttctccttacccacccccatgccccgcctccccacatcaggctgttccccttgccccacaccatcgggcaaggggatctcagcagttctaaaaaaccaaatttgattggctctaaacaacccaattgacaccccccaaattatatattcacattaaaaaaaactttaaaaactacagtccctttaaaaacaaattggcttttaagaaattccataactgataatctaaaaattaaataactaaagaaattaattggctaaaaacatactaaaaattaattggcttaaaaacaattggcaaaatcaaataattcggcgccccccccccttcatcttctttccatttggatctttagtcaaattggctaagacttggatcccagaacccaagaagaaaggaaggggacccaaaattttgcaggtggcatgtcattgcttcagtgccctctccttatcccaagcacctttagtgtaaagctggctgagaacaacaatagccgcccaaactctttcttcactggtcattccatcacaaatgtcccccatgtcaccaagggggctgggtgaaagaacccaaggagaagaacagaacatgaaaactggaaatagaacttaattggcacaagcccccagtcccaaaatctcacttttccctacctaccctaaaaagcacatgattatactcacacccacaggcattaacacacacatacacataacacatatgcacacacacacacacacacacacacacacacacacagaggtatgcacacccacataattggatgaaaacattgaaatggctgaacaacttcgatttgaaccacattccccaaaacaaggcccatcccaaatttcctgagcagtttgcatggtttgagctctcctcccaatccatctagtttctgctgctgcttattggctctatgtgtgaccaggctgctagttctgtctttctcagtgagggaggtgttctagcaaggctcaattccatctaagcacctgtccacatggtgagcccggtgctccccaaccacccccgccatgaggaccaatgactagccagtgtagaataagtttggccagataaggagatggcactgccaagtgatacatgctgcccaagtaacctgacccctagttgtgctcctgggaggaaagatctgggggacaacccctaccctgagcacacctatgggccatctttgtcagtctcctggggagcccccgctttttaggggctccccagagactcacactgatgtggggagtgtgggaagtctggcggttggaggggtgggtggggggcagtgggggctgggtggggggagctatgggtaggaagtggtcccagagaggttttaggtggaagaatcaggaggagtcacaggtcaacttgcagaattactgaagaattaggaccccaaattttatgccaattgatctattcccctctttttatttctggggccggttttttccttttttttttaatccctccttagctttttatgcgctcataatcaattgtacccattccctacataacgggagcagtgatcaggtaatgaatgcatcgagccatcaacaccagctagagccatcaacaccggctaccacaatgtcctgctctccacaaccttgatttttttttttatctctctctatcgcttggcctgagttgggagtggagtctctgtggggtgctggccacgcacccacagagaaataaaaggaattgagaaggtcgctacctggcctgacttctggggacagtggctggtccccagaagttctgaggagtggagggggcgtggggcagtgtcccctcaggtgttaggaaggtgctcggaggccacaaaagatggggctcccagctggccactgccagttgggggggaaggggatagagatgtgagagtagacaggttacatcaggcgggagcaagtggctgccttctgagcatttgggggagaacctctcccgtccctcagtgtcatcttgcccactcctcagcaccccaccttgcccccaggaggtctggagctctacagacctcctgggggcaaggtggggtgaggcccggagttggggaagctaggaggcttaaagcctacagagccaggagaactgtatacacggggtcatctgggccctggggcctgagggtctggcgagccgtagcagccactccacggtgcctaggactgcggcggggaacagggcggctggaggtttacctcacccccacttctgcttccagtgcagtccccctgcccaacagtccaactagcaatctagaggcctgaggcttctgggcccaggtgacaggactggcaccaccctgggggcggtgtgtgtcagccaagcatggcacagagggtccctcagcaagtgcctaaagaatgggccatttggaacattggacagaaactcaaagagtaaattgttataattggagactatgaattggcctggtatccaaaacatctcgaggcaccctaaattacctgcccatttggctggacacccacccagtgttaatatgcctcgtgggatgggtgctttcaggggcatttgctgaccaccctctgtgtccccacatttgcagttctccccatcataggtcaccttgatgcaggcacctccctggcctcctatgcctagtgtggccctccatcttgtctcttccctactgtcttcagtgggatcccctcttgggtccctccctttgtcatcatgtgaagacttcccacgcgtcgaacgccatatgtcacctgtgccactgtccatgtcatccagcagtggccccaggtgtttgcctcaactcagtccctctaacatgcattttctggcaaaatccaaagcttgggttttgtttttaacctgttaacgctcgcaaacctaataaagcatttaaaatactatttattgagttctttgctcttttatttgggggagggggcaaagggagggaggggaggagtaaagggtacctgatgcgtgggggagggggacatggggggcagcagatgaagaggaaaagcctttgaagtatgagaagaagtagggctcaataagccactctgaggaacccagagggtagaggacatttgccctaagtcctcaaagatggggtgctgtggtgctaaaggggtcccatgatgttttcggatgagccatgaatacctaccccagggaacattgcccttagccttgggagttggggagcaagatgggtgaggacttgtggttggtgatggacatggggactcagggtgaaaacacctaagatggtttccctgcacatgcagtcatccctactgttccctctataaaggctatgctagagtctgtccccagtagttattagacccacctgcccaatggtagtggtctttggcatccctgacactgggagtaaagtgaggccaacccctagatgcttgaaacctggcctgggtatcttctttctgcacctttacaagtccttagtcccccacttttcctagtgcaagtgggcacatgcccttcccctgtgggaggagcccaggctggggcagcgctgagatcttgtgcctggcaccctgctccttttccccagttattgctacacactagcatttctttttactgtgtttggctagttttttgataaagagtctcacactctaccccaggcaagcttggaactgcacatggatggatgtccatgctggcctggaactcatggcagtctcaatcctgccccagatacctgggtgctgaaaatacaggtgcaagccactggttagcattagcttttagttttgtttgcactctagagtctctgctggtctgctaaagggggacttcaggacagcctacaaatccaagggctgcttttaaactcagggtacacccatccattgccctacccaccctatgtcctacatccacccacctatccttgcccatttacccattcgccacccatgcacccactcaccctctcatctatcccccatccactaatgcacacattcatctacctatcaatctatctacctacccatccatagcatctatatgtctgctatataaccatccatcaagccacttacctatctgccaatttgtcctcaacccacctcccatctatccaccaactcctctacctgtccattcagccacacatcccatatcaacctattcatccacctaacctctcatctacctagccatatgtttacccacctacccatcattctacccacccatactctaattcactcaccaacccattcatccacctattcactcattcatctacctaccaatctaccaattcatctacacccattcatttattcatccacccacccatctatccatctacccaccactcaaccatctattcatccacccatccaccatgacttgttcatttatctacccactgactcattaagtcacctatttgtccatctgcctacctgctcacccatccacccacccacccaccatctgtctatctatccattacccacccactatccattcacctatcacttccccattcacacatgtgggtgggcatctataatgttcaggatgcctcatcaggggctgggtgagtgtgatggaagtgctgaatgggcctcaccaagaagatgacacacagactgtagaaagtatagagaagaacatgtaaggggtgggatacacatgcctagacctagagcattagagcatcatcacttggaatggggtagggtttcagcagcaggagggacaaatgtaagtgatgatgtcagagctggaacaaggtcaggacacatgggccatctaaaaccattgctatccactcagcaaacacttatagacatctcttcactgggttgaatgatgtcctccagaaatacatatttatctctggacactgggacctatgaatgtgaccttatttaaagaaaagaagggccttcaaaattaaagaaggactttgcaatgacattattttgaatttagggtaggcctaactcaaatgaaagttgtcctcaagagacctgagaaggttacatatggaataaatttatagacaaagacagaagcagggactggagttatgaagtcacaagccagaggatgcctggtggtccttggaagctggaagagttaggaaggaccacaatctggagtcttggaaaggagcatggccttggcacaccttgatattaggctcccggtctttaatgaaatgtgttacgattgtagaagctcccagtttgtggttgtttaggaaagggattacactagagtgccctcattctgttatagtacagcacaggtctgggtatggaaggtcccacagcaagagcttctagttagtggtctaaccctgccaggccacatctccattgccctacctgttccacttaccttcctgcagcagctcccaagtggtggtacgtgaaacaccagacaccatcccacttctgcttggaacatgctagatgcttcttgataagccaaccaactcgtggtgaccagaagccaccctgatatacccagccaaccactactatccctaacaattgtcccagtcacaaacgcctgatatctggggacctttgaccccctgcaagggctgcactgtctggaccacttcccgtgagagacctgctccgagcacccttccttcacaaagtctatcctgagtaccctgtacacaatggcatttcacatgtatggattccacaaagcctctaggaataaagagaataggcttcaattggcaccactcatgcccatttgttctcccaggacatcctaaaaacctttccaccccttatctccatgcccacaacctataagacagactctaccacacacacccccagtcatattcttcatgagagcagagtgatgagtccagatcttgtctttctccacttagaatctgtggctcacatggactgttgggtgaaactcagagactggctatgctttgggttcttcagcatataacattggcccatatctcagttgtcacataccaattctttcatctcttaggttccctcactcagtgtccccacacccagtcctgaaaggtggctgtcctctctcccagaccctttggtatctggcatcaccctgattgccttggcatgccttctgctatcctgggcagttctttactgaacccccaaatgtctgatcttctttagatagcagttggggccctttccctgttccctagagatgcagagatatgcaagacgtctgctttcaggttctcccagaatttgcctggatttctctgtagctttcacttgcagagctggccacagaaatggtccttctgggcaccccaggacaacctcttgggagacccaggcttatccatgtccatcttcttcaggggtgggtactagtcttccctggcctcttactcttggactaagtccctggagtaggatcagactcatctttaaacacttgtttccacctgccttggtgtactgacacccagggtcctcaggtctccccagtccctgaggcctggctcccaggagctcttgcctaggcatagacaggttggggttagaggcagtgccatgctgacagtatcctccaagcctggtctctctacctgctctgctgagccctgcccctgcccagcccccttctggctgctgggccgaggcctgaggcctcattagcgcagcctgcagcctctcccgctcccagccccagccaacccaggcctctgccggccagaaaccaaagagaaaatgcctgtttatgccagttatgccgaaagcaaaacagtttgtggtttgtgacccaaattttttgccttttttttttcagaacataacaaagcccaagacaactccctccctgcccccaccctccccccaggcagacagaactgatctgtttacactggctgctatgcacccccactggcctaggctctggccttgccctcatcctgagtactgggcgcccccagaaaggagtttgtaggcctggtgaagtggcaaggaaagtgaaggaggcagaggaggctctgtctcccctggggcaatggaaggatacatctggagtctagagtacagggctcagtcagactggatccatcctggacagaggaagaaggtagggaaagcatggtgcagttgatccccaggtctgccctgaggtgccaaagcttacctccatttcatgagactggtgcctaggccaataggccctcagaccacctgtccactagcctccttcctgcatctcctcatccctcaaggtccatggtgccctgaagcctacagaacaggaatgtcttctgtcaccatgtcctcggtcagggggtcaacagatgaacagccaggtattttctggtggccattgtgaaagtatgaactacccctgaggagctggctgggattggttgcttgaactgtggaagtcctgtggtcagggctctggccataaagaaagaaggacagggttcccacttgctcttgctttcttgggagacaggaagcctaggcaagccttttcgttgaaccgtatcacagccccaaagcagacactctctcactcctcctaggaaattctagtctacactcgttttcattctcctgtgtctgtaccagtctgggtcatagaaggggctcctctgagtcaagggggccctaagataagttccaacagaggagacagaaggatggcatctgggcctgaaaaagacctccctctaccatgagaaattttctgcccttgcatctgaagagggtggagcaggaggacctgtatatggaagtctggaagagtgtctttttgaaaggacaatcaggaagacaaagggccccagggttgagtcctggctctgaaccttagttcaacctgccaaggctctgggtggcaacaggtagtttttagggagagaccaaggcacccagataaagtttaggaaagatggtgtacataaaggatgcattggagctggggaaggtttgtggggtaatgatagttggagcagaaggggcaggattgggtggggagcaggggcggtgctccagttgggaggagcacaatatgaggagcaccaacaccattgcactaactagggtggggtgttcttcccacccttcccagcctcataaagagcaggcctgggctcatctgctggtggggttgaagggtaagcaaagagtactgcctcctgccctgtaggccattgggggctgcccttggcctgcctggcaggctcctcttgctggcctagaggattgcttttgggaaagtctgagcagtacctctacttccccccctcccttgcctgccatccctggcctcccctcgatcaggaccagatgtgccttggagcaggaattctagttattttgttagccagccgcttgctggactttctgataaggcaaattggttctctacagagttgggcgtggaagagtaggagaaggaggagagagaacaatatgcccaccctctcatcttcctgtgccagtgacgccccagagaggttcctggcccaactccagaagcttctttctgacacatactagggtgataaaaggtatgctagtgcccaggagatgaaagtgggctaaactcgtggagcctccctacaaagcctggtaagaggcaaagaaatgcagagcagagtccctgcagtggtgctgttggtagctgatgccatggttgaactagtcctttaatggttttgcaaccccagatctaacaaagaacagtcaggctccccggtacatctgggatctcattgcttcccatttgtgagaaccacctaccttcctccttttcctttcctttcctttcctttcctttcctttcctttcctttcctttcctttcctttcctttcctttcctttcctttccttttttcctttccttttttcctttcctttttcctttccctttctcctttccttttttcctttcctctttttcctttccttttttcctttcctttccattttttcctttccttttccccttcctttcctttttccctttcttttccccttccttttcctttcattttccctcccctcccctcccctcccctttccttgttagttaaaattcctatcagaactcagaagagcaccctagaaccatgaggatggatagaattccattcttgtcagaatttcattctggtcctcaagatgatcataggaaacagaacacaatacatctttataaacctgatggacagccaggctgagaagatagccaggctcacactttacaaagccttgtcctgtcctctcccaaggtcctctttggacctttcccaggttcaaagaggacctatggccctcctgttggatctggagggccactcattctggaattgggccctcagatctgcactttgggtccctgcattccacaaaagcatattgtttctattctgtcaatgacattatcttgctagggcagttttgaatctcaaattgatcttccagcccttggcttatatcttccagaactgatctttcaatgtctagactggtacatgctgaagagcatgaactcaatgtgggttgcataaatggggtggggtgggatatagggatgtatgaatgtatggatgaatagatacaagaatgtgtgggtggtgagtaaatagaaggatagatgggtggacacaggcatgatcatgcagatagattgatggatgaaaagatgcaaggatggagtgaatagagttgggtgagtggatatatgtataggtgagtagatggattaactgatggataggcttataaatagatgaaaggatagataaatggatggatggatatatgcatcaatatatgggtgactggcagatggatagatgcatgaatgtgtgactagactgatggtttgatgggtgagtgggtgaatagatagacacatacatgatgtgtaagtggttagatggatggatagaagataggttgaagatggatagatatgcgaattgtgaaaggttggatggatggtagataaactcatgaatgtgtgaatgttttgacaggtttagaaaggcaaatggatagatgtgtgagtatatgagcgtatgaaaggatagctggagagaaaaatgactgggaaggttcatgggtgtgtcagctgtacacccataagcatctacctgagttctcatctgagatggtcttggtgtagaatgaatgacaagagtaaagacactgtaatttatggaagtacccgtttccatagtgtgtgtgctcattctggttgtactatatcctccttctatagtctgtccaagagtaggagttgtgatatgtttattacttatgtcttattattttttatttattataatactgtatactatatattatatgatgtatgtcacatataatatataatgcatgatatataatagatcatatatcttagaataatataatatacaataatataacatacataatcattatataacatattaatcataaatacaatatataatataataatttattattgtttataccttgttatttgtttattatatcttatatctaattattaattaaaacataaggttagtatctagctttttctggagggcctagaaaaatctaaaaatgtcaacaactagacttctacctgaaagttataaactctctcagagaaagtgtcatagttttatgggcaggtttctaaactctaaaattatcactatgacttataaagcacagaagatgtttatcataaaaccctgacaccaaacccaatcatggtagcacaaaaaaggaaaacccacagtttcaagtcacatgtgaagaaagatacaaaagttacccatcaaggaattagcaaactgagtctggcagtaggttgagttaaagtaataacatgatatggccaaggatcatcagcttccaggaaggcaagggtgactcattagtgaaaaatccacttaatatcatcatgtaaataggccaagggaagacaaaatgtataaaatagagatgtcccagaaatatatttaataaaatccaaaatgtatttccagtattcccagttaataatacatgcataaatggctagggctcacctcactctggtggtacacaacttcagttccagcactcaggaagcagaggcaggaagatctctgagttctaggccagctttgtctacagagtgagttccaggcaagccaggaccacacagagaaaccctttctcaaaaaacatcaacaacaagcaaacccaaaagaggctagggctcaaaataacttccctgaatctaagagaagatctttgttcctgagtctcctggcagcccatcacccaccacccgtgtctctgtcactcttctgtcactgtgataaaacaccatgatcaaaagcaactgacagaagaaagtttattttggcttatggctccagagggtacgagtccatcacagagtagaggcatggcagcaaccagcagacatgatgaccacagagggaaagctgagagctcacatcctcagccatgagcatgaagcacagacagcagactggaagtagtaccaggcttttgtctcaatttttcatcagtaagactatcccgcctaaacctcctcaaacagtgccaccggctgtggactaagtattcaaatgcctatggggcaaatgactatggaggacagttctcacttgaaccattacaacctgactttgtcgtattccattcacaccatcatccatgtctccttactttacatcacatcgtcacatgagctacctggtctcccatctcaccccctaccatgctcgtcaaggtcactctcaaacgtcttttttaaatgaattttaataatttatgtgtctgagtgttggcctgcatgtatgtctgcataacacccgcgtgcctggtgcccagggaggccagaatagggcatcaaatcccctgtaactggagttacagacagctatgagctgtcatgggggttatgggaatcaaatcagagccctctaaaaaagcagcagtgttcttaagctctgagccacctatccacccagatccccaaatttctcacagctaaatgtaatggttgtttctgtaccagacttagcagctcagttgcaccatggctgctaaagtcccatttgattctgaagttagcagggttctacatccagcattaactatcaaagtcctaacagcagcactcttgtagagagaaactattaatcctgagctgcagaaaacaaacaaacaaacaaagacctgggttctccagatgatgagccaaaacaggtggattctgaaagaagagttaaggtgcaaaatggttgttaaatttggaatagcaagtcagccgtgtttctaattggagaacactcctaccgtgataaaaattcattaaagagtgagaaaagaatcctaaaaagtggtcaaataaaatatactagttacttttgatgttgctgtcaccaaatgcttgacaagaagcaacttggggaagggaagcttgtttgggcttagatttaagggagtgtagtcagtcacagtggggcaaccatggtagcaagagcagtttacagcggcctccatggaagctttctcacatctggatgggtcaagaatcagagagatcagaagcggtgctgggggatgcctggatacttgttgttggatatgcatcaccctatctagcaagcacctctgaattcaagaacaggcaggaggtactgcctggggcttggaagacctagcaaagaggggagaaggctatctaggaggaaagggcccagagacctgtgttcttctacattataagaaaggcaagggaccactgaggagcctgtggcctaagcaggatggaagaaagagtgaccctcgggccttacacatgccgaagctctccttttt

SEQ ID NO: 106 - DNA, 4525 bp, Mus musculus
agcatttcctcattctctagaggacttctctgaagccacagaaattagaggtgatttttcccgggtgttgtagggcccactggcttcagggtgaaccctagtctccactcccacccctcaaaagaactgacctgaattccctaaaatccatctgttgtttttcatctcccatttttaagcaattaaaattaagctcccctaaatttcatgttgggaattttcttaaacccaacagcaacaacaaaccacctaacttctacaaattagtctaggattttgtgggttccccaagctttctaaccaagatattgggttcccctcgttaggcctggatcaagatgccccccatttttgcatagaataattttcctcattccccaacttggattctaatttttctggaatctcaaatttagtcattcgccacagttttcccatttatggagtcgccttcgagtccccctactttgggccgctcattcccaggaccgcaaatcagacaagggtctgacttgggatccccgaaatttgatcattgtttccgctggccactttcggcagcttcccgtcctgcgcataacagtggtatcggcctcgtcacttctcctacggtgtcccagcggcagcacagattttggaaaagtgtgtgtgccccaaacacgcactggacactgcgcggcggccaggacgtgggcagtgttgctcccgtgtccaggaaaacgactgggcattgcccccagtttcccccaaatttgggcattgtccccgggtcttccaacggactgggcgttgccccggttcactggggactgcccttggggtctcgctcaccttcagcagcgtccacttcagcagctcccacttcatccgctctcccgcccttctcctccgatcctcctgcgccagcggacccgaccttcggccttgtggtaccaatggggatcccagtggggaagtcgatgttggtgcttctcatctctttggccttcgccttgtgctgcatcgctgcttacggccccggagagactctgtgcggaggggagcttgttgacacgcttcagtttgtctgttcggaccgcggcttctacttcagcaggccttcaagccgtgccaaccgtcgcagccgtggcatcgtggaagagtgctgcttccgcagctgcgacctggccctcctggagacatactgtgccacccccgccaagtccgagagggacgtgtctacctctcaggccgtacttccggacgacttccccagataccccgtgggcaagttcttccaatatgacacctggagacagtccgcgggacgcctgcgcagaggcctgcctgccctcctgcgtgcccgccggggtcgcatgcttgccaaagagctcaaagagttcagagaggccaaacgtcatcgtcccctgatcgtgttaccacccaaagaccccgcccacgggggagcctcttcggagatgtccagcaaccatcagtgaatcaaattatgtggtaattctgcaatgtagtaccatcaatctgtgacctcctcttgagcagggacagttccatcacgtcccacactaagatctctctgctccactccctccccaggtttctccttacccacccccatgccccgcctccccacatcaggctgttccccttgccccacaccatcgggcaaggggatctcagcagttctaaaaaaccaaatttgattggctctaaacaacccaattgacaccccccaaattatatattcacattaaaaaaaactttaaaaactacagtccctttaaaaacaaattggcttttaagaaattccataactgataatctaaaaattaaataactaaagaaattaattggctaaaaacatactaaaaattaattggcttaaaaacaattggcaaaatcaaataattcggcgccccccccccttcatcttctttccatttggatctttagtcaaattggctaagacttggatcccagaacccaagaagaaaggaaggggacccaaaattttgcaggtggcatgtcattgcttcagtgccctctccttatcccaagcacctttagtgtaaagctggctgagaacaacaatagccgcccaaactctttcttcactggtcattccatcacaaatgtcccccatgtcaccaagggggctgggtgaaagaacccaaggagaagaacagaacatgaaaactggaaatagaacttaattggcacaagcccccagtcccaaaatctcacttttccctacctaccctaaaaagcacatgattatactcacacccacaggcattaacacacacatacacataacacatatgcacacacacacacacacacacacacacacacacacagaggtatgcacacccacataattggatgaaaacattgaaatggctgaacaacttcgatttgaaccacattccccaaaacaaggcccatcccaaatttcctgagcagtttgcatggtttgagctctcctcccaatccatctagtttctgctgctgcttattggctctatgtgtgaccaggctgctagttctgtctttctcagtgagggaggtgttctagcaaggctcaattccatctaagcacctgtccacatggtgagcccggtgctccccaaccacccccgccatgaggaccaatgactagccagtgtagaataagtttggccagataaggagatggcactgccaagtgatacatgctgcccaagtaacctgacccctagttgtgctcctgggaggaaagatctgggggacaacccctaccctgagcacacctatgggccatctttgtcagtctcctggggagcccccgctttttaggggctccccagagactcacactgatgtggggagtgtgggaagtctggcggttggaggggtgggtggggggcagtgggggctgggtggggggagctatgggtaggaagtggtcccagagaggttttaggtggaagaatcaggaggagtcacaggtcaacttgcagaattactgaagaattaggaccccaaattttatgccaattgatctattcccctctttttatttctggggccggttttttccttttttttttaatccctccttagctttttatgcgctcataatcaattgtacccattccctacataacgggagcagtgatcaggtaatgaatgcatcgagccatcaacaccagctagagccatcaacaccggctaccacaatgtcctgctctccacaaccttgatttttttttttatctctctctatcgcttggcctgagttgggagtggagtctctgtggggtgctggccacgcacccacagagaaataaaaggaattgagaaggtcgctacctggcctgacttctggggacagtggctggtccccagaagttctgaggagtggagggggcgtggggcagtgtcccctcaggtgttaggaaggtgctcggaggccacaaaagatggggctcccagctggccactgccagttgggggggaaggggatagagatgtgagagtagacaggttacatcaggcgggagcaagtggctgccttctgagcatttgggggagaacctctcccgtccctcagtgtcatcttgcccactcctcagcaccccaccttgcccccaggaggtctggagctctacagacctcctgggggcaaggtggggtgaggcccggagttggggaagctaggaggcttaaagcctacagagccaggagaactgtatacacggggtcatctgggccctggggcctgagggtctggcgagccgtagcagccactccacggtgcctaggactgcggcggggaacagggcggctggaggtttacctcacccccacttctgcttccagtgcagtccccctgcccaacagtccaactagcaatctagaggcctgaggcttctgggcccaggtgacaggactggcaccaccctgggggcggtgtgtgtcagccaagcatggcacagagggtccctcagcaagtgcctaaagaatgggccatttggaacattggacagaaactcaaagagtaaattgttataattggagactatgaattggcctggtatccaaaacatctcgaggcaccctaaattacctgcccatttggctggacacccacccagtgttaatatgcctcgtgggatgggtgctttcaggggcatttgctgaccaccctctgtgtccccacatttgcagttctccccatcataggtcaccttgatgcaggcacctccctggcctcctatgcctagtgtggccctccatcttgtctcttccctactgtcttcagtgggatcccctcttgggtccctccctttgtcatcatgtgaagacttcccacgcgtcgaacgccatatgtcacctgtgccactgtccatgtcatccagcagtggccccaggtgtttgcctcaactcagtccctctaacatgcattttctggcaaaatccaaagcttgggttttgtttttaacctgttaacgctcgcaaacctaataaagcatttaaaatacta

SEQ ID NO: 107 - protein, 351 aa, Mus musculus
SFATVFPFMESPSSPPTLGRSFPGPQIRQGSDLGSPKFDHCFRWPLSAASRPAHNSGIGLVTSPTVSQRQHRFWKSVCAPNTHWTLRGGQDVGSVAPVSRKTTGHCPQFPPNLGIVPGSSNGLGVAPVHWGLPLGSRSPSAASTSAAPTSSALPPFSSDPPAPADPTFGLVVPMGIPVGKSMLVLLISLAFALCCIAAYGPGETLCGGELVDTLQFVCSDRGFYFSRPSSRANRRSRGIVEECCFRSCDLALLETYCATPAKSDVSTSQAVLPDDFPRYPVGKFFQYDTWRQSAGRLRRGLPALLRARRGRMLAKELKEFREAKRHRPLIVLPPKDPAHGGASSEMSSNHQ

SEQ ID NO: 108 - DNA, 39533 bp, Homo sapiens
tgggctggggatggctgggcctggggctggcatgggctgtggctgcagaccactgccagcttgggcctcgaggccaggagctcaccctccagctggggacctggccactggggcagccctgttcctgaagctctgagctcaccccttccccatgaccacatcagcccccctccacccagagatgtcacagcccccagctagccccgcctccagagtgggggccaaggctgggcaggcgggtggacggccggacactggccccggaagaggagggaggcggtggctgggatcggcagcagccgtccatgggaacacccagccggccccactcgcacgggtagagacaggggcgccctgctggagctgaggtatgtgagctcgcgcggggctgggccaaagcggggcccggtgggccggctgggaggctgcccaccagtcagccatcggccaagctgttgccctggctgaccctgatggccaacaaggccgtagggagtgatgggcagaggccccttctgggaggggagggtcagtgctctgtgggggaccgtgtgttggagtggagggcagcaggaggagccctttggtgtccagggactcctggagctgccccagccttccaggacttgcagggcagctggcactggctggtgctgggggctgaggagtgtcttttgaggggccaaattttctgtgacttctgtcctgggggacctctgacctgaggcctcaggagagggcaaggccgcccacccaaaagagatgcagccatggttcgcggtgccctcggctgccctgggccagagctggggctagctttcaccttgttgagacccaggactctgtcccccaagcctgtcttcgccagcgccttgaccccacccctcatatactgtgtcctggaaaacgtggacacgggagaccacagccagggcgaggtatcgcccctccatccccccaggcccaatgagaagcagttggccaaggtgatccaggtggcagaggcagcatcagacccagtctcctgtcaggcaccaccttgggtgccggtccccagatgccctggcggggagtgtgcatgctcccggagcccccaggtcaccccatgtgagccaggcccacagagcttggctctgcaatgcctgctgggctgctgcccatgctccaccccttctgggaagctaaaagacagcccttcagtgtccagagacctgcctggccttggagcctgggtttcacatgcccaccgggctggcaggggcactcagctgcctccagccccggcggtcaccctggcattgggtccatctaactgctccccagtcacaaggcagctgctccccaagtctccccaaacctgctggcccctctagaagcctctgtccattcctggaggaccgagggcagcctgcatgccatcccgcacacagccttctgtctgggcatcctgccttcacacatgctgcacagggaggaaactcttataccacattccttaagcagagactgaagcctggagccaggcacatggcacgtgctcccacccacccaggacacactgcggtgtggctgcctccaggctggccccctagattgcgtctgctcctggcatggataactggcgcctttgcctggccgttggggcagtgtttgccttcccctgtcggcagcaaatatttactgtcctccgtctccaggactctccaggcctgagcagaccccggggggatgagtgtggactcagcggtgctgagggtagccccctgcccttcgggtcctggtgcccagcaggggtccagcccagggaagagactgaggccaggacaggcagtgtttaagcctgagtttctgggaaaggtagccctgggcagaacttgggccgaacgttggccagtgtctctctccagccaggctgtgaggtagctgtttccaggatgggcacctttccacacccagcaatgtggccaggagccgccattcacgggtgcgaccagcagatggcatcagagcctcacttttgatgcactccggccaccagccacgggtccaggttctggccaccacccagggtctgagcagctgcatcctgcccctgccgggcactcccgggggctgtggggcctgtgggggccctgccagacactcttgggggctgtggggggccctgccaggcactcccagggactatgggggctgtggggggccctgctgggcactctgaagggcatggggcttaggaatgagaggagctgtctgatgatgatggtgggggcactgcagaggcccccggcctgctcaggtccagtctcggcccctaagtcaagcctcaggccagcctctcaccagcctgggtttctcagagggccgggacaaatgttctgggtctctaatattccaagaaagcctctggctggactctgagccccacctgcgagcccctagaatcacagagagctagggtgagaagaccagggggactccgtcccaccctcgtcgtggctgagcccactgtggccggtggtggaccaggctgtggcctttgctgagggtccccagggcccctgggggctactgaggctggaggccagcggtggccaggagggtccctccctcagccactcaagccagaaggtcgagtcctggtttctatgtgaggagggggcttcaggggctgggacctgggggcaccgaaggcctggagctggggtccaggcggctgagggttagtgcgttcccacgctcccctccgccagcgccgtgaggagagggaggtccactctggaaagaatgtttgagggcaggggtagacagggtctgggaacgcggagatgacacactggggtgccgcctccgcaccctccgcccttcctcccactattgtttctggcctcggccgcaggaacagcaaggcagattccttcgaaagtggggccggccggaggcggcaccccatcgtccctctcgcggcccagccgtgctgtgctggcgccaagctccccgccggcctcccacgcgctcctccgcgtcctcagctcactcctctgctcccaggtggccccagtcctcaccccacctcgcttggactccccacttcctgcccatctgccgctgttgggagaccctctccctgaccccagggactgctgaggcagcctccaagcctcccagtgtccccgaggctgcccctagaagctggcttggggctgtaccaaaaggtcaccccacagtccccactccaaggcaggttgatagcagggatctcagggtgcccatggatcaaggactaagtcagagtcggggtccctcaggccgagggtaacgtaggtggtgcctgccaggctctcctcgcccaggggggctgagaatgtctaaacccgggtggctgtgacccctaggcagagccagcccagcccttgccagggatggagaccggcctcgaggaggccaagccctgggggtccacaggcctgtgggcttcggggaggctctgctccctgtggccctgtgtggcccaggctgctgagtcatcagaacctcgggggcgccgcgggccccacattccgcccaggcctctctctgacccccttcccagcccatctgtgtttttggaaaacagagccagagccccccgcggccctgccagcttgcggctgctcacgctgggactcaaatcgcacccttctgtcttcaaagtccaccttcacttcaaagctcggtcccaccccagcccggcctccacagggccaccacctgcccacacccaggcccgctgctgcccagtttcggagggaccttgggcatcccctgatcctctctagagcgcggggttcctggcatgggcccgttacacatgggtggctcggtgggtggtgaggacggggctgggagaagatcctggggaccccatggtggaggcaatgaggcacccaaaccccaactccagcgatggctgcttccacggggccctccgagccctgaccttcaaggtgcaagaaaagctttcaggggcaggggtgagtggaaggtgggcttcctcccttgccacctggggggcgggcccaggacagatgctccgtgagagcacttcccaacctaggcccagctgtggggaaggagggagcaggcggctgggctccaggcagggggaagagttgcctgagaactcagggagagagggagggctggggcaccccatgccagctccagctgcagcaccagagctcagagcagaggaggcaggagccagcaggctgggaggcttcctggaggaggtgtcccaggcccctgccagcactgcagccttgagcacgaggccacgctgggctcctgcttccagggccgcagacccagcccagcactgcccatgctgcccttgccagggacccttacagagctagcacctgggtccctccccctggctgggcatgggctggtctcgacaacaaagaaggggtagctgtggcctcaaggtctacaacaggttgtgatctgtgggtgccaagaagtcatgggccctcagcatcctcagggccagtgagtgtccacctgggccagtgtggggctgaagggtgagagctgagaggcggggctgacatcctggctctgctgccagtggctgtgtggccttgggaaagtcacttagcatctctgggccttggtttcctcatccatcagaagggaaccaaagaaggccctgcctgcctcagctgctggatggtgtagctcagtgttgtctgtgagaggcaggcccttcggcagccgcgcctctggcttcagtacacccgtgagctgctttctgtgcccaggccttcaaatcacggggacagccccgtgggtgtggttcaggtctgggcaccacaggcaaggggaagctgacatgtcctccgtgggaagtggcagtccccatggctaccgggcatgcacagggcgtgtggaagggaccttggagggaggagcagctcctcgagggaggagcccggggctggggtacggaggcctctgcacatcttagagtaaaacaagcaggagaggctgggtgcggtggctcatgcctataatcccagcactttaggaggctgaggcgggcagatcacctgaggtcgggagttcaagaccagcctgaccaacagggagaaaccccatctttactaaaactacaaaattagctgggtgtggtggcacatgcctgtaatcccagatattcgggaggctgaggcaggagaatcgcttgaacctgggaagcagaggttgcgctgagccgagatggcaccattgcactccagcctgggcaacgagagcgaaactccgtctcaaaaaaacaaaaacaaaaaaatcaaaacaatcaaaaaaacaagcaggaggggctctgaggtgcctgcaacacccaggtacaatccgtggccctgaggcccatcacagggaaggggtctttgcagctctttcaacccccagcccagcatccaaggaagcccagggcagggagaaacctcagctgcaccatcagagctcagaacagagaaggcagaaattagcagggagtggggctggggaggcttcctggaagacgtgtctcccgccttgctggcactgaggccttgaggatgggtccatactgggcccccactgccagggatgcagatccggcccactgctgaaatctgtgctcctggagcctccctcctgttcatgggccacaggctgtgaaaaccccagagtcctcccaggcagcaagttttgttttgttttttgtttgtttgcttgtttgttttttgagagtcttgctctgtcatccaggctggagtccaatggtgcgatctcagctcactgcaacccctgccagccagcaagttttgctggagcaggtggaggagtctttgcagcgagctcccgagctgcctaggcctgccgaagagttgctgagcacatgaccaccaaaaaaggtttcggcacctgtggacctgtgggtaggggaggcaggggcaaatgtcactttacgtcagggggaggataaaatcgaacgtttattaacattgattttgtgccagaggtggctacccagacccatccactgtagccgtgaggttggaagggagaggggaggcatgaactggtttgtccaaggtcgttggcagagcgcggctgtgaactgggttagcccccaggcccctcctgcccatccgtcctccaagcactgatgtgcgagtggcacagtggtccccttggccctgccagcccctcgggctgtggccctatagcctttgaaggacggcctcacttccccagcagaggcagcctggccttccagtacctcgatggtgtagggctctggggccacagtctggtgttttcaggactaggttgtgggttacttcctcctcttctctcaattcccaaggtttgttaagcggccctgtagctccggtcatggcaatatggatttactggcggtgctttctgaagctgtggatgcaattctcacaagtggccacatggtgtcaggctcgggccagattaggaaatctccgctttacaggtggagccgggtggggctggggaagcgagttaagaacgaaattcagcccatctgggctcatcctagggacgctgtctctgaaagggggtctcaacgttctgccccgggcctctcagtaatagatctcattttatgttcatgctaatgtggtggtttcctctcttagaacaaaacggatgcttcagaaaggtgttccagacctatcctgtggcttaggccctaagctttaggatgctcaccaggccacagccccctcgggttaggagacacccgaagggaggaattccctcagcgccccctctcagtcctgtaatgccgggacagaagcagataagagccccggttccaaacacaaaggtgcaggacccatggcaccctgacactgtagggaggcgtcctgactttgcccccagagtccccctccagagtgccccaaattgcggcgcccaagacctttgggttatgccactgtaattctagaaatggccgccaggtgtcagcagaaggccacttaagaagctaaatggcgaaagcttggtgtagcagatttctgggggttcccaagactctcatgcatgaacaggggtgggctgagcctctcccaggcctaagaggcagtggagcaaggaggtttttctatgtcgtgtccctcaatcctgcaccccagtttttgtccattttgcggtccctctcacctgtctccataaagcatgtgtcccccagacccttgcgtggaaaatctgtggaatgtagtgctgtggggccacagccctcacaccccaactcactgatccccaatgcctctagtcctgcctcggtggcaccatggcttagctgctccccgggggccctttctatcctgaccgcttctccctgctctccttctcctgtttacacaccctgggttccaagatcctgatgggataaaatagccttggagactagagtgagctcctcctgggcccatccagagatggaattccagtccagggcagagtttggattcaagacaccattgtgggcctgggaggctccaggtttccaggagtttgacctgtgggctgcttccctttcagccccatagctgcccacctcctcaacctggggactgttcatttgggggggcatcccatggaatcacttcatctggctgggtgtcagcccgtcactctctctaggtccatctgcagcttggaaagtcccagccaagtgtctccagagggctctggcagtcgctgtttgcaacatttgggcatcttgcagcagacactgggaccagcacatgctacggggtctctaagccatagagccccggagcaagggctgcttcatgctgacctccttgtatctttgttttgtttctttccctgagtctttgttttgtgccttctcttcctgcaggcttgaggaggaggtgtcaaattcccagtaagacttgatctaatccaatgggtgattctatctgagccctccctgagctgctgccagctctgagtctgtgctttagctggaaagactgtgaacccattcagtgctctggacctgacagggccattaacatccctccccacccaaaagccgagtgaaaaatcccattttccctcctcccatgggagggcatggctctggggcatctacgtcttatttgagacatcccccaacacatgccagatttgaatccccttcaagtctaactctcttccctgctgaaatccttgttgtccccactagatgtcctattcctccagctaatgaagggatttaagacgagggcttgaaagaaaaagggagaggggacaattaaatcccaacacaggctagtaaaactaatcacactgaaggtggttggggtgcgtgggtgttggagggggggactggtggctctctggaaagtacacgtctttgcctcttcctgagtctttgctagcttggggaagaggttagaaatttccagtgtgatttagtccaatctggtggatgcttctatatgaaccctcacccagctgctgtcagctttgagtctgtgctttaattagaaaggctgcgaacctgtccaatcgcccaatccagaaatgcctgcaagtgccccctgcagcagtgtcattagagcttagtaccacacagggagtgtctgaggtcagatcagacgtgaccagtgaagtgaaaaaccccccagctgagtaccttgctcatggaagatggaaggacataactgcacagtacataactgtaccgggagcacctaaaatccaatttttctgctgattcttgaaccctgctttgtcccccttattccccccccccccccgccattttaccagtgccacgtccaccaacattccagggtgtcaagtaactgccaagtgtcactctaagtaaagctacacccactccccaccacctccacatagcccccacctcctagctggcagggagcttctggcttatgcccacgcccacaggcgcctttctgccaggtcaggggtgggccaaacctccacccgctaatgtaccatgccctggtgctggaaagtgcctgagccagctgccccagcggcctcggcactaccaagttggcacaaagctccccaaattcggaggggctcagggaaacgagtggaggggatgaggaggtgaggggtaaacccatcatttcagttggcatttgagcaggtgccatgctcagcggagatgaggctctcccatctgtaggggccgtattaacatgcacactctaaaagtgcccttcgtttctccagcctcagctttgtccctctcctcctccacgtcaacctggccagagggtctggacgccacagccagggcaccccctgctttggtggtgactgctaatattggccaggccggcggatcatcgtccaggcagtttcggcagagagccttgggcaccagtgactccccggtcctctttatccactgtccaggagctgcggggactgcgcagggactagagtacaggtaactgggctcccatcccttgagtgtgagagaaaagctgcactttaagtgttcaggcgtgggtgggccgggagcttggggcagctgccaggatcctggtttctgaaggaggggaagaacttctgctgctggagggtgcagggaagcctcctgagagcagcctcaacttcagggatggggtgtgcaggaaaggccattgtggagagggttctcctttagggctgcacaaagccactgaggcttttgcaaggaaaataggttttccttgactaattcaccaagcaaaatgggaggggtaggggaggagggctaggccgctcttcccagcgggaacacacagctgtcttcacaagtgtgaaaggaagagtctttctgtgtgaaaagtttcctcccgttgcatcccccatcccattcccagagacaaacaggagactttgcagaggagccgggggcccgagattctggcgcagatattttatttatacatatatacaccattttacaggtaaagcttccttccctcctgcctccctatgcctgctgaccaccagcaagaaattggacaggagactgaggagaaacgccgggagaggcaacaaccgccctccatgtcccccctaggtttagcttctctcctcctgatggcgcacctggtcccccttgctgctctcccagcctccctggcacagagaggcgccctggggccaaggcagtttccctgggaatgctcattcatgcatgaagtttttctctgttgcaccctggacccagactcctcaatccacccagggtggtgtctgtggggagggggttcacttccccaggaagcacagccacgccgtccctcactggcctcgtcaagcagagctgtgtgtccagtggcttttgctggggccccctccttatctccttccaaggtgggggtgtttggaggtggaggaggctttcatattccgtgccatgacccctcaaggcgggccattcgtgtgcaccctccacccccagtgccaggcagaagcccatcctcacccaggaacagggcagcctgtccaacagaagggtctcggcctctccatcagcaccgggaagccctttctaggcaaacttctcaccacttcttccctcccttatactttgaaagagggagctctaggcaggggaggggctagagggggaagccgctgcccagatcctgacaaggtgacctgaaggaacccggggagggggatgggacagggctcaggcttggggtgtatggggaggggggctttgcttttaaaagaggtcatctcagcaatatctttttgtttttccccaggggccgaagagtcaccaccgagcttgtgtgggaggaggtggattccagcccccagccccagggctctgaatcgctgccagctcagccccctgcccagcctgccccacagcctgagccccagcaggccagagagcccagtcctgaggtgagctgctgtggcctgtggcccaggcgaccccagcgctcccagaactgaggctggcagccagccccagcctcagccccaactgcgaggcagagaggtgagtgtctcaggcaccctgaggcctggcagagagggccacaggctctgcgcgggagtcttcgaactgggatctcccccttctgcaagcagctttggctcagagaggctggcgtggattcagtcacacagctgggatctggagttccgtggttggctccaggtgcttccgtctaggggccagagcaggtgtgggcagagcaggttccccgcagtctccacggcaccgaggtcctggcaggggagctcctgggagacgaaagagggcaaagaaggggagaggggcagggagagagcgggcagccaaaggggagaagatggggggcagaaagtgggtagagagggaaaaagggaaaatatcattggggaagaacctaaaaacccaaggaaagctgggctctgctgggggctgtgagacccccgggttctccccgccccaggctgctggccatggggtcttgcaccaatggcctgacctttctgtcggtctgtatttatcaaagtgggtgacagtctcaggcctcctggctgttcagaattgaggtaataaccagaggccttctgagcaaagggcctaaggggctccggcgtcaggatcccattgtggtcaggagcctgcggggcttcccgtgtgcaagaggggtgaaaggtggctagaaaggcccagccagtggcctctgcctcagccagagggagctctgtagtgggggcagcacccattcactggtcaggcactggggtgacaggggaggctccaggacttggggagcgttggagctggaggcacatggattggagtccctgtacctgccccacgacagggcctgcagggagggatccagcaggtgactcttcaggctgatttgcccatcccagatagaagccgggagtgttctttcaaaggtgtctttaccttagacactcaataaaatggtaacacagtggcgccgcctcagtcctttggagtgtgcaccgtctgaacccctctcccagggccctctcccaagcaccccaacctggacccatatcccccacgtacttttggctttgggcagattgagcagccttggggtggtctgtgctgtctggtgtggagggttgcagttcgggtccttagtcctacttcccaggccggccgggctgacgccagcgagtgtgtccttccccagcgaggggagcgagcgcaaggtcagcgcctcgtctgcggcgccctgcagggggtgacggaggggcgctctgaggacccttggagacaggagctgggtttgtaaaatgctgggcttggtcccacggacggcggagcggtgagctcagagccagagctggggaggaaatgggaatgagaaaggcccacttcagggctggtgagcgaggggatggggagcagccacaggccgaggctggggcatgggccaggctccatggggtgagtctgagtccttgaggggatgttcatcctctgtggaatgtgggtttgccagtggagaggagaccagcgttgccctggtgaggtgctggttcagggctggggggcggacgctgcttggggctaaagttcctgccggccaagctctgggtgggaggagaccctggccccctcccaacacccttggactgctggcgggacccttcctacctccgggggctggaagtagtgggggaggagccagtcttgaggaagaaccccgatgctggtcttgactagaggggagccggtgtgcttttcgagcctcagggtgacccgcgtctgccccagcctccagcctgccctggtcacttctgactaaataaggagagcactcagcaggcagccccacgagggagggggaacatgtgtgcacccccactcccccacctgctcctccctccctacagggccactacaccctgctgtgggcaccccaaggtgaccctcagccttcttcctaccttaaaaagtccaggcatgcgttttcaagcatgagcggtggccccctgggggaaggcacctcggcagggcagaacaaagggaagggacccccaaacaggtcactggtgtaattgtccccagcacccccaaagaggaggagaacccacaactcggaactggggctcacccccgatgcccaacctgtccccagcctgggaagcaggcgtggaggagaaggtggggggagcctagagctggccctgggggccctggttttgtccatgacgggagcctcggcaacctagtccgctctcccggggaccaggtttgcagacaggcacctttcaaatgctcctcacccccaaatttacaagtcaccctgcagaggaaaacatcaacacagccaggggttctctgctggaggctcccccttctataggcacagccggagaggccagagagctggggacacggggaggctgcagaaggctggtgggaaggggggcagtgatgggtggggagagatgggccagatgttcttggaatgggacatgggggtgattgatgcagacagaaatttgaaggggacattcccacgtgtcttgttctgtgggtggaaaatgggctgtttttcatggtgggggcgggttctccctgtcttgccaagctaatgtgaaagagatgcctcatcctgcccagctccccacacctgtccaaggccattaacttctgcctccccagtgtcaggctttgagatgccccccttctagccggggtcctcctatggggtgacaatggggacaagcaatgcccactgtagttgccccaggatcccccaccattctgctggtccccagcggtgccccctctctggcagtacccccacccaccccacaggtccccttagggccactgccccatcgcccgacattgcccaacgccaaggggtgaccttgttcctgccgacagggccgttgggcgcctgcatgcgggtttaatatttgcctataaggaactgggctttccccagccggagtggacagactttccctgaaaattcgcttggagagaacgaaaagagacccctggcaccccagcggcgtgcagccctgcacccccctcctcccgggccccgtgtttctcattttcctccccacttcctctgctcttcagtgttacccaaacaaaactggtttcacccttgtttggtgctggcgaaggcccgaacggcgcgcgcaaagctccggggcaggccggaggtggccaccggggtgctccgggcccccaagccaagccggggactagcctgcccccggtggcggctcggccgcggcttcgcctaggctcgcagcgcggaggcgagtggggcgcagtggcgagggggagcctgcggacctcccacgcggggaccgagcaggtatctgggagtcccgggagcgcccgggaagcagcgtcctggtcgctccctcgcggcccttgggtttcttccttacacccggacgcccgctaagctcgggctgccgccacaaacgcgctctccgtgtggagaaggcaaagaaaaaaaaaataaaagcaaaaggaagaaaaaccccaaagaacgaaaagcagaatttcagccggccgtgcgcgccagggcgctccgcgctacctgcccgcgccgcccgcgctcgggttcccggggagggcgccagtgctccgcgcgcgccccagccaaggtgaatccccggcagcgccttccttccgctgcccgggaagcttgagctcaacaattagcccttgatcctcgggggattccaatccacggaacaacttccctgctttccccgaactcggacattttactttttctgggatcctctaaatttaagcattgcttcccaagtcttctaaatatattcaccatttcgacgggtcacaataattttcttggacgttaatttccggggacgtcaaaacacatcagtcccggcgggcttttccagacttacactatgtggcctggggccccagatgtgctttctcccaggctctggacagttttatacaccccctccaggtcccacagatttacaggccactaacccgggttccctaattttaaagacgaagcccttggtccgtggtggtcgcgctgaccaatttgcctggctccccaggatgtggacagtgccttttccacatttaggcattgtttccaaaacaagtggaactttcccgcataattttgaatattaactccagggtctcctaagcttactgtttcccgcacacgtccgccccattccgcgcccccccaccccacccccgcgccccttcccgttcacctcagcatgggacatttgctgttgggtcccgcaaatctattcacactaacctgggttccctaaactttacacgttgaatcccaagtccctcatgacactcagcagggctggaaggttggaaccctcagagtatgaaaattgcttcccataccttcccccaaattcggtcattacacccagagcatgttgaatccttttctgaatcataaacgacctgccctctgattgcctgagtttcataaaatggagggatttccccagtgattccccaaagctattgagaatgttgtgggtgtgtgagtcacaaagctttggggcattaacgtctatggctctatatgctgcctggccacgaatcaggtcccttaagatgtagacagtgccacccaggtccctggagcacactgagcagttaccaggaggtgctcaagtgtgacccaggattctccaggtccccccaaatcacacagggtctcccgggtccctctgggctacaccaagcacaaaaggaccccttgggcagagcctacttttatttctgttatgccaggtgttgctaacggccccagttcccaaacattccgagcactttctctgcatcacaacatattgactattaaacaattctctgggtcccaggagcttcataacaagaatcttgcttttctaaaattcaggcattggtctgaaaccccaacggccaggatcacactggacccttttcctggtcccccatacttggatgttctggacgctgccctccaggccctctaggaacattcagcattgccctcggatcacaggacagcactgatttcttgggctccaaacaacccactgagtcatctcaaagttaagcaatatttccttcaaacacactgcacactccctatcacaaaatctgaaaattcctaagtcctaagacctaggaattctgaatcccctttctttaaaatgtacatatggacccccaagtcctccaaggactctgagcaacttccctagatctttagattcaaaaacgattttcctggagcccccaaattgcggtattgtctcccagccttccaaagcaaattgagatttttttcccttcacaaaacaattgaggtttttttttttttaatactgatttatgagtctcctgactttatggtccctgccctgggtccccctacatttagaaaatgttccatggacccccaaagcacactaaaaaatgtccctgggtcccaagaaatcccaggcatggaaaaacctgcgacctataagtttcctagctactaactaggtttccagaaatttagatatcaaatctccattgggtaatttccatgtgtcccaaaaacttgaaatgtgtttcactggggctcccccaaatgcagacgacatccaggaaaatatatagtctttttcttatttaccaaaaataagctaatggaaatcatttacaaattagcatagaaaaataatactgattttttatttttttattttttattttgctttccccaaatgtactgatcacactccaggctcccccaaaatctagacagtgctttcttccatctctgaagggtgttaaaacctttccctgaagccacagtaattatgaaggttattttttccccggctgctgccagcgtccaggccactaacttatattcttaagatgtgaaaattaatctcagcttccccctaacacaccaagaatgtgtttggatccccaaaatgtgttccttgctttcatctgccaattttacgtaatatggctctacggcaaaattcccaatttcatatggagaattttctttaactacccctcctcacaaattggtcccccaagctagctggcccctatttgagacctctttctctatgttcccaattgcatggagcaacttctctcatcccccaaacctgtaatctatttttctggagtctcgagtttagtcattaatcacggttcccacattaacggagtccccggggtcccctcctccaggacacccattcgctaagcccgcaaggcagaaagaactctgccttgcgttccccaaaatttgggcattgttcccggctcgccggccacccactgcagcttccccaaccccgcgcacagcgggcactggtttcgggcctctctgtctcctacgaagtccccagagcaactcggatttgggaaatttctctctagcgttgcccaaacacacttgggtcggccgcgcgccctcaggacgtggacagggagggcttccccgtgtccaggaaagcgaccgggcattgcccccagtctcccccaaatttgggcattgtccccgggtcttccaacggactgggcgttgctcccggacactgaggactggccccggggtctcgctcaccttcagcagcgtccaccgcctgccacagagcgttcgatcgctcgctgcctgagctcctggtgcgcccgcggacgcagcctccagcttcgcggtgagctccccgccgcgccgatcccctccgcctctgcgcccctgaccggctctcggcccgcatctgctgctgtcccgccggtgctggcgctcgtctccggctgccgccggggaggccggcgtggggcgcgggacacggctgcggacttgcggctggcggctgcgctcgctcctgctgggcgccccgaaatccgcgccactttcgtttgctcattgcaaagatctcattcgtggggaaagcggctggagggtcccaaagtggggcgggcagggggctggggcgagggacgcggaggagaggcgctcccgccgggcggtaaagtgcctctagcccgcgggcctaggactccgccgggaggcgcgcgcggagcgcgggcgaagtgattgatggcggagcgaggggggcgaggggggccaggggggcgcgagattccgccggcggccccttccccttggctaggcttaggcggcggggggctggcggggtgcgggattttgtgcgtggtttttgacttggtaaaaatcacagtgctttcttacatcgttcaaactctccaggagatggtttccccagacccccaaattatcgtggtggcccccgagaccgaactcgcgtctatgcaagtccaacgcactgaggacggggtaaccattatccagatattttgggtgggccgcaaaggcgagctacttagacgcaccccggtgagctcggccatgcaggtaggatttgagctgtgtttcccgccctgatcctctctcctctggcggccggagcctccgtaggctccaagcctggcccagattcggcccggcgcagccggccttccgcgcgtcccgcacctggcgggggctccggggctccggcgcggcaccggggggcgctcgggatctggctgaggctccaagcgccgcgtggccggctcctcctgctggggcaggtggcggctgcgcgccccgcccgagcccaggggccccctcagccgcaacaaccagcaaggaccccccgactcagccccaagccacctgcatctgcactcagacggggcgcacccgcagtgcagcctcctggtggggcgctgggagcccgcctgcccctgcctgcccggagaccccagctcacgagcacaggccgcccgggcaccccagaaacccgggatggggcccctgaattctctagaacgggcattcagcatggccttggcgctctgcggctccctgccccccacccagcctcgcccccgcgcaccccccagcccctgcgaccgccgcccccccccccggggccccagggcccccagcccgcaccccccgccccgctcttggctcgggttgcgggggcgggccgggggcggggcgagggctccgcgggcgcccattggcgcgggcgcgaggccagcgaggcccgcgcgggccctgggccgcgggctggcgcgactataagagccgggcgtgggcgcccgcagttcgcctgctctccggcggagctgcgtgaggcccggccggccccggccccccccttccggccgcccccgcctcctggcccacgcctgcccgcgctctgcccaccagcgcctccatcgggcaaggcggccccgcgtcgacgccgcccgctgcctcgctgctgactcccgtcccgggcgccgtccgcggggtcgcgctccgccgggcctgcggattccccgccgcctcctcttcatctacctcaactccccccatccccgcttcgcccgaggaggcggttccccccgcaggcagtccggctcgcaggccgccggcgttgtcaccccccccgcgctccccctccagccctccccccggcgcgcagcctcgggccgctcccctttccgcgctgcgtcccggagcggccccggtgccgccaccgcctgtccccctcccgaggcccgggctcgcgacggcagagggctccgtcggcccaaaccgagctgggcgcccgcggtccgggtgcagcctccactccgccccccagtcaccgcctcccccggcccctcgacgtggcgcccttccctccgcttctctgtgctccccgcgcccctcttggcgtctggccccggcccccgctctttctcccgcaaccttcccttcgctccctcccgtcccccccagctcctagcctccgactccctccccccctcacgcccgccctctcgccttcgccgaaccaaagtggattaattacacgctttctgtttctctccgtgctgttctctcccgctgtgcgcctgcccgcctctcgctgtcctctctccccctcgccctctcttcggcccccccctttcacgttcactctgtctctcccactatctctgcccccctctatccttgatacaacagctgacctcatttcccgataccttttcccccccgaaaagtacaacatctggcccgccccagcccgaagacagcccgtcctccctggacaatcagacgaattctccccccccccccaaaaaaaagccatccccccgctctgccccgtcgcacattcggcccccgcgactcggccagagcggcgctggcagaggagtgtccggcaggagggccaacgcccgctgttcggtttgcgacacgcagcagggaggtgggcggcagcgtcgccggcttccaggtaagcggcgtgtgcgggccgggccggggccggggctggggcggcgcgggcttgcgccggacgcccggcccttcctccgcccgctcccggcccggggcctgcggggctcggcggggcggctgagcccgggggggaggaggaggaggaggaggaggacggacggctgcgggtcccgttccctgcgcggagccccgcgctcaccctggcggctgagctgggggtggggtgggggcgtcgggaagggccgagggaggtgtgaggtgtctgcaggggcgacttcccggtcggtctgtgggtgcagggggtgccgcctcacatgtgtgattcgtgccttgcgggccctggcctccggggtgctgggtaacgaggaggggcgcggagccgcagaagcccaccctggtatgttgacgcggtgccagcgagaccgcgagaggaagacgggggtgggcggggccaggatggagaggggccgagttggcaggagtcatggcagacgccacattcgcgacatctcccccacaccccctctggctctgtccgcaacatttccaaacaggagtcccgggagagggggagaggggctgctggtctgaggctaagaagggcagagccttcgacccggagagaggccgcggcccctgcccagtgggcagcgtggaagtttccatacaaggaggtgggaaggagacccccccccccttcactgccctgtgcagagatgagccgggggtgcaggatgggagcccatggcacttcgctacgggatggtccagggctcccggttgggggtgcaggagagaagagactggctgggaggagggagagggcgggagcaaaggcgcgggggagtggtcagcagggagaggggtggggggtagggtggagcccgggctgggaggagtcggctcacacataaaagctgaggcactgaccagcctgcaaactggacattagcttctcctgtgaaagagacttccagcttcctcctcctcctcttcctcctcctcctcctgccccagcgagccttctgctgagctgtaggtaaccagggctgtggagtgaggacccccgctgccatcccactccagcctgaggcagggcagcagggggcacggcccacgcctgggcctcgggccctgcagccgccagcccgctgcctctcggacagcacccccctcccctcttttcctctgcccctgcccccacctggtctctgctccctcacctgctccttccctttctgttccttcccttcggccccctccttgcccagctcagggcttttcctgggccctcacctgctccgcaccgctgcatgcttcctgtcctgctttctgccggtcccctgacccggacctccaagttcagagtggtggggcttgttgcggaagcgcggcgagggctagagtggccagctggcggagtgtgctcttagaatttggaagggggtggcagagggggcggtgagaggactggccagggtccagtcaaggagatgaccaaggaggctttcagatcctcggcgcagctgcccactagtctttagagagggcatgcaaagttgtgcttctgtcccactgcctgctcagtcgctcacataatttattgcatcaaaaactcccctgggtctgcggagcgaaggctggggctgcccgcctggagggttccaccttctgcaggggcagggccaacttgctgtggtggctcccggcctcccacccccgagtgggttaacccggccctgtggccctgcagcctgtggagggggtgtgtcctaagactggcctccccttccagattgtagtctggggaacctggtgtcggacttcccaggtggcctgagctggtctctccagctcccacggggagagtttggtagcgcaaatagggagatgttctggaggcccctggccttactggttcgatttgaggcctggaaaggaggctctgggcgtgtgtgtgtgtgtttgggggtacccaaggcagactggagttggagaactgggtgactgggaaaacaaggtttctagagcatgggtggcgtggttgtgttaaccattggagtccttgacccaggcctggctcagctgcagactggaaaggtggaaaagccagggggaggggcggggctggcccagcaggactggcctgctgctttgagggcgatggtcctcctggaccccccctgctcagctgggggttgtggggaggaagggactggtcctcctggatgcacatgctctgtaggggtggggctgtctgccatcttggctggcgctggaggcctgagaagtggcgatgtgacgctgggctggccctgcccccatggtgtcataggacggaggccaggtcgggtgtccagcctgggcccctgcagctgtggatgccgctgagctcctgcaataatgaccgtgcagatggtcacccctcgtgtaaaattactagtgcttcttgcaaatggaaggaactgggccttttctgtgtgcttctggacgcttcattctgcacatggccctgcgccctcacctcggcattatgacctgtgtgttacttttgtaataaaaataatgtttataggaaagccgtgctttcaattttcaactgaatttgtaggttggcaaatttggtttgggaggggcacctctggcctggggcttggcctggctgccccgctcacgccacttctctcccgcccccagacaccaatgggaatcccaatggggaagtcgatgctggtgcttctcaccttcttggccttcgcctcgtgctgcattgctgcttaccgccccagtgagaccctgtgcggcggggagctggtggacaccctccagttcgtctgtggggaccgcggcttctacttcagtaagtagctgggaggggcttcctcagacctggtcaggcccctagagtgaccggtgaggatcgcccaacctcaagccaggggagcacactcctaggtcagcagcccagccgcttgctctgagactttgaccttcccgccgcgtttctgagcacgtgcggtgtcccagggcatccacaccagctgcctttcccatcacacgcctccttcgaagggtgggccagaggtgccccctagacgtcaggggcactcacaggggtctccctgggcatcagaatttctgttgggggccgtgaggctcctgctcctgaggcaccgcacgcctagtgcagggcttcaggctctggaggaagagcctgcctttcttcctgcaccttttggacattctgacaagggacgtgcgttcggtgaatgatcagaattaaaatcaataaagtgatttatataattaaaatcaataagacaagtgcagttggtgggtggcaggggtgagcggtgcatgcgcctccttgggccccaaggctgccgtggggggtgcccacctgctgacctcaaggacgcttcagcctttcctcatgtttctctcttggttctccagcctgggggctggcaggtgggtgcatggcccattgtccttgagaccccacccccagataggggggctgggtggatgcagaggcaggcatggtgcctgggcatgcctgatggggcaggggaggggccgctccttactggcagaggccgcacggcttattccacctgacactcaccacgtgacatctttaccaccactgcttactcacgctgtgaaatgggctcacaggatgcaaatgcacttcaaagcttctctctgaaaagttcctgctgcttgactctggaagcccctgcccgccctggcctctcctgtgccctctctcttgcctgccccatttgggggtaggaagtggcactgcagggcctggtgccagccagtccttgcccagggagaagcttccctgcaccaggctttcctgagaggaggggagggccaagcccccacttgggggacccccgtgatggggctcctgctccctcctccggctgatggcacctgccctttggcaccccaaggtggagcccccagcgaccttccccttccagctgagcattgctgtgggggagagggggaagacgggaggaaagaagggagtggttccatcacgcctcctcactcctctcctcccgtcttctcctctcctgcccttgtctccctgtctcagcagctccaggggtggtgtgggcccctccagcctcctaggtggtgccaggccagagtccaagctcagggacagcagtccctcctgtgggggcccctgaactgggctcacatcccacacattttccaaaccactcccattgtgagcctttggtcctggtggtgtccctctggttgtgggaccaagagcttgtgcccatttttcatctgaggaaggaggcagcagaggccacgggctggtctgggtcccactcacctcccctctcacctctcttcttcctgggacgcctctgcctgccagctctcacttccctcccctgacccgcagggtggctgcgtccttccagggcctggcctgagggcaggggtggtttgctcccccttcagcctccgggggctggggtcagtgcggtgctaacacggctctctctgtgctgtgggacttccaggcaggcccgcaagccgtgtgagccgtcgcagccgtggcatcgttgaggagtgctgtttccgcagctgtgacctggccctcctggagacgtactgtgctacccccgccaagtccgagagggacgtgtcgacccctccgaccgtgcttccggtgagggtcctgggcccctttcccactctctagagacagagaaatagggcttcgggcgcccagcgtttcctgtggcctctgggacctcttggccagggacaaggacccgtgacttccttgcttgctgtgtggcccgggagcagctcagacgctggctccttctgtccctctgcccgtggacattagctcaagtcactgatcagtcacaggggtggcctgtcaggtcaggcgggcggctcaggcggaagagcgtggagagcaggcacctgctgaccagccccttcccctcccaggacaacttccccagataccccgtgggcaagttcttccaatatgacacctggaagcagtccacccagcgcctgcgcaggggcctgcctgccctcctgcgtgcccgccggggtcacgtgctcgccaaggagctcgaggcgttcagggaggccaaacgtcaccgtcccctgattgctctacccacccaagaccccgcccacgggggcgcccccccagagatggccagcaatcggaagtgagcaaaactgccgcaagtctgcagcccggcgccaccatcctgcagcctcctcctgaccacggacgtttccatcaggttccatcccgaaaatctctcggttccacgtccccctggggcttctcctgacccagtccccgtgccccgcctccccgaaacaggctactctcctcggccccctccatcgggctgaggaagcacagcagcatcttcaaacatgtacaaaatcgattggctttaaacacccttcacataccctccccccaaattatccccaattatccccacacataaaaaatcaaaacattaaactaacccccttcccccccccccacaacaaccctcttaaaactaattggctttttagaaacaccccacaaaagctcagaaattggctttaaaaaaaacaaccaccaaaaaaaatcaattggctaaaaaaaaaaagtattaaaaacgaattggctgagaaacaattggcaaaataaaggaatttggcactccccacccccctctttctcttctcccttggactttgagtcaaattggcctggacttgagtccctgaaccagcaaagagaaaagaagggccccagaaatcacaggtgggcacgtcgctgctaccgccatctcccttctcacgggaattttcagggtaaactggccatccgaaaatagcaacaacccagactggctcctcactcccttttccatcactaaaaatcacagagcagtcagagggacccagtaagaccaaaggaggggaggacagagcatgaaaaccaaaatccatgcaaatgaaatgtaattggcacgaccctcacccccaaatcttacatctcaattcccatcctaaaaagcactcatactttatgcatccccgcagctacacacacacaacacacagcacacgcatgaacacagcacacacacgagcacagcacacacacgagcatacagcacacacacaaacgcacagcacacacagcacacagatgagcacacagcacacacacaaacgcacagcacacacacgcacacacatgcacacacagcacacaaacgcacggcacacacacgcacacacatgcacacacagcacacacgcaaacgcacagcacacacaaacgcacagcacacacgcacacacagcacacacacgagcacacagcacacaaacgcacagcacacgcacacacatgcacacacagcacacacactagcacacagcacacacacaaagacacagcacacacatgcacacacagcacacacacgcgaacacagcacacacgaacacagcacacacagcacacacacaaacacagcacacacatgcacacagcacatgcacacacagcacacacatgaacacagcacacagcacacacatgcacacagcacacacgcatgcacagcacacatgaacacagcacacacaaacacacagcacacacatgcacacacagcacacacactcatgcgcagcacatacatgaacacagctcacagcacacaaacacgcagcacacacgttgcacacgcaagcacccacctgcacacacacatgcgcacacacacgcacacccccacaaaattggatgaaaacaataagcatatctaagcaactacgatatctgtatggatcaggccaaagtcccgctaagattctccaatgttttcatggtctgagcccccctcctgttcccatctccactgcccctcggccctgtctgtgccctgcctctcagaggagggggctcagatggtgcggcctgagtgtgcggccggcggcatttgggatacacccgtagggtgggcggggtgtgtcccaggcctaattccatctttccaccatgacagagatgcccttgtgaggctggcctccttggcgcctgtccccacggcccccgcagcgtgagccacgatgctccccataccccacccattcccgatacaccttacttactgtgtgttggcccagccagagtgaggaaggagtttggccacattggagatggcggtagctgagcagacatgcccccacgagtagcctgactccctggtgtgctcctggaaggaagatcttggggacccccccaccggagcacacctagggatcatctttgcccgtctcctggggaccccccaagaaatgtggagtcctcgggggccgtgcactgatgcggggagtgtgggaagtctggcggttggaggggtgggtggggggcagtgggggctgggcggggggagttctggggtaggaagtggtcccgggagattttggatggaaaagtcaggaggattgacagcagacttgcagaattacatagagaaattaggaacccccaaatttcatgtcaattgatctattccccctctttgtttcttggggcatttttccttttttttttttttttgttttttttttacccctccttagctttatgcgctcagaaaccaaattaaaccccccccccatgtaacaggggggcagtgacaaaagcaagaacgcacgaagccagcctggagaccaccacgtcctgccccccgccatttatcgccctgattggattttgtttttcatctgtccctgttgcttgggttgagttgagggtggagcctcctggggggcactggccactgagcccccttggagaagtcagaggggagtggagaaggccactgtccggcctggcttctggggacagtggctggtccccagaagtcctgagggcggaggggggggttgggcagggtctcctcaggtgtcaggagggtgctcggaggccacaggagggggctcctggctggcctgaggctggccggaggggaaggggctagcaggtgtgtaaacagagggttccatcaggctggggcagggtggccgccttccgcacacttgaggaaccctcccctctccctcggtgacatcttgcccgcccctcagcaccctgccttgtctccaggaggtccgaagctctgtgggacctcttgggggcaaggtggggtgaggccggggagtagggaggtcaggcgggtctgagcccacagagcaggagagctgccaggtctgcccatcgaccaggttgcttgggccccggagcccacgggtctggtgatgccatagcagccaccaccgcggcgcctagggctgcggcagggactcggcctctgggaggtttacctcgcccccacttgtgcccccagctcagcccccctgcacgcagcccgactagcagtctagaggcctgaggcttctgggtcctggtgacggggctggcatgaccccgggggtcgtccatgccagtccgcctcagtcgcagagggtccctcggcaagcgccctgtgagtgggccattcggaacattggacagaagcccaaagagccaaattgtcacaattgtggaacccacattggcctgagatccaaaacgcttcgaggcaccccaaattacctgcccattcgtcaggacacccacccacccagtgttatattctgcctcgccggagtgggtgttcccgggggcacttgccgaccagccccttgcgtccccaggtttgcagctctcccctgggccactaaccatcctggcccgggctgcctgtctgacctccgtgcctagtcgtggctctccatcttgtctcctccccgtgtccccaatgtcttcagtggggggccccctcttgggtcccctcctctgccatcacctgaagacccccacgccaaacactgaatgtcacctgtgcctgccgcctcggtccaccttgcggcccgtgtttgactcaactcagctcctttaacgctaatatttccggcaaaatcccatgcttgggttttgtctttaaccttgtaacgcttgcaatcccaataaagcattaaaagtcatgatcttctgagtgttccactctctgacttgggtactggactgccggagggagggaaggggctgagcacctggaagcaggcagagggggatagaagagggaaggggaaggaaggccttaggggtgtggacacctctctccgtcccctgatcacatacatggagaaatgagagagctggaagccagactctcagactcactgtcgtgcacctgaagccagggggtctgggacagtgtcaggcaccaagttctcaaagatgggggtgccacgaagggtaggagcctggggggctttttcagagaaaaagcaaagtaccatcagtaccaactccagggaatgcctcccccaccaacagccttagaggactggggctgggcaacctctaaaaggttctggaaaccgtatctgtggctggagatgggggctcagggccactctcacccagggactcagcccccttccaaggttgaggctgcccagatgtcattagtaccactgcctcctgccagggctcagcctgtacccacctgtcccaagggtgctggcctctagctttcaagggtccctgagcatgggaggaggggtaggctgggctgctgggagcctggcccagcctcttctctccatccccctccaggaactttccagcagccttgggcagtggatctgcctgtgccccgcctgctgtggggatggagggacaggggcgccacagaaggagcccggaagtgtgcccagggccctgcagccttcagtgctgggcaggcggtggggaggggcctgactgggttgggggcgtgcttgcatcctggcccccagggtctgcccctggtcaagccctgtcccttgatggctgcctctgtccctagcatttctcctgtgccgggcactggagggtgctgggctgtcacccaagcctctgaggcctggggacacgtctacacggacagtgtcactgcccacaccatctgagaaccactccgagggaagggagagggtgggcggtggtttggggagttgcctggaggaggagggattagccttgaagatgaggagggctgggggttggagaagagcagattggatatggggggcaccatgcccttcctgagctggtccctggctctgcacctcagtgctaggtctaagctggagggtccagggcccaggtggcattgctgacccccagggggtcggggctgctctgaggcccttctgtagatgtagatggaagcctagtcctgtccaccttcctgaggccaggtggagttgctttccctgcaagcccaggcagctctgccctgtgcccctcccccagccctgcagtcccccaggcccacgcagggccggcctcatggtctcgcttcctctctgggtctgcttcagggcccagcctccagccccatgagcctgggccctcctgctcctgtccccactggccccaggtcacttcaacactggctctccccgcaccctgggcctgctcagccactcctgcccacagccaggagcttctgtgcagcttctttcctttcacttgcagcctgcctgccctctgcttccccggaccccttgtgaacttccctgacctctctgcagaactgggcaaagccactcaccctggttcccccgggtttagcctggtctcttgacacccactcagggctgcccagccttcatcctgcttcactgggcccagcctcattccagggcttctgagactgcagggccctctcttctcccctctccctgctttgcaaattctcagttcatcctggcagctccaactctccatccctccacccatccatccccccatccatccacctatccctccacccatccctccacccatccctccacccatccctccactcatccatccactcatccctccacccatccctacacccatccagccacccatccatccacccatccctccacccatccatccagccatccaaccacccatccctccacccatccatccactcatccctccacccatccctccacccatccctccacccatccctccacccatccctccactcatccatccactcatccctccacccatcccctacccatccagccacccatccatccacccatccctccacccatccatccaaccatccaaccacccatccctccacccatccatccatccatccaaccacccatccctccacccagtcatccacccatctacccattcacccacttacccactcattcacccactcatccatccactcgtccatctacccaccaaaccatccactcaccatccacccattcacctactcacctgtccatccacccacttaactctcactcacccactcatccatccatccactcaccctccatccacccacccagtcatctatctattcatctgtccatccacccactcacccacttacctctcactcgcccactcatccatccatccactcaccctccatccacccacccacccatctatctattcatctatccatctacccactcacccacttacccactcacccactcatccatccatccactcaccctccatccacccacccagtcatctatctattcatctatccatctatccactcacccacttacctctcactcgcccactcatccatccaaccactcaccctccatccacccacccagtcatctatccatctatccatctacccattcacccacttacccgctcacccactcatccatccatccactcaccctccatccacccacccagtcatctatctattcatctattcatctatccatctacccactcacccactcacccactcatccatccatccactcaccctccatccatccacccactcatctatctatccatctatccatctacccactcacccacttacccgctcacccactcatccatccatccactcgccctccatccaccccccagtcatctgtctactcatctgtccatctacccacttaactctcactcacccactcatccatccatccactcgccctccatccaccccccagtcatctgtctactcatctgtccatctacccacttacctctcactcgcccactcatccatccatccactcaccctccatccacccacccactcatctatctattcatctatccatctacccactcacccacttacctctcacttgcccactcatccatccatccactcaccctccatccacccacccagtcatctatctattcatctatccatctatccactcacccacttacctctcactcgcccactcatccatccaaccactcaccctccatccacccacccagtcatctatccatctatccgtctacccattcacccacttacccactcacccactcatccatccatccactcaccctccatccacccacccagtcatctatctattcatctattcatctatccatctacccactcacccactcatccatctatccactcgccctccatccacccccagtcatctgtctactcatctgtccatctacccacttgactctcactcacccactcatccatccatccactcactcctccatccacccacccactcatccacgtatacaaacacatggacaggcactacccacatgctggactttcagccaagagatgagctcagcgtcatggagggaagaaagcgaaaggtgttcggtgctcttttaagcaagacaggcctcatggagaagttggcgtgggggcagagactggacggagctgaggcctcatggagaagttggcgtgggggcagagactggaaggagctgaggaaggagtatgaagcatccagaaagagcgttcttcctcacagggataaaacatgagtggtctgggagtgtttgagccacagcaggaagtcgggggtttgggttggtgggagctgcagcaggaagaggtggggggcctgtgtagggggctgaggtcagagctgtaatggggggcagatggcctgggctgcataggccatgccgtttgttcaacagacaccatgggaccctgaggccatggggtgaattgtggccctcagaaaggtctgtcccgtcatgtgcagtgactcgaacctgtaatcccagctacccaggaggctgagccaggaggatcacttgagcccaggagtccaaggttatagtgagctgcgatggcacctgtgaacagacactgcactccagcctaacctaaccctaaccctaacccaacctccacgcagcacccacgtggcctcgtggcacagctcggttcatagtccagcagtggtaccttatttccttggtgacaagcaacaccctcatgatgacccatgaggccacctgacccacactacccatcaccaccaccgctatgacacctgcccagccacagtggtcccaggttgggttgcccctgcctagaccccttcccctgcagacctttgcccaggtcatcttggcgtggttgcaccctcggcgtggagtctgccttggaattcctctgcacaatggcagcccgtgtggacctgtcccacaaacgctctgagaatgaagaggacacacttccaatggcacctgctgtggccagcttcactcctccaggatgtcctgcagacccctcacccagcatgcgtctgccggtccaccactgccctccaccacacctcacattgagttagttgaggagatccacggactccaccaggccctggcccctgctgctgtccagcctcctgtagagccagcccctctggccatgctccatatgggaccagagcagtggggccagagtctgcctctctccacttagagccctccgtgaatcccgtgggccactggcaaatccaggccctggccaggctttccagcacctggccccatccctggtcctcccacccacccctccactcccagtcccaggctgcacctgctgccctcttgcccaggccctctggtatcacccttgtcctggtaactcacgcacgccctctgctgtactgtgccatcctgacccccaggagtctggcctccctggtctcccttcctgtttgttctggcattgagccccccaccatccgccagagacactgctaaccatggtcccaagacgcctgctggcaagtcctctccaggatccctggggctctgtctggggctcccagaccagaggggtcagacagaaggccctggagggtgcctcgagggactctggcaccccaccaatggctaactccctgctccccgggttagcttgtctcctgcccctgtgttagcttcccccttgccccctagcccctgggttagcttgtcccctgccccccgggttagcttgtcccctgccccccgggttagattggcccctgcccctgggttagcttggcccctgccccccgggttagcttggcccctgcccctgggttagcttggcccctgccccctgccccccaggttagcttgccccctgccccccgggttagcttgccggggagacccagctgccaggcatccttgctgaggttgcccaccggcccgctcagcaggcctcatcctggaggaacctgtccctctgggtctggcccccagggtccccgctcttcccagctcccacacaggtgcggccaggccagggctggcacccacaggctgacagccccacccctcaagcctggtctccaccttctcagctgggcccctggccctgcccactcccctctggcccaggccggggctgcagccccaggctcagagtgtagtctccagcctgtcccccggctcccagccccagccagcccaggcctcagccggcctgaaaccaaagagaaaatgcctgtttatgccagtcatgccgaaagcaaaacagtttgtggtttgtgacccaaattttttgcctttttttttcagaacataacaaagcccaagacaactccctccccgctcccagccctccccccaaggcagacagaaatgatctgtttacactggccgcggcacattccggccgccagcccggccctctccccagtgccgtgccctccgtgctgggctcctcctcggtggaaggggctgctgaggccggggagaggggaccgcaccacagacctggagcgagggtggggcttgcttcctctgggggatggctgaatgagatgtgtcttgggggttgggggtaccggggtgcatgtccatctgggagttggagtggggactccatgctgcctgcacaggctacacagggaaggatggcaggagagcggccgcctgcagccgctccctccagggaacccctctccaagtctgcctttcagtacccccttcacatagacaggtgcttagaccctcagggtgacaggacctattacctacccaccccctctactgcactccatcctctcgcctcctccctccttgattgtccaaagcctgagaccccctgactcagctcggccgtggagcacacagagatggggatgcctctgcccttgaaagcctgcagccccagagtggcggtgtcagtggggtggtgggtgtggaggagggtggccccagactgcattgagggaggggggtgcaggcacatgttggagcccagtggtagggggcaggtgggaccccaaggtgccatgactggaagcaagaacaggcccctccccatcttcagactgttcccacgtgcctggctctcccaggggacagaaaagtggtgcaaaccttcaccttccccaggcctcctcggagtcctcctcggagtcctcggagagccagaattgcccctctctccttccagcctcctccactgccctctcctgatcgcctcctcccagtcttcattctttgttcgcgcacttggctatgcctgctcctggtgctggggagccagggcttcagaagaaggaattcctgggccaaggggacctggtggtgtgagcggggtgaggcaaaggcacctggaggtctggggctgagaaagaccatgcagacaggggtgctcctcccgcggggtcggacaggagcgtgggcattggcaggacgtgggtgggaagggcgttctaggcacagggaaccgcatgtgcaggcacaggtgtgcacacatggagggagatggctgcagctcaaagggcctcggtgctgagccaagaagctgaacttgaccttcagtgagctctgggaggcggggaggggcttttaaggggagagtgagccactctagccatcaattctggagagatggtctaagtgtgggaactcctggagcctgagagggtttggaggtgcactagcgggtggggtgggtggggtggaaggggtggtgctgggccgggcgcagggaggcaccccagctgggaggagctcggtgtggcccagcagcatcgcacgcatgcacagatggggtcatttccaccctgcccccagccccaccaaatgcagaccctggctcctcagctggggggagtatggggagcagggagctcctcctgcctcaggccctgggggcaacccaggtctgcccactctcaggctggctggctcccccgcctggctgggagcatcacttcgggaaggtctggccgagtacctctgcttcccttcccctgccttgtcgtccctggcctcccgtctatcaggaacagatgtgcctctgagcaggaatcctagctatttggtttagccagccactctcgggaatttctgataaggcaaattggttctctgcagagtcggtggaggtagtgggggagaagacaagcagtgcccacccccacctttctcctgccgaggacggggcctaggatacgccccagcctggtccctggccccagctcagcagcactgtggggaggaagactttcgaggcctctcctgatgctccgtggcgctgcagtggctgagggctggccggccccagcaggtgggagcgggctgagaccacaggggtttcccccacccctggacctgggctcagagctttgtgggagggaaagaaatctacactggagccctctgtggtgttgaagcaagcagccgcaaccctccccagcacccagccctcagcggccacatgtcccatgttccgggctccgtgcgggaccttccacaacactctggtccttcctgccttcatcatctgttcaatacacatatgccaggccctgtacaaagccctagaatcatgaagatggataaagttccattcctgccctcaaaacaactctaggaagtggcacatcaacataaatgtaacaaacagcagggctgaggaggggcccggctagcaccttgtaaattattcactcagatcttccctggatcccagaacatcgtcttatcttgttctattctgtccatggttttagcctgtggaggccatttaaagtatcagtttggtcttccagccacttagcttatatttctcagccttggaccttcaatgtgggctccatgaatggatgggtgggttggtggatggataagcagatgggcagatgggtagatgtatggataggtagatgatggagtgggtgggtgatggatgggtgaatagatgtgtgtgtgggtgaatggatgtatggatggataaatggatgtgtggataggtgcaagtcagctgtaggtcaacaagtgtctacctggattctcttctgacatgatccttgtgagggaagagagcaaagagactgtaatccattgtatgtctgtgcttatagagattctatgtgttgattcaggttgaatataccctgtttttaggatccgacacatcatagagattaaaagatatttgtcgattaaatgaaatttattgggaatgatattaaaaggaattttaaaaatgaaatgtaaaggtcttgtttaagtgaacatatacctggaaattgtctcaagaggacctagaaaaatctgaacatatcggccgggctcagtggctcacgcctgtaatcccagcactttgggaggtcaaggcaggcggatcatgaggtcaggagttcgagaccaacctgatcaacttggtgaaaccctgtctctactaaaaatataaaaattagccggatgtggtggcgcacgcctgtaatcccagctactcaggaagctgaggcaggaggatcacttgaacccgggaggcggaggttgcagtgagctgagatcataccactacactccagcctgggtgacagagcgagactctgtctcaaaaaaaaaaaaaaaagaaaaagaaaaatctgaaaatctgaacataccaattaccaggttgtcaactgagggttacaagatgctaccccagaaaaaggcacagggcccagagtgttccacgggaaagttttttaaacactcaagatcatgcctgtactatacaaaatgtttcaagtgtagaagatggacacggtttctattcatttttggtgttagcataaccctgattaacaaaacccaaacacaatggcacaaaaaaggaaaaaccacagtccaaggtcacatgtaaagaaagatgcaaaaattgtcaataagagaattagcaaattaaatccagcagtgtattaaattaaagtaataacacaccatgaccaagtagagtttgtttccaggaacgcaaggatgactcaacatgaagaaatccattaatatcatgatgctaataagccaaaggaagaaaaaccatatgataatattgagaagtgccaaaaacgtatgtaataaaatctaaaatgcactaccagttataaaccgtgttgagcaggctaggactaaaaagaaacttcctcaacataagagaagatacctagtcctcagtttcctgctatctcctcacccactgagaggacttttcacgacaaccaccaaccttcttgtagccaaattcagggcacccttttttttttattagacttgaccactcagcagccttttcctgctcacccgcttgctctcactccccactcggaaacttctcttggttctccttctagtatggagtagcaaactttaacaaa

SEQ ID NO: 109 - DNA, 5175 bp, Homo sapiens
atacaccattttacaggtaaagcttccttccctcctgcctccctatgcctgctgaccaccagcaagaaattggacaggagactgaggagaaacgccgggagaggcaacaaccgccctccatgtcccccctaggtttagcttctctcctcctgatggcgcacctggtcccccttgctgctctcccagcctccctggcacagagaggcgccctggggccaaggcagtttccctgggaatgctcattcatgcatgaagtttttctctgttgcaccctggacccagactcctcaatccacccagggtggtgtctgtggggagggggttcacttccccaggaagcacagccacgccgtccctcactggcctcgtcaagcagagctgtgtgtccagtggcttttgctggggccccctccttatctccttccaaggtgggggtgtttggaggtggaggaggctttcatattccgtgccatgacccctcaaggcgggccattcgtgtgcaccctccacccccagtgccaggcagaagcccatcctcacccaggaacagggcagcctgtccaacagaagggtctcggcctctccatcagcaccgggaagccctttctaggcaaacttctcaccacttcttccctcccttatactttgaaagagggagctctaggcaggggaggggctagagggggaagccgctgcccagatcctgacaaggtgacctgaaggaacccggggagggggatgggacagggctcaggcttggggtgtatggggaggggggctttgcttttaaaagaggtcatctcagcaatatctttttgtttttccccaggggccgaagagtcaccaccgagcttgtgtgggaggaggtggattccagcccccagccccagggctctgaatcgctgccagctcagccccctgcccagcctgccccacagcctgagccccagcaggccagagagcccagtcctgaggtgagctgctgtggcctgtggcccaggcgaccccagcgctcccagaactgaggctggcagccagccccagcctcagccccaactgcgaggcagagagacaccaatgggaatcccaatggggaagtcgatgctggtgcttctcaccttcttggccttcgcctcgtgctgcattgctgcttaccgccccagtgagaccctgtgcggcggggagctggtggacaccctccagttcgtctgtggggaccgcggcttctacttcagacttccaggcaggcccgcaagccgtgtgagccgtcgcagccgtggcatcgttgaggagtgctgtttccgcagctgtgacctggccctcctggagacgtactgtgctacccccgccaagtccgagagggacgtgtcgacccctccgaccgtgcttccggacaacttccccagataccccgtgggcaagttcttccaatatgacacctggaagcagtccacccagcgcctgcgcaggggcctgcctgccctcctgcgtgcccgccggggtcacgtgctcgccaaggagctcgaggcgttcagggaggccaaacgtcaccgtcccctgattgctctacccacccaagaccccgcccacgggggcgcccccccagagatggccagcaatcggaagtgagcaaaactgccgcaagtctgcagcccggcgccaccatcctgcagcctcctcctgaccacggacgtttccatcaggttccatcccgaaaatctctcggttccacgtccccctggggcttctcctgacccagtccccgtgccccgcctccccgaaacaggctactctcctcggccccctccatcgggctgaggaagcacagcagcatcttcaaacatgtacaaaatcgattggctttaaacacccttcacataccctccccccaaattatccccaattatccccacacatattagaaacaccccacaaaagctcagaaattggctttaaaaaaaacaaccaccaaaaaaaatcaattggctaaaaaaaaaaagtattaaaaacgaattggctgagaaacaattggcaaaataaaggaatttggcactccccacccccctctttctcttctcccttggactttgagtcaaattggcctggacttgagtccctgaaccagcaaagagaaaagaagggccccagaaatcacaggtgggcacgtcgctgctaccgccatctcccttctcacgggaattttcagggtaaactggccatccgaaaatagcaacaacccagactggctcctcactcccttttccatcactaaaaatcacagagcagtcagagggacccagtaagaccaaaggaggggaggacagagcatgaaaaccaaaatccatgcaaatgaaatgtaattggcacgaccctcacccccaaatcttacatctcaattcccatcctaaaaagcactcatactttatgcatccccgcagctacacacacacaacacacagcacacgcatgaacacagcacacacacgagcacagcacacacacaaacgcacagcacacacgcacacacagcacacacacgagcacacagcacacaaacgcacagcacacgcacacacatgcacacacacacacacatgcacacacagcacacacacgcgaacacagcacacacgaacacagcacacacagcacacacacaaacacagcacacacatgcacacagcacatgcacacacagcacacacatgaacacagcacacagcacacacatgcacacagcacacacgcatgcacagcacacatgaacacagcacacacaaacacacagcacacacatgcacacacagcacacacactcatgcgcagcacatacatgaacacagctcacagcacacaaacacgcagcacacacgttgcacacgcaagcacccacctgcacacacacatgcgcacacacacgcacacccccacaaaattggatgaaaacaataagcatatctaagcaactacgatatctgtatggatcaggccaaagtcccgctaagattctccaatgttttcatggtctgagcccccctcctgttcccatctccactgcccctcggccctgtctgtgccctgcctctcagaggagggggctcagatggtgcggcctgagtgtgcggccggcggcatttgggatacacccgtagggtgggcggggtgtgtcccaggcctaattccatctttccaccatgacagagatgcccttgtgaggctggcctccttggcgcctgtccccacggcccccgcagcgtgagccacgatgctccccataccccacccattcccgatacaccttacttactgtgtgttggcccagccagagtgaggaaggagtttggccacattggagatggcggtagctgagcagacatgcccccacgagtagcctgactccctggtgtgctcctggaaggaagatcttggggacccccccaccggagcacacctagggatcatctttgcccgtctcctggggaccccccaagaaatgtggagtcctcgggggccgtgcactgatgcggggagtgtgggaagtctggcggttggaggggtgggtggggggcagtgggggctgggcggggggagttctggggtaggaagtggtcccgggagattttggatggaaaagtcaggaggattgacagcagacttgcagaattacatagagaaattaggaacccccaaatttttttttttttttgttttttttttacccctccttagctttatgcgctcagaaaccaaattaaaccccccccccatgtaacaggggggcagtgacaaaagcaagaacgcacgaagccagcctggagaccaccacgtcctgccccccgccatttatcgccctgattggattttgtttttcatctgtccctgttgcttgggttgagttgagggtggagcctcctggggggcactggccactgagcccccttggagaagtcagaggggagtggagaaggccactgtccggcctggcttctggggacagtggctggtccccagaagtcctgagggcggaggggggggttgggcagggtctcctcaggtgtcaggagggtgctcggaggccacaggagggggctcctggctggcctgaggctggccggaggggaaggggctagcaggtgtgtaaacagagggttccatcaggctggggcagggtggccgccttccgcacacttgaggaaccctcccctctccctcggtgacatcttgcccgcccctcagcaccctgccttgtctccaggaggtccgaagctctgtgggacctcttgggggcaaggtggggtgaggccggggagtagggaggtcaggcgggtctgagcccacagagcaggagagctgccaggtctgcccatcgaccaggttgcttgggccccggagcccacgggtctggtgatgccatagcagccaccaccgcggcgcctagggctgcggcagggactcggcctctgggaggtttacctcgcccccacttgtgcccccagctcagcccccctgcacgcagcccgactagcagtctagaggcctgaggcttctgggtcctggtgacggggctggcatgaccccgggggtcgtccatgccagtccgcctcagtcgcagagggtccctcggcaagcgccctgtgagtgggccattcggaacattggacagaagcccaaagagccaaattgtcacaattgtggaacccacattggcctgagatccaaaacgcttcgaggcaccccaaattacctgcccattcgtcaggacacccacccacccagtgttatattctgcctcgccggagtgggtgttcccgggggcacttgccgaccagccccttgcgtccccaggtttgcagctctcccctgggccactaaccatcctggcccgggctgcctgtctgacctccgtgcctagtcgtggctctccatcttgtctcctccccgtgtccccaatgtcttcagtggggggccccctcttgggtcccctcctctgccatcacctgaagacccccacgccaaacactgaatgtcacctgtgcctgccgcctcggtccaccttgcggcccgtgtttgactcaactcagctcctttaacgctaatatttccggcaaaatcccatgcttgggttttgtctttaaccttgtaacgcttgcaatcccaataaagcattaaaagtca

SEQ ID NO: 110 - protein, 211 aa, Homo sapiens [sequence omitted]

SEQ ID NO: 111 - DNA, 2868 bp, Homo sapiens
cgccccccagtcaccgcctcccccggcccctcgacgtggcgcccttccctccgcttctctgtgctccccgcgcccctcttggcgtctggccccggcccccgctctttctcccgcaaccttcccttcgctccctcccgtcccccccagctcctagcctccgactccctccccccctcacgcccgccctctcgccttcgccgaaccaaagtggattaattacacgctttctgtttctctccgtgctgttctctcccgctgtgcgcctgcccgcctctcgctgtcctctctccccctcgccctctcttcggcccccccctttcacgttcactctgtctctcccactatctctgcccccctctatccttgatacaacagctgacctcatttcccgataccttttcccccccgaaaagtacaacatctggcccgccccagcccgaagacagcccgtcctccctggacaatcagacgaattctccccccccccccaaaaaaaagccatccccccgctctgccccgtcgcacattcggcccccgcgactcggccagagcggcgctggcagaggagtgtccggcaggagggccaacgcccgctgttcggtttgcgacacgcagcagggaggtgggcggcagcgtcgccggcttccagacaccaatgggaatcccaatggggaagtcgatgctggtgcttctcaccttcttggccttcgcctcgtgctgcattgctgcttaccgccccagtgagaccctgtgcggcggggagctggtggacaccctccagttcgtctgtggggaccgcggcttctacttcagcaggcccgcaagccgtgtgagccgtcgcagccgtggcatcgttgaggagtgctgtttccgcagctgtgacctggccctcctggagacgtactgtgctacccccgccaagtccgagagggacgtgtcgacccctccgaccgtgcttccggacaacttccccagataccccgtgggcaagttcttccaatatgacacctggaagcagtccacccagcgcctgcgcaggggcctgcctgccctcctgcgtgcccgccggggtcacgtgctcgccaaggagctcgaggcgttcagggaggccaaacgtcaccgtcccctgattgctctacccacccaagaccccgcccacgggggcgcccccccagagatggccagcaatcggaagtgagcaaaactgccgcaagtctgcagcccggcgccaccatcctgcagcctcctcctgaccacggacgtttccatcaggttccatcccgaaaatctctcggttccacgtccccctggggcttctcctgacccagtccccgtgccccgcctccccgaaacaggctactctcctcggccccctccatcgggctgaggaagcacagcagcatcttcaaacatgtacaaaatcgattggctttaaacacccttcacataccctccccccaaattatccccaattatccccacacataaaaaatcaaaacattaaactaacccccttcccccccccccacaacaaccctcttaaaactaattggctttttagaaacaccccacaaaagctcagaaattggctttaaaaaaaacaaccaccaaaaaaaatcaattggctaaaaaaaaaaagtattaaaaacgaattggctgagaaacaattggcaaaataaaggaatttggcactccccacccccctctttctcttctcccttggactttgagtcaaattggcctggacttgagtccctgaaccagcaaagagaaaagaagggccccagaaatcacaggtgggcacgtcgctgctaccgccatctcccttctcacgggaattttcagggtaaactggccatccgaaaatagcaacaacccagactggctcctcactcccttttccatcactaaaaatcacagagcagtcagagggacccagtaagaccaaaggaggggaggacagagcatgaaaaccaaaatccatgcaaatgaaatgtaattggcacgaccctcacccccaaatcttacatctcaattcccatcctaaaaagcactcatactttatgcatccccgcagctacacacacacaacacacagcacacgcatgaacacagcacacacacgagcacagcacacacacgagcatacagcacacacacaaacgcacagcacacacagcacacagatgagcacacagcacacacacaaacgcacagcacacacacgcacacacatgcacacacagcacacaaacgcacggcacacacacgcacacacatgcacacacagcacacacgcaaacgcacagcacacacaaacgcacagcacacacgcacacacagcacacacacgagcacacagcacacaaacgcacagcacacgcacacacatgcacacacagcacacacactagcacacagcacacacacaaagacacagcacacacatgcacacacagcacacacacgcgaacacagcacacacgaacacagcacacacagcacacacacaaacacagcacacacatgcacacagcacatgcacacacagcacacacatgaacacagcacacagcacacacatgcacacagcacacacgcatgcacagcacacatgaacacagcacacacaaacacacagcacacacatgcacacacagcacacacactcatgcgcagcacatacatgaacacagctcacagcacacaaacacgcagcacacacgttgcacacgcaagcacccacctgcacacacacatgcgcacacacacgcacacccccacaaaattggatgaaaacaataagcatatctaagcaactacgatatctgtatggatcaggccaaagtcccgctaagattctccaat

SEQ ID NO: 112 - protein, 176 aa, Homo sapiens
MGIPMGKSMLVLLTFLAFASCCIAAYRPSETLCGGELVDTLQFVCGDRGFYFSRPASRVSRRSRGIVEECCFRSCDLALLETYCATPAKSDVSTPPTVLPDNFPRYPVGKFFQYDTWKQSTQRLRRGLPALLRARRGHVLAKELEAFREAKRHRPLIALPTQDPAHGGAPPEMNRK

SEQ ID NO: 113 - DNA, 5183 bp, Homo sapiens
atacaccattttacaggtaaagcttccttccctcctgcctccctatgcctgctgaccaccagcaagaaattggacaggagactgaggagaaacgccgggagaggcaacaaccgccctccatgtcccccctaggtttagcttctctcctcctgatggcgcacctggtcccccttgctgctctcccagcctccctggcacagagaggcgccctggggccaaggcagtttccctgggaatgctcattcatgcatgaagtttttctctgttgcaccctggacccagactcctcaatccacccagggtggtgtctgtggggagggggttcacttccccaggaagcacagccacgccgtccctcactggcctcgtcaagcagagctgtgtgtccagtggcttttgctggggccccctccttatctccttccaaggtgggggtgtttggaggtggaggaggctttcatattccgtgccatgacccctcaaggcgggccattcgtgtgcaccctccacccccagtgccaggcagaagcccatcctcacccaggaacagggcagcctgtccaacagaagggtctcggcctctccatcagcaccgggaagccctttctaggcaaacttctcaccacttcttccctcccttatactttgaaagagggagctctaggcaggggaggggctagagggggaagccgctgcccagatcctgacaaggtgacctgaaggaacccggggagggggatgggacagggctcaggcttggggtgtatggggaggggggctttgcttttaaaagaggtcatctcagcaatatctttttgtttttccccaggggccgaagagtcaccaccgagcttgtgtgggaggaggtggattccagcccccagccccagggctctgaatcgctgccagctcagccccctgcccagcctgccccacagcctgagccccagcaggccagagagcccagtcctgaggtgagctgctgtggcctgtggcccaggcgaccccagcgctcccagaactgaggctggcagccagccccagcctcagccccaactgcgaggcagagagacaccaatgggaatcccaatggggaagtcgatgctggtgcttctcaccttcttggccttcgcctcgtgctgcattgctgcttaccgccccagtgagaccctgtgcggcggggagctggtggacaccctccagttcgtctgtggggaccgcggcttctacttcagcaggcccgcaagccgtgtgagccgtcgcagccgtggcatcgttgaggagtgctgtttccgcagctgtgacctggccctcctggagacgtactgtgctacccccgccaagtccgagagggacgtgtcgacccctccgaccgtgcttccggacaacttccccagataccccgtgggcaagttcttccaatatgacacctggaagcagtccacccagcgcctgcgcaggggcctgcctgccctcctgcgtgcccgccggggtcacgtgctcgccaaggagctcgaggcgttcagggaggccaaacgtcaccgtcccctgattgctctacccacccaagaccccgcccacgggggcgcccccccagagatggccagcaatcggaagtgagcaaaactgccgcaagtctgcagcccggcgccaccatcctgcagcctcctcctgaccacggacgtttccatcaggttccatcccgaaaatctctcggttccacgtccccctggggcttctcctgacccagtccccgtgccccgcctccccgaaacaggctactctcctcggccccctccatcgggctgaggaagcacagcagcatcttcaaacatgtacaaaatcgattggctttaaacacccttcacataccctccccccaaattatccccaattatccccacacataaaaaatcaaaacattaaactaacccccttcccccccccccacaacaaccctcttaaaactaattggctttttagaaacaccccacaaaagctcagaaattggctttaaaaaaaacaaccaccaaaaaaaatcaattggctaaaaaaaaaaagtattaaaaacgaattggctgagaaacaattggcaaaataaaggaatttggcactccccacccccctctttctcttctcccttggactttgagtcaaattggcctggacttgagtccctgaaccagcaaagagaaaagaagggccccagaaatcacaggtgggcacgtcgctgctaccgccatctcccttctcacgggaattttcagggtaaactggccatccgaaaatagcaacaacccagactggctcctcactcccttttccatcactaaaaatcacagagcagtcagagggacccagtaagaccaaaggaggggaggacagagcatgaaaaccaaaatccatgcaaatgaaatgtaattggcacgaccctcacccccaaatcttacatctcaattcccatcctaaaaagcactcatactttatgcatccccgcagctacacacacacaacacacagcacacgcatgaacacagcacacacacgagcacagcacacacacaaacgcacagcacacacgcacacacagcacacacacgagcacacagcacacaaacgcacagcacacgcacacacatgcacacacacacacacatgcacacacagcacacacacgcgaacacagcacacacgaacacagcacacacagcacacacacaaacacagcacacacatgcacacagcacatgcacacacagcacacacatgaacacagcacacagcacacacatgcacacagcacacacgcatgcacagcacacatgaacacagcacacacaaacacacagcacacacatgcacacacagcacacacactcatgcgcagcacatacatgaacacagctcacagcacacaaacacgcagcacacacgttgcacacgcaagcacccacctgcacacacacatgcgcacacacacgcacacccccacaaaattggatgaaaacaataagcatatctaagcaactacgatatctgtatggatcaggccaaagtcccgctaagattctccaatgttttcatggtctgagcccccctcctgttcccatctccactgcccctcggccctgtctgtgccctgcctctcagaggagggggctcagatggtgcggcctgagtgtgcggccggcggcatttgggatacacccgtagggtgggcggggtgtgtcccaggcctaattccatctttccaccatgacagagatgcccttgtgaggctggcctccttggcgcctgtccccacggcccccgcagcgtgagccacgatgctccccataccccacccattcccgatacaccttacttactgtgtgttggcccagccagagtgaggaaggagtttggccacattggagatggcggtagctgagcagacatgcccccacgagtagcctgactccctggtgtgctcctggaaggaagatcttggggacccccccaccggagcacacctagggatcatctttgcccgtctcctggggaccccccaagaaatgtggagtcctcgggggccgtgcactgatgcggggagtgtgggaagtctggcggttggaggggtgggtggggggcagtgggggctgggcggggggagttctggggtaggaagtggtcccgggagattttggatggaaaagtcaggaggattgacagcagacttgcagaattacatagagaaattaggaacccccaaatttttttttttttttgttttttttttacccctccttagctttatgcgctcagaaaccaaattaaaccccccccccatgtaacaggggggcagtgacaaaagcaagaacgcacgaagccagcctggagaccaccacgtcctgccccccgccatttatcgccctgattggattttgtttttcatctgtccctgttgcttgggttgagttgagggtggagcctcctggggggcactggccactgagcccccttggagaagtcagaggggagtggagaaggccactgtccggcctggcttctggggacagtggctggtccccagaagtcctgagggcggaggggggggttgggcagggtctcctcaggtgtcaggagggtgctcggaggccacaggagggggctcctggctggcctgaggctggccggaggggaaggggctagcaggtgtgtaaacagagggttccatcaggctggggcagggtggccgccttccgcacacttgaggaaccctcccctctccctcggtgacatcttgcccgcccctcagcaccctgccttgtctccaggaggtccgaagctctgtgggacctcttgggggcaaggtggggtgaggccggggagtagggaggtcaggcgggtctgagcccacagagcaggagagctgccaggtctgcccatcgaccaggttgcttgggccccggagcccacgggtctggttgggaggtttacctcgcccccacttgtgcccccagctcagcccccctgcacgcagcccgactagcagtctagaggcctgaggcttctgggtcctggtgacggggctggcatgaccccgggggtcgtccatgccagtccgcctcagtcgcagagggtccctcggcaagcgccctgtgagtgggccattcggaacattggacagaagcccaaagagccaaattgtcacaattgtggaacccacattggcctgagatccaaaacgcttcgaggcaccccaaattacctgcccattcgtcaggacacccacccacccagtgttatattctgcctcgccggagtgggtgttcccgggggcacttgccgaccagccccttgcgtccccaggtttgcagctctcccctgggccactaaccatcctggcccgggctgcctgtctgacctccgtgcctagtcgtggctctccatcttgtctcctccccgtgtccccaatgtcttcagtggggggccccctcttgggtcccctcctctgccatcacctgaagacccccacgccaaacactgaatgtcacctgtgcctgccgcctcggtccaccttgcggcccgtgtttgactcaactcagctcctttaacgctaatatttccggcaaaatcccatgcttgggttttgtctttaaccttgtaacgcttgcaatcccaataaagcattaaaagtcatg

SEQ ID NO: 114 - protein, 211 aa, Homo sapiens [sequence omitted]

What is claimed is:

1. An isolated nucleic acid comprising at least 10 contiguous nucleotides of a sequence selected from the group consisting of the polynucleotide sequences of SEQ ID NOS: 5, 7, 9, 15, 17, 19, 21, 23, 25, 27, 29, 31, 37, 39, 41, 43, 49, 51, 53, 59, 61, 63, 69, 71, 73, 75, 77, 79, 85, 87, 89, 91, 97, 99, 101, 103, 109, 111 and 113 shown in Tables 1-9, or its complement.

2. A host cell comprising a recombinant nucleic acid of claim 1.

3. An expression vector comprising the isolated nucleic acid according to claim 1.

4. A host cell comprising the expression vector of claim 3.

5. The polynucleotide according to claim 1, wherein said polynucleotide, or its complement or a fragment thereof, further comprises a detectable label.

6. The polynucleotide according to claim 1, wherein said polynucleotide, or its complement or a fragment thereof, is attached to a solid support.

7. The polynucleotide according to claim 1, wherein said polynucleotide, or its complement or a fragment thereof, is prepared at least in part by chemical synthesis.

8. The polynucleotide according to claim 1, wherein said polynucleotide, or its complement or a fragment thereof, is an antisense fragment.

9. The polynucleotide according to claim 1, wherein said polynucleotide, or its complement or a fragment thereof, is single stranded.

10. The polynucleotide according to claim 1, wherein said polynucleotide, or its complement or a fragment thereof, is double stranded.

11. The polynucleotide according to claim 1, comprising at least 15 contiguous nucleotides.

12. The polynucleotide according to claim 1, comprising at least 20 contiguous nucleotides.

13. A microarray for detecting a cancer associated (CA) nucleic acid comprising:
at least one probe comprising at least 10 contiguous nucleotides of a sequence selected from the group consisting of the polynucleotide sequences SEQ ID NOS: 5, 7, 9, 15, 17, 19, 21, 23, 25, 27, 29, 31, 37, 39, 41, 43, 49, 51, 53, 59, 61, 63, 69, 71, 73, 75, 77, 79, 85, 87, 89, 91, 97, 99, 101, 103, 109, 111 and 113 shown in Tables 1-9, or its complement.

14. The microarray according to claim 13, comprising at least 15 contiguous nucleotides.

15. The microarray according to claim 13, comprising at least 20 contiguous nucleotides.

16. An isolated polypeptide, encoded within an open reading frame of a CA sequence selected from the group consisting of the polynucleotide sequences of SEQ ID NOS: 4, 14, 36, 48, 58, 68, 84, 96 and 108 shown in Tables 1-9, or its complement.

17. The polypeptide of claim 16, wherein said polypeptide comprises the amino acid sequence encoded by a polynucleotide selected from the group consisting of SEQ ID NOS: 5, 7, 9, 15, 17, 19, 21, 23, 25, 27, 29, 31, 37, 39, 41, 43, 49, 51, 53, 59, 61, 63, 69, 71, 73, 75, 77, 79, 85, 87, 89, 91, 97, 99, 101, 103, 109, 111 and 113 shown in Tables 1-9.

18. The polypeptide of claim 16, wherein said polypeptide comprises the amino acid sequence encoded by a polypeptide selected from the group consisting of SEQ ID NOS: 6, 8, 10, 16, 18, 20, 22, 24, 26, 28, 30, 32, 38, 40, 42, 44, 50, 52, 54, 60, 62, 64, 70, 72, 74, 76, 78, 80, 86, 88, 90, 92, 98, 100, 102, 104, 110, 112 and 114 shown in Tables 1-9.

19. The polypeptide of claim 16, wherein said polypeptide comprises the amino acid sequence of an epitope of the amino acid sequence of a CA polypeptide selected from the group consisting of SEQ ID NOS: 6, 8, 10, 16, 18, 20, 22, 24, 26, 28, 30, 32, 38, 40, 42, 44, 50, 52, 54, 60, 62, 64, 70, 72, 74, 76, 78, 80, 86, 88, 90, 92, 98, 100, 102, 104, 110, 112 and 114 shown in Tables 1-9.

20. The polypeptide of claim 16, wherein said polypeptide is expressed on a cell surface, wherein the CA protein selected from the group consisting of SEQ ID NOS: 6, 8, 10, 16, 18, 20, 22, 24, 26, 28, 30, 32, 38, 40, 42, 44, 50, 52, 54, 60, 62, 64, 70, 72, 74, 76, 78, 80, 86, 88, 90, 92, 98, 100, 102, 104, 110, 112 and 114.

21. The polypeptide of claim 16, wherein said polypeptide or fragment thereof is attached to a solid support.

22. An isolated antibody or antigen binding fragment thereof, that binds to a polypeptide according to any one of claims 16-20.

23. The isolated antibody or antigen binding fragment thereof according the claim 22, wherein said antibody or fragment thereof is attached to a solid support.

24. The isolated antibody or antigen binding fragment thereof according the claim 22, wherein said antibody is a monoclonal antibody.

25. The isolated antibody or antigen binding fragment thereof according the claim 22, wherein said antibody is a polyclonal antibody.

26. The isolated antibody or antigen binding fragment thereof according the claim 22, wherein said antibody or fragment thereof further comprises a detectable label.

27. An isolated antibody that binds to a polypeptide, or antigen binding fragment thereof, according to any of claims 16-20, prepared by a method comprising the steps of: (i) immunizing a host animal with a composition comprising said polypeptide, or antigen binding fragment thereof, and (ii) collecting cells from said host expressing antibodies against the antigen or antigen binding fragment thereof.

28. The monoclonal antibody according to claim 24, wherein the monoclonal antibody binds to the extracellular domain of the CA protein.

29. The monoclonal antibody according to claim 24, wherein the monoclonal antibody binds to at least one human cancer cell line.

30. The monoclonal antibody according to claim 24, wherein the monoclonal antibody is prepared by a process comprising:
(a) providing a hybridoma capable of producing the monoclonal antibody; and
(b) culturing the hybridoma under conditions that provide for the production of the monoclonal antibody by the hybridoma.

31. A hybridoma that produces the monoclonal antibody according to claim 24.

32. The antibody according to claim 22, wherein the antibody is a humanized antibody.

33. The antibody according to claim 22, wherein the CAP is expressed on a cancer cell surface but not on a normal cell surface.

34. The antibody according to claim 22, wherein the CAP is differentially expressed on a cancer cell surface relative to a normal cell surface.

35. The antibody according to claim 22, wherein the antibody is linked to a therapeutic agent.

36. The antibody according to claim 24, wherein the antibody is linked to a therapeutic agent.

37. A pharmaceutical composition comprising the antibody according to claim 22 and a pharmaceutically acceptable excipient.

38. A pharmaceutical composition comprising the antibody according to claim 35 and a pharmaceutically acceptable excipient.

39. A pharmaceutical composition comprising the antibody according to claim 36 and a pharmaceutically acceptable excipient.

40. A kit for detecting cancer cells comprising the antibody according to claim 22.

41. A kit for detecting cancer cells comprising the monoclonal antibody according to claim 24.

42. A method for detecting a presence or an absence of cancer cells in an individual, the method comprising:
contacting cells from the individual with the antibody according to any of claims 22 or 24;
and detecting a complex of a CAP from the cancer cells and the antibody,
wherein detection of the complex correlates with the presence of cancer cells in the individual.

43. A method for inhibiting growth of cancer cells in an individual, the method comprising: administering to the individual an effective amount of a pharmaceutical composition according to any of claims 37, 38, or 39.

44. A method for delivering a therapeutic agent to cancer cells in an individual, the method comprising: administering to the individual an effective amount of a pharmaceutical composition according to any of claims 37, 38, or 39.

45. A kit for diagnosing the presence of cancer in a test sample, said kit comprising at least one polynucleotide that selectively hybridizes to a CA polynucleotide sequence selected from the group consisting of the polynucleotide sequences SEQ ID NOS: 4, 14, 36, 48, 58, 68, 84, 96 and 108 shown in Tables 1-9, or its complement.

46. A kit for diagnosing the presence of cancer in a test sample, said kit comprising at least one polynucleotide that selectively hybridizes to the sequence of a polynucleotide sequence selected from the group consisting of the polynucleotide sequences SEQ ID NOS: 5, 7, 9, 15, 17, 19, 21, 23, 25, 27, 29, 31, 37, 39, 41, 43, 49, 51, 53, 59, 61, 63, 69, 71, 73, 75, 77, 79, 85, 87, 89, 91, 97, 99, 101, 103, 109, 111 and 113 shown in Tables 1-9, a fragment thereof, or their complement.

47. An electronic library comprising a polynucleotide, or fragment thereof, comprising a CA polynucleotide sequence selected from the group consisting of the polynucleotide sequences of SEQ ID NOS: 4, 14, 36, 48, 58, 68, 84, 96 and 108 shown in Tables 1-9, or its complement.

48. An electronic library comprising a polynucleotide, or fragment thereof, comprising a CA polynucleotide sequence selected from the group consisting of the polynucleotide sequences of SEQ ID NOS: 5, 7, 9, 15, 17, 19, 21, 23, 25, 27, 29, 31, 37, 39, 41, 43, 49, 51, 53, 59, 61, 63, 69, 71, 73, 75, 77, 79, 85, 87, 89, 91, 97, 99, 101, 103, 109, 111 and 113 shown in Tables 1-9.

49. An electronic library comprising a polypeptide, or fragment thereof, comprising a CA polypeptide sequence selected from the group consisting of the polypeptide sequences of SEQ ID NOS: 6, 8, 10, 16, 18, 20, 22, 24, 26, 28, 30, 32, 38, 40, 42, 44, 50, 52, 54, 60, 62, 64, 70, 72, 74, 76, 78, 80, 86, 88, 90, 92, 98, 100, 102, 104, 110, 112 and 114 shown in Tables 1-9.

50. A method of screening for anticancer activity comprising:
(a) providing a cell that expresses a cancer associated (CA) gene encoded by a nucleic acid sequence selected from the group consisting of the sequences SEQ ID NOS: 4, 14, 36, 48, 58, 68, 84, 96 and 108 shown in Tables 1-9, or fragment thereof;
(b) contacting a tissue sample derived from a cancer cell with an anticancer drug candidate; and
(c) monitoring an effect of the anticancer drug candidate on an expression of the CA polynucleotide in the tissue sample.

51. The method of screening for anticancer activity according to claim 50, wherein the CA gene comprises at least one nucleic acid sequence selected from the group consisting of the sequences SEQ ID NOS: 5, 7, 9, 15, 17, 19, 21, 23, 25, 27, 29, 31, 37, 39, 41, 43, 49, 51, 53, 59, 61, 63, 69, 71, 73, 75, 77, 79, 85, 87, 89, 91, 97, 99, 101, 103, 109, 111 and 113 shown in Tables 1-9.

52. The method of screening for anticancer activity according to claim 50, further comprising:
(d) comparing the level of expression in the absence of said drug candidate to the level of expression in the presence of the drug candidate.

53. The method of screening for anticancer activity according to claim 51, wherein the drug candidate is an inhibitor of transcription and further wherein the nucleic acid sequence is selected from the group consisting of SEQ ID NOS: 5, 7, 9, 15, 17, 19, 21, 23, 25, 27, 29, 31, 37, 39, 41, 43, 49, 51, 53, 59, 61, 63, 69, 71, 73, 75, 77, 79, 85, 87, 89, 91, 97, 99, 101, 103, 109, 111 and 113 shown in Tables 1-9.

54. A method for detecting cancer associated with expression of a polypeptide in a test cell sample, comprising the steps of:
(i) detecting a level of expression of at least one polypeptide selected from the group consisting of SEQ ID NOS: 6, 8, 10, 16, 18, 20, 22, 24, 26, 28, 30, 32, 38, 40, 42, 44, 50, 52, 54, 60, 62, 64, 70, 72, 74, 76, 78, 80, 86, 88, 90, 92, 98, 100, 102, 104, 110, 112 and 114 shown in Tables 1-9, or a fragment thereof, and
(ii) comparing the level of expression of the polypeptide in the test sample with a level of expression of polypeptide in a normal cell sample, wherein an altered level of expression of the polypeptide in the test cell sample relative to the level of polypeptide expression in the normal cell sample is indicative of the presence of cancer in the test cell sample.

55. A method for detecting cancer associated with expression of a polypeptide in a test cell sample, comprising the steps of:
(i) detecting a level of activity of at least one polypeptide selected from the group consisting of SEQ ID NOS: 6, 8, 10, 16, 18, 20, 22, 24, 26, 28, 30, 32, 38, 40, 42, 44, 50, 52, 54, 60, 62, 64, 70, 72, 74, 76, 78, 80, 86, 88, 90, 92, 98, 100, 102, 104, 110, 112 and 114 shown in Tables 1-9, or a fragment thereof, wherein said activity corresponds to at least one activity for the polypeptide listed in Table 11; and
(ii) comparing the level of activity of the polypeptide in the test sample with a level of activity of polypeptide in a normal cell sample, wherein an altered level of activity of the polypeptide in the test cell sample relative to the level of polypeptide activity in the normal cell sample is indicative of the presence of cancer in the test cell sample.

56. A method for detecting cancer associated with the presence of an antibody in a test serum sample, comprising the steps of:
(i) detecting a level of an antibody against an antigenic polypeptide selected from the group consisting of SEQ ID NOS: 6, 8, 10, 16, 18, 20, 22, 24, 26, 28, 30, 32, 38, 40, 42, 44, 50, 52, 54, 60, 62, 64, 70, 72, 74, 76, 78, 80, 86, 88, 90, 92, 98, 100, 102, 104, 110, 112 and 114 shown in Tables 1-9, or antigenic fragment thereof, and
(ii) comparing said level of said antibody in the test sample with a level of said antibody in the control sample, wherein an altered level of antibody in said test sample relative to the level of antibody in the control sample is indicative of the presence of cancer in the test serum sample.

57. A method for screening for a bioactive agent capable of modulating the activity of a CA protein (CAP), wherein said CAP is encoded by a nucleic acid comprising a nucleic acid sequence selected from the group consisting of the polynucleotide sequences SEQ ID NOS: 5, 7, 9, 15, 17, 19, 21, 23, 25, 27, 29, 31, 37, 39, 41, 43, 49, 51, 53, 59, 61, 63, 69, 71, 73, 75, 77, 79, 85, 87, 89, 91, 97, 99, 101, 103, 109, 111 and 113 shown in Tables 1-9, said method comprising:
a) combining said CAP and a candidate bioactive agent; and
b) determining the effect of the candidate agent on the bioactivity of said CAP.

58. The method of screening for the bioactive agent according to claim 57, wherein the bioactive agent affects the expression of the CA protein (CAP).

59. The method of screening for the bioactive agent according to claim 57, wherein the bioactive agent affects the activity of the CA protein (CAP), wherein such activity is selected from the activities listed in Table 11.

60. The method of screening for the bioactive agent according to claim 57, wherein the bioactive agent is a modulator of ion transport and further wherein the nucleic acid sequence is selected from the group consisting of SEQ ID NOS: 59, 61, 63 and 71 shown in Tables 1-9.

61. The method of screening for the bioactive agent according to claim 57, wherein the bioactive agent is a modulator of ATP binding and further wherein the nucleic acid sequence is selected from the group consisting of SEQ ID NOS: 5, 7, 9, 39, 41, 69, 71, 73, 75, 77 and 79 shown in Tables 1-9.

62. The method of screening for the bioactive agent according to claim 57, wherein the bioactive agent is a modulator of transcription and further wherein the nucleic acid sequence is selected from the group consisting of SEQ ID NOS: 20, 22, 26, 28, 30 and 32 shown in Tables 1-9.

63. The method of screening for the bioactive agent according to claim 57, wherein the bioactive agent is an inhibitor of cell adhesion and further wherein the nucleic acid sequence is selected from the group consisting of SEQ ID NOS: 39, 41, 69, 85, 87 and 91 shown in Tables 1-9.

64. The method of screening for the bioactive agent according to claim 57, wherein the bioactive agent is a modulator of signalling and further wherein the nucleic acid sequence is selected from the group consisting of SEQ ID NOS: 17, 21, 25, 29, 31, 39, 41, 49, 51, 53, 69, 71, 73, 75, 77, 79, 85, 87, 89 and 109.

65. The method of screening for the bioactive agent according to claim 57, wherein the bioactive agent is a protein tyrosine kinase agonist or antagonist and further wherein the nucleic acid sequence is selected from the group consisting of SEQ ID NOS: 49, 51, 53, 69, 71, 73, 75, 77 and 79.

66. A method for diagnosing cancer comprising:
a) determining the expression of one or more genes comprising a nucleic acid sequence selected from the group consisting of the human genomic and mRNA sequences outlined in Tables 1-9, in a first tissue type of a first individual; and
b) comparing said expression of said gene(s) from a second normal tissue type from said first individual or a second unaffected individual;
wherein a difference in said expression indicates that the first individual has cancer.

67. A method for treating cancers comprising administering to a patient an inhibitor of a CA protein (CAP), wherein said CAP is encoded by a nucleic acid comprising a nucleic acid sequence selected from the group consisting of the human nucleic acid sequences in Tables 1-9.

68. The method for treating cancers according to claim 67, wherein the inhibitor of a CA protein (CAP) binds to the CA protein.

69. The method for treating cancers according to claim 67, wherein the inhibitor is a modulator of ion transport and further wherein the CAP sequence is selected from the group consisting of SEQ ID NOS: 60, 62, 64 and 72 shown in Tables 1-9.

70. The method for treating cancers according to claim 67, wherein the inhibitor of a CA protein (CAP) is a transcription factor antagonist and further wherein the CAP sequence is selected from the group consisting of SEQ ID NOS: 20, 22, 26, 28, 30 and 32 shown in Tables 1-9.

71. The method for treating cancers according to claim 67, wherein the inhibitor is a modulator of ATP binding and further wherein the CAP sequence is selected from the group consisting of SEQ ID NOS: 6, 8, 10, 40, 42, 70, 72, 74, 76, 78 and 80 shown in Tables 1-9.

72. The method for treating cancers according to claim 67, wherein the inhibitor is a protein tyrosine kinase antagonist and further wherein the CAP sequence is selected from the group consisting of SEQ ID NOS: 50, 52, 54, 70, 72, 74, 76, 78 and 80 shown in Tables 1-9.

73. The method for treating cancers according to claim 67, wherein the inhibitor is an modulator of cell adhesion and further wherein the CAP sequence is selected from the group consisting of SEQ ID NOS: 40, 42, 70, 86, 88 and 92 shown in Tables 1-9.

74. The method for treating cancers according to claim 67, wherein the inhibitor is a modulator of signal transduction and further wherein the CAP sequence is selected from the group consisting of SEQ ID NOS: 18, 22, 26, 30, 32, 40, 42, 50, 52, 54, 70, 72, 74, 76, 78, 80, 86, 88, 90 and 110 shown in Tables 1-9.
